United States Patent Application Publication US 2024/0093182 A1 - sequence listing, part 14

SEQ ID NO: 29340 - DNA, 1326 bp, Artificial sequence
  DNA replication origin
gccagccaccaggagcctttgcccgggagtggccccactctggacacggcagtggccctatccgaccgtagtgacgcaagtctgataagctctgtgggctgccccgggagtctgggacggcagggaacccagtgttaccaaactcatcaccgccttccacaacacacacaacccccgcctctgggggagaccaaggcagctgacggccacgtgtttccctgggggactctgcccagggcccaggtcggcacaggctcctcctgtacctgcttcctttccctggcaaaagctgctgtccccacgtacgaggcatttccagggaagtgggggtcagaaacggacggccctgggcggttacagtcgcgccacctgccctggccacccccactgctggtaaaggctcctgccccagccagtgccagggtggggccaccatggcagggggccagagagacagagagggcagagagggctgagagggctcagtgcccctgaggccgtggcctggaaagagggagacggggctgtggtggggatgggcatttggaatgtgtgtcctgtgtgtgtgtgtctgtgtgtttgtgtgtgggggggtctgtgcctgtctctgtgtgtctctgcccctgtgtgtgtgtgtgtgtgtttgtgtgtgggggggtctgtgcctgtctctgtgtgtctctgcccttgtgtgcgtctgtatgtttgtgtgtggggggtctgtgcctgtctatgtgtgtctctgccccgtgtgcgtctgtgtgtttgtgtgtggggggtctgtgcctgtctatgtgtgtctctgcccctgtgtgtgtctgtgtgtttgtgtggggggggtctgtgcctgtctctgtctgtctctgcccgtgtgtgtctgtgtgtttgtgggggtactctgtgtatgtatccatatgtgtatcgcatatgtgtatgtgagtctgtgcttgtatccacctatgcgaggatgtttggcttctgtgtgtgtggctgtgtgtggtatgtttgtggtgcagacagggtctgtgtctgtctgcacgtggccctgtgcttgtaagtctgtgtatccacgtgcatatcgtgtgcttgggaaaaatctatgcaggtgtgtgtgtgtgtgtcacgggtttctgtgtgtgtatctgtgtgtgtgctgggtctgcccatgtgtctgcgtatgtgtgtgtgtgtctgacttacgcgtgcacccgtgcctatgccatgtctgtgagctgtgtctccgagtgcctgctttcgtctgtgtgtttgcgtgtatgtactgtgtctgtgtctgtctcgtgcgtctgcatgtctggacgtgccccc

SEQ ID NO: 29341 - DNA, 999 bp, Artificial sequence
  DNA replication origin
ctatgtgtcctcccagcctggagtgagtgtctgggagggccacaggtatgctggccacggcctggaagagtccgctcagagcaggtgctccagggagattctggagtgaacaggtgtgtggcgggtgggtggagggacgaaagggcgaatgaatgagcgctggccgccttctcccggcaggcctggggaccctggatccccgaggcagcccagggcagggtgattgtgctcctgccccacggtgccccacggttaccaccgccacggcagggccagtctctttgtctctttcatgagcggcagcctccaggcacccgcccggcctccctccccgctccccgcaggccctgtcaggtcagcggcgccttatccatcgccccacggtggctgcatgtgcgtatgtgtgtgggtgtccacatgtgtcaggttcacatgaatctgtgtacctgtgtctgtgtgcacatgtggttctcagtgtgtatgtgtgtggtgctgtatgtgttggtgtgtgcacgcgtggccctcagtgtgtagtgtgtgtcagtgtgcatgtgcgtggttgcatgtggccctcggtgtgcagtgtgtgtcagtgtgcctctgtgtgttcacgcgtggccctcggtgtgcagtgtgtgtcattgtgcctgtgcatggtcgtgcgtggtcctcggtgtgcagtgtgtgtcagtgtgtatgtgcgtggttgtgtgtggccctcggtgtgcagtgtgtgtcagtgtgcctctgtgtggtcgcgcgtggccctcggtgtgcagtgtgtgtcattgtgtatgtgtgtggttgtgtgtggccctccgtgtgcagtgtgtgtcagtgtgcatgtctgtgtctgtgtccatgtgcatttttgtgtgcacatgtatgattgtgtgtgggtgtgtggctctcagtgtataatgtgtgtcagtgtgtgcgtgtgtgtgtgtgtgtgtgcgcgcgcgcgtgcacaggtagctcctagcgtgttgtgtggtg

SEQ ID NO: 29342 - DNA, 982 bp, Artificial sequence
  DNA replication origin
atgaacagatggatgggtgggtagatgggtgagtggatgggtgggtggatggatggatggatggattggtgagtggatgggtaagtggacggatggatggatggatgtatggattggtgaatgaatgggtgagtgggtggatgggtgggtggatggatggatggatggatggagggatggatggttggatacatacatgggtggatggatggatggatgaatggatgtatggctggatggatgggtgagtggatgggtgggtggatggatggatggatggatggatggatggatggatgaatggatgtatggctggatggatgggtgagtggatgggcgggtgggtggatggatggatggatggatggatggatggatggatacacaggtgggtggatggatggatgaacagatggatgagtgggtagatgggtgagtggatgggtgggtgggtgggtgggtggatggatggatggatggatggatacataggtggattgatggatgggtggatgaacagatggatgagtgggtagatgggtgagtggatgggtgggtggatggatggatggttggatggatggatggatggatggatacataggtgtgtgggtggatggatggatggatggatggatggatggatgggtagatgggtgagtagatggatggatgggtggatgagtggatagatgggtggatggaaggaaggaaggaaagatggaaaaagggcaggcaacatctgggtttctttccttcccttgactcagttctgactactggtgaagaagtggggcagctggtggctctgcactgggggttggattgagccaggacaagtgactgggtgatgaggttgtggttagatggggaatccccagggaaaatcataggtgtcctgaatcctacaaggtaaagaagtgttctttgggaatagatcatgaaggaaaaaaaagagagagaaatgttccacgatgttgag

SEQ ID NO: 29343 - DNA, 1244 bp, Artificial sequence
  DNA replication origin
tgcttcgctcctagaagagcccctggcaggtggtgagtgttccgtgagtgcgggctgcggttatcatgattaatattaccattaatattgctgagaagtcaagactggccagggcagaccctgggccccaggccactgcacacccagctacagggggctgtgccctggagctgcgccccatggagtgtgacctgccaagtcacactgggcgcacagcagcccctgagcaggcccagcgcaaacacaggggcctcctgcagggaccttgtgtcacggccacacggagctactgactgctgacacctgcgtcttcgccgccacaccggccctgcaaatcattaatgcttattctttcaaaggcaaaaaaacggagaatgatccgccagacgccccacaggccctcccctccctgctgaggttttgggatcatcaaagagatgggaaaacaggaagtgtagggttgtgtgtgtgtgtgtgtgtgtgtgtgtgtgtgtaattgtgtgtgtgtgtttctgtgtatgattttgtgtgtgtgattatatgtctgtgtgtgtcgtgtttctgtgtactgtgtgtgctttcgtgtatgtctgtatgtgtatctctgtggccgtgtgtgttgcatgtatgtctttgtgtgtgtctctgcatgtggttgtatgtccgtgtgttgtatgtctctgtgtgtagttttgtgttgtgtgggtgtgttgtgtgtgtctgtgtggttgtgagcctgtgtgttttgtatgtctgtgtgtgtgttgcgtgtggttgtgtacctgtgtgatgcatgcgtctgtgtatgagtgtatgtctatgtgttgcatgtctctgtgtgtctgtgtgttgtgtgtgtctctgtgtctgtgtatgttgcgtgtgtctctgtgtgtttttgtgtgtttgtatgtgttgtatgtgtctgtgtctctgtgtggtgtgtctctgtatgtggttgtgcacgtgtgtctctgtgatgtgtgtgtctctgtgtgtgtggtgtgtgtctctgtatgattttgtgtctgtgattatgtgtttgcgtgtggtgtgtgtgtctctgggtctgtgtatgttgtgtgtgtctctgtgtgtgattgtgggtctgtgtgtctgtgtgtgtgcggaaggggtcataatggagacctagctttgaccttgcgcatctgtgtgtgtgagaggaggcagccggcaaggttggtttgagcatctacatcagtgcgggtgcagatccagagacc

SEQ ID NO: 29344 - DNA, 1416 bp, Artificial sequence
  DNA replication origin
gccagtaacatgcaaagtcacagaggtggggctgaaaggtccaacctccaaggcatgggaccccagggtcgccccaggcacggctccctcagaagcagaggatgatgcagcccactcgctgcctttcctggcacactgcttgtctcgtctactgctctttggccatctcctgtgtttctcctggctgcccatccagatcagcccttagcacaagccccgcctcctccaggaagccctctctgactgctgtagcccagcctgctcaggaacaggcacacacaggccagcagccttcctgcccctcccaggagccagacccagcctctcagcatagagaagccactgctgtctgtgggacgttggggacaggcaccatcaagaggacacagtctagtgccaaaaggagagagagtccttccaaggtactgatgcaggatccccctggccactatatgaggaatagaaaaagggggacaagccggcaagcagggagccaccagaagactgctgcagggatccaggcaggaccagggtggcagctttgtagggagggattggatttgggaaacgttttgagcatagagctgtcaggatttgctggcggagcagaggtgggataggagagagagagaaccttagaacatctccaagtctgttgacttgagcggctggaaggttagtgttgccaggaggagcaggtttgggggtgggagaggcgctggagctccgtcctggccatgtgagagctgccgtgagacactgtgcggagatccaactggcagttggatatttgagtctggagctatgaatgtgggcgtcccagcgcacagatggcgtgtaaagctgggagactggggagacaccttgggagtgagtgacgtgatgggagcccaggcaccgagcctggggattctgacagtcagaggctgccttagtctctgcagggacagcagtgagggtgcccgggccctgcccttacaaaaggttcacctcatagagggcgctagaggccacctcaggaggcaacatttagagtcggggtcagggtttgagaatataccagatggccgggcgtggtggctcgtgcctataatcccagcactttgggaggctgagatgggaggactgcttgagcccaggagtttgagaccagcctgagcaacatagtgagaccctgtctacgaacaaaagttagccaggcgtggtggtgcacatctgtggtcctagctactcgggaggctgaggtgggaggatcgcctgaccctgggaaatcgaggctgcagtgagccatgactgcatcactgtactccagcctgggcaatagagcaaggctgtgtctcaaaaaaaaaaaacaaaaaacaaaaaacaaaaaataacattatgccagaacatgccagcctttctcatgcctcgggt

SEQ ID NO: 29345 - DNA, 1297 bp, Artificial sequence
  DNA replication origin
acacactttcacagcgcccactgcgtgccgggctctgtgctcaacaccaaacatatcaattcatttaatcctcccaacgcccccgggtaataacagtaggctctgttatgattcccattttacagagggggccactgaggcctagagcgtcacgtggcacaggcggtggcggcgcagacgctgcagcccgactgcagcgcgccccctgcaggacagcgcggtctcacaccgcgggtgaagccgccatcgccgccgcagccggtaggggcgcccccgtgtggaggcccgcggcactgcagctccaggctgcggccgggtgccctgcagcctctctagaggtcctggtgggaggcccttacactccacccagggcgagaggaagccacctgcccttggctccccaagggaaggcagctgctggctagccacccctgagagtgctgacggatcacaggtgtggtcatagtggaatctgagcaccagcatgcccggtgggccgagtgggctggcctcatctgctgcaggccctccagtgtttgtgagtcgcgtcactggaggacgcatggtggtgacacaaaggaggcacatgggccctgagtgaccagagagcaatggtgccaccccccttggccctggaagccccagggtcctccgcagcggggacttcctccgaggagacatggcgatggggagggaggacaagacagaagcaaatcctgcctgatcctgtgttagctttccagggctgccagagctacaaactgcgtggcttagatcaacagaagtacgttccctcacgatcctggacacccaaagttggaaatcaaggtgtccgcagggccacactccctccagaggtactagggcgacaacctgggcgacagggcaaaaccctgtctcaaaaaacaaaaagcacacaaaaagaaatggggtctcgctgtgttgcccaggctggtttcgaactcctggcttcaagcagtcctcctacttcagcctcccaaagcactgggattataggcatgagccaccacccgtctggcctgagcacactgctcagtgtctgccagggcacccgtcagacccctctagacactttagggcagggacttgttctgttcagcatccctggccccgatgtcaagctcagcattcacagacccatgataactgccagctgggcctcagaggggccttcctagctcagactttgcccctgctgtccctcagttctgttccagcccagtccccccgactctgaccctcccagagcagtggtggtcagccctggctgcccact

SEQ ID NO: 29346 - DNA, 1563 bp, Artificial sequence
  DNA replication origin
agccagcagctgccttcccttggggagccaagggcaggtggcttcctctcgccctgggtggagtgtaagggcctcccaccaggacctctagagaggctgcagggcacccggccgcagcctggagctgcagtgccgcgggcctccacacgggggcgcccctaccggctgcggcggcgatggcggcttcacccgcggtgtgagaccgcgctgtcctgcagggggcgcgctgcagtcgggctgcagcgtctgcgccgccaccgcctgtgccacgtgacgctctaggcctcagtggccccctctgtaaaatgggaatcataacagagcctactgttattacccgggggcgttgggaggattaaatgaattgatatgtttggtgttgagcacagagcccggcacgcagtgggcgctgtgaaagtgtgtgttaaaccaagagaaacaggaagggcagggctgggcagttcggagtgcaagcaggcaccctcctgtctcctggacggggacccccgccagcgatttgggcccaagactggggtccctgggggggtctctcgggccctggccccagattgcagggggatgggagcctagggcatcctgcgggggtcctgctttccacagggtcaccccaatttccacaccctctggacactcagcaccgggagatgcaccccagaaaagagcacagcaagcaggggctccaccgcctcattcaaccaggagaaagctggggcacagagaggggcagggcctggccccaggatgctcagcccaagctgggtctcaaacagcagccccaactccttcatgacttgttaattcaacaaacagctgcacagcgattttctgaccaggcggggaggagaaggcaggttttcggggctgctggcagctgctcatttgcaggcccgagcttgtgaacggtttccacctgggggcgtcgggggtgcttccaggtaccatttgttcctgcctggagggagccccttccctcggggaaccaagggctggtggcttccggtcgtcctgggtggaggcttagggcctcccaccaggaaccccagagaggtagatggggagagggtagctgtgtttccatgcttgtatttttggggggaatggcttccggggtgaggggccgacttcagggcctttttcctaaaagaagcttcaaggccggcctcctctggcaggcccatgctgagggctttcgaagggatcccgttcagccccacagcaccccccttgaggtaggtgtgatcattgtctttccgggggcccctctcccatgtaggctcatagtgggcagaactcccgccccacggcccatgtacaggaacagcccagcatggaaaagctgcacctctgacccaggcaggccatcatcgaacccccatgtccccagggtgtgcccgggtcatcctcgcaccccacctcggccccctcctcccctggtccctggctgggctgcagccacagcttcttctaatgggttaagtgactttgcatcagacacaatcccgttgacattatcggcatgaataaaagatgagatctgctagg

SEQ ID NO: 29347 - DNA, 1253 bp, Artificial sequence
  DNA replication origin
ttcctaaaagaagcttcaaggccggcctcctctggcaggcccatgctgagggctttcgaagggatcccgttcagccccacagcaccccccttgaggtaggtgtgatcattgtctttccgggggcccctctcccatgtaggctcatagtgggcagaactcccgccccacggcccatgtacaggaacagcccagcatggaaaagctgcacctctgacccaggcaggccatcatcgaacccccatgtccccagggtgtgcccgggtcatcctcgcaccccacctcggccccctcctcccctggtccctggctgggctgcagccacagcttcttctaatgggttaagtgactttgcatcagacacaatcccgttgacattatcggcatgaataaaagatgagatctgctaggggtggctgtcaggatcctccccgcacaggcgaggctcccggcaagactgacagtaagaggctctgcgggaaggagctgggcggggcgggggggggtgcccctgtggagccactaaatgagggatgtcggttcctcccccggaggcctggtggatgggagaagcctggggcccacgcgggaggcagtgtggggtggggctgagcaaggaagggaggaggaggaggagcagcgtgcgggagtccccttgtacacacgttcacggagcagccactgtgggccttgccctgttctggccaaaagaaaaaaaaaaaaaagcagacagtaggagagagaaaggggcaggagagagggggcgttctggccgcaagaagcggcattctgacctgaaggaggcgagaggagagagatccaggcagaggccctgcaggtgcagaagccgcttggggacttgggaggccggagccagggagtgaggagagaggggtttgggggcgctgctgccctgggtttggactcagcagactctggaaagcaggcattggaggaagggcggctgaaccctctggctgctcattaaccaggcctgacgctcggggctccaggggtggggccgcaccccgcttgctcacctgcctggctgctttatcttgacaacagattgcacaaaccccagagctaatattgaacttgcctggcttttaaatagcacctgtaaacaccactactcccagcccctggtccacacatccctgcccaaggaggcattgaggtgaggctggccccaggcactgcctcgcaagcactgaagtggagcagagtcagctccccaggaaccagatcctcat

SEQ ID NO: 29348 - DNA, 1400 bp, Artificial sequence
  DNA replication origin
tctgaacatcctagactgagacctcacaatatcatccctttcttttagatggggaaactaaggcatggagcggtggagtttcctgcccacagttgttcagcttgtcagtggcgaggccgggattcaaactttagacagtcatgctctggaatccacacttttaaccaccactctctaagaatgaatggaaaatggatggatggatggatggatggatggatggatggatggatggatgggtagatggatgggtgaatgagagggagggaggaaggaaggaaggaaggaagggtagatgtatgtatggatggatgaatggatgggtgggtggggtggatggatgtatagtggatagatggatggctggatggatggatggatggatggtagatggtgggtgaatgaatgtggatggatggatgagtgaatggatgaatggatggatagatgggtgggtgaatgggaggaaggaaggaagggtgggtgggtagatgtatatatggatggatggaagaagggtgggtgggctggtggatgaatggatgatagatggtgggtgaatgaatgtggatggatggatgagtgaatggatgaatgggtgggtggaaggaaggaaggaagggagaaagggagggagggagggagggtagatgtgtatatggatggatggatggaagagtgggtggaagggtgggtggatggatggatgattgaatggtggatggatggggggtgaatgaatgtggatgggtgaatgaatggatggatggataaatggaagaaggacagatgtaggtagatgggtaggtgggtggatgggtgaatggaaggaaggaaagaagaagggaggatgggtagatgggtgggtggatggatggatggatggatggatggtagatggaaggatggatggatgaatgaaccacagaaaaatatcctcttaagctatgttatttccagtcactgggagtgtgctaaattaaccctggcttcagcccacttctggtggctcatgcatcctcatcttttattttgtagggagaagtgcttgaaaaatgtctggtgagggtagaacagaacatggactgtggtgtgtcccatagaccttggtttgaatcctgactgtgccccttactgttgagtgacctgggggcctcagtttgcctgcctaggaaatggagctatgaggctgtccccgcttctgtccccacctatgagcccagacctcacattgggaacaggctcagtatgtggtggctatgcagtgtcaaccccagcaccagcactgtgagtcctggggtcctgggagtgggacagcagctgcccgcaggttcaggcaaattcagcccttggagaagtatctcccagaccctccagggtgcctgagttcaaagcaaagc

SEQ ID NO: 29349 - DNA, 1496 bp, Artificial sequence
  DNA replication origin
taatcattttggaacaggaggtccccattttcattttgcactggggtccctccagccccatagccccgattccctgtccaggtcaggcagaggcccaggcaggctgagatgtggcagcagggcctagatgcccagagcctcggccctgcacacgccaggaggtgccctttatggagcagcctcctggggggcctggcctgggtcctccttctccccagctctagagatggagacctgtgccctcccaccaccccctcccccactgtggtagaaattcctcttagactgtgccctccatggaggagcagccttccagggggcccggcctgggtcctccctctgcccagctctagagatcgagacctgcaccctccctccctctccctcgactgcagcggaaattcctctgagcctgtgccctagatctgtcacagccccccgcagcaggtgcgcccatctgacttctggggcgggtcctgggggaggggctgggggctgagggaggggaggggtctgttgctttcctgctgcccctgcaactcctccccttgagtgggttttgaggggggatctgggcttgatgggaatgtctgagagggaaggggagagggagagacggtgtaggatgaggatggcctgggaatgggcagcagaaattccctctcctgacgtctccacgcagctctgtgactccatccctgcctgtgtgtacctcaatttcctcatctgtgcaagaggcctgggctgagggttgaccaggggccgtgcacccagtgggcccttcggctgtaggtggatctgtgggtcccatgttccccaggcaggaagctgaggccacaggggacttgtgtgtgcctaagtccttggtaccccaccagccccatgtagtcaccccagaaggcaggtggggtctggggctcccggatctcaccagtgtggttggcgtgggtctgcatttccagggccagaaccctgctgggcagcttccagaagcttctttaagctgtctgcatcatcgtaccccccaacctctacagccttccagaaacgttaggagtcaggggtcactgagtggccttgcccagccctgggttaatggggtagctccttgaacttcctgttctctcctccaaaagttcacccctaaactcctctcctctccttcccttgctcttagcaaagcagcccgtgaaggtatcagagcgcaggagtcctgcaagccagcttttcttattccagttctgcaggtagggaatttgcccagagagctcaagacactgtctccggccactgtggatcctggcccagcccatcctagccctgagtccagccccagcatcccggcgtctctgctcagtcagccacactccagtgcgattctgccaatctgccctctccctggttgatctttcattttacttggggtaactcttagcctagaatgcaggaggtggaatttgtttttcccaggaacagggggcctcccttcctctgtg

SEQ ID NO: 29350 - DNA, 1963 bp, Artificial sequence
  DNA replication origin
tgcttaaaaaatgtggggatggggaggggaggttaccgtcgaggtcgacgcggcggagcccgggcagaggcctactcccctccccagcgacttttggcctctgagcagatggcgggggcgggggcatgggcgcagccggccggtctcacaagctaccacacccatgaaatttcccattaagggaggtggggcgacgaggcggcctgcccctccccacagtcccccaaccctctgaggccatctgatctccctccctgcggacgcctccgccgccgggctccccaaggaggctcctggggtcacagaggccccctgcacgccctccaaacaatcttcaacccccaaaagaagtgggggaggggcgaggagtgccgaggaggcctttttacatgtaaatagaagaactggcctcctggaaggcttttttccctcttctcatttttatttctagaaagcaggatgttgccaagacccggggcctcctgctggaccgggaggcagccgtatggtgcctgggaggagaaataaggaaataatgacatctagggaggcggcacccacacccaccctgggggaggagggagctacgtgtttgcacagccctgcgggttctaccaaggagaaggacgaggaggggcagccacatgctcgggggattgggatcggagaccaggaagggatctgggctggagcctcagcctgcgcaggagccgcctgtcctacctgtctcctgccccacctggacctgtttccccacttaaaaaagtcaatctgcctcctagttaccttcctcctgtctaggaatccacagatcagggctgggggatccaggaggccgaacaccaccgcctagagctagcaggggctatgttcagtggttggaccggctctgggtttaaatctccctcccaccctttcgctgtgtggtgtcaggcatgttgctgaacctttctgagcctgcctccttgatgacaatagtacctgcctcccatcatagggttgcatggggattaagtcacttatgtgtggaaggtgcataaataacagctattctaactagtgttattactgctcaggagctagttccgtgtccgaagctcttccaggctcatctgggggaggcgggagaggggttctgttctcagcaccccaggggctgcctacctttctctgtgtcccccggataggatactgtgttttcgtctctgcctcccccgtcagtctgtgagcccccacggggtacctaacacaggtagacactctgtagagtgtgtggaatgagagagtgaatgaatgaagacttgatactccagatgctggaggattcagcccagcccgggggaccttgcaaggccatgcggtggtgtctttccgggtctgtgctgctccttgctggggaaagtggggagtggtggcctctggggagggacaggaggcggaggggcgcaccccgctctgttcttggtacccgcgcctgcccagaggtccttcgtgggcaacatcagctgccgcctggagaggctctgtggtggtggacctgctctaaacgctgcctcacttaatcctcgggacaatctagaaggtaggtgctgtcagcctcttcttttacagatggggaaactgagacccacagcagtggagtcacttgcccatgctcttacagctcggaagggagtcaccagaattcacaccaagcagttgcttccagagcctgcgtgtcccagccacagcctcttgggcctctgttttttgaatgactgcttgagcgagtgatcgctgccttgagttcttggggaactttgtataaagtaggtgtgagcacctgagtttcaggggtgaagaagcaaagggtgctgggacactcagctgtggctggcagagctgggaccagccctcaggtctgtgggcactgtctgtgcagctcccgtactgaccactgcgtcctgggaatctacccgtgcag

SEQ ID NO: 29351 - DNA, 858 bp, Artificial sequence
  DNA replication origin
cactcgcctctccactgtgctagcagcagtggcggccacacctggtgtcagcctctaattaccgcacgtggcagctgctcccgggagaggagagcaagcagcaaggggccccatgggggagggcagtcaggtgtgtggcaccccgatgcccagtctcaggtggctcagaacaagggggccctgtggggtgccaccagcgattcaggctggaagataaagccagggaagatcaagggcaaggcgtgcagaaaagacagcccccgctcccctgcctgcgtgcggcgggaaacctgaagcatgaaaagcggctcaagatctggctgctgcggagccggcgacacacctgggcctcctgtgacaacgtgggcagtggggaggcgggggaggcacagccagcgccgcgggaaggggcatgggcgggacaccccagggtcagcaatcctgagcttctgctcccacagtggaaacagtcccttggaggctggagggggcggaggagagggactggggcaggggcccagcacagcgatggcatgagagatcaggcctgtgctggatgctggttcagtgggtcacaggaggcagcttttctagcaacacggagcccggctatagcgtgtgtgcacgtgtgcatgtgtgcacatgcatggagagggttgaaggacttaccccaagcagacggcagaggtcctggggacacctgcaaccagggcactgccaagctggcaggccgtgacctttgccctctggaccataacccaggaaacagaatgccccagaagcccctccccagggttcctcaggctgtccggtgttgcctctccaactaaaccagactcggcagctctcaacgccagc

SEQ ID NO: 29352 - DNA, 1030 bp, Artificial sequence
  DNA replication origin
gttaggcgttcgagaccagcctggccaatatggtgaaaccatccccctgccccctgtctctactaaaaatacaaaaattagctgggcatggtggtgtgtgcctataatcccagctactagggaggccaaggcaggagaattgcttgaaaccaggaagcagaggttgcagtgagccaagatcgcaccactgcactcaagcctgggtgacaagagcaaaacgccatctcaaaaaaaaaaaaaaaaaaaaaaaagccaggtttattcagatatagcttacgcacaagagcgttcagtctttttagagcgtaccagttggtgaattctcacaatcatatacagcaaaaccaccaccataatttacaaaattttgcctccaactgcagaaaattccatggtgtccttttgtggtcattccccacctccagcccctgcacccacgggtctgttttctgacttgattgtttcacctttgctaggatgtcatgtaggcggaggcgttcagtacaaagactcctgtgctgagtgtgccagggttgagacccatctaagttggtgcgtgagctggtggttggtgcgtgcgctggtggtggttggtgtgtgtgctggtggttggtgcgtgcgctggtggtggttggtgtgtgtgctggtggttggtgcgtgcgctggtggtggttggtgtgtgtgctggtggttggtgcgtgcgctggtggtggttggtgtgtgtgctggtggttggtgcgtgcgctggtggtggttggtgtgtgtgctggtggttggtgcgtgcgcttgtggtggttggtgtgtgtgctggtggttggtgcgtgcgctggtggtggttggtgtgtgtgctggtggttggtgcgtgcgctggtggtggttggtgtgtgtgctggtggttggtgcgtgcgctggtggtggttggtgcgtgcgctggtggtggttggtgcctgcgctggtggttggttccttcctgttttagagcagtgcaccactgtatggatgcaccacaaatggtttgcccggtggagac

SEQ ID NO: 29353 - DNA, 2454 bp, Artificial sequence
  DNA replication origin
gaggaggccttgagtccctgatccttccagcagccttctcagccgtagctgcatcttggaaccacccggggggctttgagacacactgatacctggacccccttctccagagattctgatacaactgctcaggggtgcggcccagcctggtattttcttaaacttcccgaattgtcccgtcgagcaggggtgaccaccagggcttaccctcaagagagggacgctggacgatttggccttggaaaccacattatcttgctaatctgctagacaatgggaagaaagcacttggcaaaatgtaaggtagttcatgtaaagcccagcacttcgtttcaaaagtaaactgacaggcagaaagtgggcgacgtcacttgttaggggttcgggtgaatgaggcctcggctgctccaagctgggcaagagccggcagtgacctctccttgcccgagctaatgtcacttccaagacttgaagagacgggggctgtgggaggccagggcggagcacccatgcgcagacacggtcctgtggtcttgcactttaaggaggttgtttacaggccaaagaacgtcccataaccagggacggcaatggagaaggagctgaggaagccagggtgggggtggggagagtctgccagagcagttcagacccaggggaccgtgagagtgggctgcaaatcaggacgtgaagtctgatgacagatgggaaagggcttggtccagtggggtagaagttaagagatttcagctcaacacaggaagcaattgtaacagtcacaggctgacggcagccagccgggtgggaaggagtgagctctggagtgggaagggagacccagggaccctctctccccacacccttagggagcacctgcttcgggcaagccctgagctgggcgcagtggaggacagttcctgaagggcctttgcctggtgggggattggctcaccctgggtttcttaaccttgggactgttgacatttggggttggctgattcattggtttggaggctgttctgtctgctggagggtgttgagaagcatccctggcctctacccaccaggtgccagcagcgctgtgacccccagttgtgtcaatcaaaaatgtctgcagacactggttgctaactatgccctgggggacaacccccactccccctttgagagccactggtttggaacaaaggatctctaccttggctgcgcactggaagcccccagggagctttagaaactaccaatggctgggtccatgcccagaggtgtgatgtcattggtctgggggcaggcccacgcaagggggggagggggcgctgtggtttaaaagcacccaggtggttctaatctgttgcgaggggttcgagaccccctggtgtacatggttgtttctcaaacttgacttgtcataagaatcgcctgggtagtggctcaaatgaaagcccccacccctttaattaggatcacctggaattctcaggctgcagtcggtgggctgggatagccataatccccgtgctgcgtgaagctccaggattcagagctgagaggcctggccagccagcctcactagatctcctgcagctcccctattccatccccgcggctgggccccctcctcacctcccctcctcccggaccttctcccagccctcacccctccccagctcctgagagcggcaggcagccctgcccctccttcctgctctcctcccagcccatggctctcagcgcagcttgatttagtaggcggtggaggagaaaggcagcttgaagagtcacttagagcctcggtgctcacagcacttatctggaaaggagaggccagcaggcccccggggagtggggcgcgaggctgagcacacctccccacaggggcagggaggctgtgctctgcagggctgtgggcaccggagctacacacaccctctgtccccagcacccagtctcgggtctgcccctccttgccagagcacacggtgtcaggaggtccccctgcagtctcctcctgggggatgggctcagctccttaaagccctaggtcagggagctcagagacccctgggttagaagcgatgtcaggtcgtctggtagggaggtgtcctgtggccgccacctggcttttgctgggcaggagggggccctccaccctccctaccctcagcttgttggttggttgcctgccctcctctcctggtgcctgtcttccttctccccctcctccctgatgaaaaatacaaaagaaaatgcgccagtgcccaggtctggggagccccagccctggggatggagaaatgaaaagcggccccaattagaggctttggttctgcaaacttgatgctcggcacttgaactgtcacggcggagccttaattagcagcggcggggagaggtcaggacaactcagcagtcttgacaagcgcgttatcaagtgcaggggagcggaggctgccc

SEQ ID NO: 29354 - DNA, 2224 bp, Artificial sequence
  DNA replication origin
cgccccctccgggcccgtcttctgccgccccgtgacgcccctactgctcgcctccgccgcgggccatgctgggcagcccctcctagaggccccgggtcccgcggcccggggggcggcgcaggatgctgggcatgaagacctggtcgtctctgctccagaacctcagtaagtgcccagctcaccgccccgtggacgggagggtggggggtccgggatggaactttctggggcgcgccacccacccggggctggaacctggccccgcactcacccagcctcgccctccagccccatcaccttcaggccacgcacgtgctccccagcgccgcctcctcatgctgtcaactcagaagagaagccctgggttggtttcctcaagtagaaaacccttgacccccgcggtctggctgtgcctgggccaactctaggcagccgggggaggctgccctcagaccccgtgtagggaagtggccggcgggcaccgggcttgctgcaccgcagggctctgccttagcctggccatgcggctcctggaggtgggtccaaccctggcagggcccctcgtgcctgcagtgacccgggaggtgggaaatggggctgcttgtgtgtggacttcgtgccctcttgcttgcacaggtgggacctggggtgggttgtgggactggaactctcaacctacccctccccaaactgcccgatcacctccctggccccatcagctctctggggagaactcctggcatcaaggcctcgcatcactggcacagttaggcagcgagagggtaagagtcacagagcccgccgagggtggggagcgccatgagtcccatcggagagagggtgagcgggactctgaggcctggggcagtgccacaggtgcgggtgtgaagctggcggtgggccactgaggtcctcaggctgaggggcggccagagtgagggatggagagaagccttccatgaacagcaactcaggctaccaaggtccctttggggtggctccagtgacagagaatgggcggggacgctggcctcaggactgcttcttcccatcctgaccttcgggccccttacctgcgggccttttcttccaggtgagccaggccagcagcggggggacgacgccatcccccatgcctggcccctcctggctgcctcgcctgcccgcccacccctcctctctctgtgtgcacctctctgcctgtttgaactgcagcttttaaagctttttgccttttgaaaactcagggggagaaagagtcatttgtggagaggtcgcgaacggttgatgattatagtccagtgggtagaaagagcttaaaacaaatccctgtccatcagatgtcggcttaggtggtttccagcgctctcctggggggccggggtggggggcagccgcttagagaaaaggggaggcttttttccttgaagctaagtgaacctgcaaaactctcttcttatttgggtgtttgatcacggctcccctctgcctggcttcctctgatcgcccttcctccgggtgcccggctggtggaggagggcctcggcagcccccagacggcctcaccagctgtgtgaccttggcctggtcatgcggtgtctgggagtctctgtttcccccgaggggtgatggtcatgccggttgcacagggtactcacgaagcctcgggaatgtgccaccatctcccgggcggagggtatacctggcctgcagggtgtggtggttggatcctgtgctgctcctcctctgccacaccaactcccctgtccaggtgcagaggccacctgcgtggagctggaagggccctcactttgtttccaaaggccagctagtgaggccgggaggaggatgccggctggagaggcctgtgttaagtgctgggttgactgcccacaggggctggtaggggccccttgcagacagaatgggccctccctatgtcctttacctgtggtcacgcctcagtcctcatggcagcatcagggggagggcactggcttcgtgccctctcgtttttgcaggtgaggaaacagtgtgctcgtttttcagggtcacacagctagtgaggtgcagacgggagaggctggtgggagcctgggcagtcccactcagggtcacgcccccagccagccatctgtggccactggcatctcttccttcagctccagaaagatccggtcactccgatatccaggagtgtgggacggcccctggttcccggctg

SEQ ID NO: 29355 - DNA, 846 bp, Artificial sequence
  DNA replication origin
caggcaccggcgaggccccagccatgccgggagggagggagagggctcttctcacaagccacgaacggggggctgggggaacccccgagaacagcctgtgcaacaggacagatgcccgctccgtcccgggcatggagaggctgctggaggcggcaggagagagggcgggacggcgctcccaccatcctcgccagggcaggagtgggacgaggctggggaccagggcaggcctctcagggagagaggagactccacaccacaggagccgtggacggttccacacagaggcaaggccttatcagtttggaatcctgaaattctaagacaggagacatgccacccccgaacggagccacctagtgccacttagcggctgcaatgtctttttgatgcctgccatgccaaggggtgggagctgtgctgccaggtaacggcggccctgggcaacgccggggagaacaggggagggtccctgctgcccttggaaggcttcccgggctcgtgtgcacgtgacaacatgcgtgcaagagcaggagtgtgcgtacgtgtgtgtgagagcaggtgacagcgtccacctgtgagtataagggagcatgtgaatgagtgtgtgagtgtgcaagcgtgttatgtgtgagtacagagagaaggggagagggagagaggcaggcagggaggaagggagtagggagggagagaagaggaagaggaggtgaggacagaagctgcaattggagggactgggcatggggtgcccccagttggcagggctgcacctgaggtgggcaccctcactgcactgagctgccgttacgtccccatctgtagaatggggccatgacaccccct

SEQ ID NO: 29356 - DNA, 1498 bp, Artificial sequence
  DNA replication origin
ccaagcctctgactcatcagcgtggcctgcagctcccaggatccctgcagggacagggagaggagctattgggggctcaggaacctcctgccaaggccctgaccaaccccctggggcaaggggcaggcagagagcaggcactcggggcctggacgtgtgatctggacttgggaaacctccatcctggaatgagaggtttctggcaatagaggcccttcccagggacaatgggcgcagagcctctgagctcagccgcctgtgtgacaagcccagcagggtgaagagtggggctggccgccttcccggaggccgtgccaagcttccagcggtgtcattctcccaggcaagggggctacacagccaagcccgccacctccaggcctgactgccctgtccctcctccagagccaaggatgccccaggagctgccctggggtggggggggggactcgagagcatgcgggcatcctgggggcaggactcagagggtgcaaaggatgggggggtggtgtcccacgaaggaggaaatgcaggcagcagtgcagaggtgtttccagggaaggcctgggggttcctggcccttctcccctgaatctcaactggagggagaggaagagcacagagggagaggggaagagagaaaccggggaggggagaggggagacagaagaggaggaagagaggggaggggggaagataagaggagaaagagagcaggggaagagggctgggtgggcaaggggttcttccagaaggaggcagggagagtgatcagccctgacctctgcacccaagggagactccctctttcttcagcctggaatcacccggggagcctggggtcttttgttttctttaggaggccccagggattccagtgtggaggggtctcaacaggaggatcccacatagcagcagtaccacctgggagcagaaatgcagatgcagatcccggggccctgacccagagtatcagacaccgcggtggggtcccgatttctgcattgtacacgtgccctgccccggggggattctgatgtttgaaggaatgtgggaccccccctccccggtctgcagtgtgcaccgggggtggggggctccaagagcagccctttctcaggagcaggacagggaaggagtggcccaggggccttgcaccaggcaggaggtacagggcccaggagagctgtggagattcaggcgggattccttctgcttcctggaggaggagggtgaggcctggaggcagcagattcccccaagtccttctagaagctggacagacaaagaaggggctggcccagtgaagcctgggaatgtgttttgaggttgaggagcagcagagggggaagagaagagaggacgttgggtgcgtgagcggtgaggggggtagcctgcaggagccccccacagtggggacggctagtgcttctaggcactgtttcaaccactgtgggaagctgttcttcccacaatactcaggagcaaatgggggcac

SEQ ID NO: 29357 - DNA, 1894 bp, Artificial sequence
  DNA replication origin
cccatgggcacatgtgaatatctgtgtgggtggatgtgtgtgcatgtgtgtgtatgaatgcatgcctatggatgtgtgtgcacacgtgtcaggggtgctccgcctccggggagcccaggaggcaatcttgctgctcccagtgtgcctcactttgacaaacaagccctgatgtttcccaatcggcattccagctttctgaaatcacagtttccatctgcgggcacccgcctcacctctgcccccatccccgtcctcagggtcctgcactccagcccggaggcagtgcccggggagccaggaggggcctggtctcagcccacgctctcctgaggctcctcctgccagcctcctgggccgtggggcttccgtgctcagcagggttaagtagcgagctggcagtgggtgaggaagaaacacaactgcttctttagcttcggggcctggggtcaccctgagagtctgctgatgagatctggcagcgggtgggcggagggacgtgggggaaggcaggagctcagaaagaagggccagaggctggtcttagcctggcctgtgtcctctgaggaccctggggcgccaggggcccagactgggccaggcagttttctgtgtggggggagatcgcctgaacaggtcggggggcgtggagggcgggggctggagttggaaatgtccctgatgccttccagggcaccctgcagctgggctgtgcagacctgaggtctgaggctaggatggggtggggtggaaacacattggaacctgctcttcagtggcccccagcacatgtggacagagccctttaagcaccccagaaacacgggggaagaaagccggtcccctcctgcctcttctgccaaggccttaagcctgcctttccccaccggctctggccagtggctgttcccacccggagcctgggactccactctgctgtcacagcaccgcacacgttgggcagggggcaagcaggggaaagggcagagaggagatggcaggaggaggaataaaatgccagtgcctggcagcagccgaggctgggaaaggaggcctgggggtagtggcatccctggtcttcactccagtcttccctcttgacagagcttccccagagctaagtctgtggtccctgctggggacagattgtgtcacgtgagcctcacagggaccagacccctggagtactcactcctgggaggcctggggaagggggcggagctgggctgtgatctggtgccagcacctgtgatctcaggaccttgggcaggctgctgctctacctgtgaccttgtgactgtgactgggagacagagccggcacccactcaccagagttcaagggggcggtgggcgggaatgttggagtgtggtgtggcccggggtggtggatatttcaacaatgattaaatattccctggagatcagcctgggctgcatagagagacccccatctctacaaaaaaaaaaaaaaaaaaaaaaattagccaggcttggaggatctcttgagcccaggaggtcgagtttgcactgagacatgatggcaccattgccctcactctacaaggcaacagaggagaccctgtctcaaaaaaaaaaaaaaaaaaaagatttaagaaattacccgagactcagtttcctcagctgtaacattagagggccaggaggtgggctggattctttctaaggcccccctgccattttttccaccttgatttgaggagccaggtggtattcgtagcgttacctactaacctactaaccatggggtgcagcttggggcagggatgtgtcttggttctttttttttttttttttgagacggagtctcgctctatcgcccaggctggagtgcagtggcgtgatctccacttactgcaagctccgcctcccgggtt

SEQ ID NO: 29358 - DNA, 1266 bp, Artificial sequence
  DNA replication origin
tctctcttgggccctcacacccagagagaactgaccccggggggcacacccaaagccccccaccaaggcgtcactggatctgggcctgcaggcacagatgtctgggtggccggggatggcggggccgtggcagcagcctctgcagggcagtgatagcctggctggcgctggccggctgtgcccagttccagccgacgcgcctgtcagggcatctcgggccaggagccgtgtccctggtgcccggcttggggccggcagcaggaagcgacggggaggcagagcccctgacaaagcacacatcctctgtgagcagagataaaccttggaggggagaggggcgctccatcagccctgccaggcgccacacactgacggggcacacgcaaggcctttcgcgaccacgcggctccgcttgtcgttcttcacggcggagcctgctttatctcccgcacagcatgtgaggccatgaggcggacactggctccgtgcacggggctcccttagaaaatattaatatgtaaatgtcactctccgaagaccagaaatgaaatggaatgaccgactgcaagatgctctgctggtgagataaaacgagaaaagaaaaggagaaaaggctgccggggctggaggtggtggcgaatgctgagcttaggcaggcggggggaggggagcgtgggattcaggggccggttggtggggagcaggcagccacttccactctctccaggcaaaccgcttcagcacaaggcctgagagcaggtggaagcttctgggctgaggccccagtgtcttcaccccatcacaagatcacacatacgggcactaatgtgttactgtctccaggagtctgctggaagctttttatgtgcagaactcacttggtcactggcagctctattgccccatttcacagatgagaaagctgtggcacggggaggttaagcagcaggaccaaggacacatggctgtgctagaacctaggcccctgcgtgtgtcctcaggtaacccatctcctcccgcctcccacagagacaccaggagggacccatctgatggtccctgtgtgctgtcgaaccctaggctgccttcatctccccagcgaggggggacacagcctgcccacaacgaaggcagaagcccccacccaccaggaacatccagaaccaagacatggccgggcgcggtggctcacgcctgtgatgccagcactttgggaggccgagatggctggatcatgagatcaggagatcgagaccgtcctggcta

SEQ ID NO: 29359 - DNA, 1215 bp, Artificial sequence
  DNA replication origin
tcctcacccccaaagtgatggtgttaggagttggggcctttggaggtgattagggcatgagagcgcggccctcacgatgggattaagctcctgttaaagggtcccccctttcaccatgtgaggatacagcgagagggcaccatccaggaaccacgaggtgagccctcaccaaacacctcatctgccagcaccttgatcttggactttcagcctccagaaattgaagcagtacatttcgatggttgttaagccacctggtctatggtattttgttatagcagcctgagctgactaagacagggtcctgggcctccctatgcacccagaagggccagaagccccaaagcaccgtgggtcataaggagaagcctctgggaccctttcccaagtatagagggcatgagagaaaggtgccttccttctccttacccccagccgggctttctagaatcccagagcaccagtctcaggaaggaaggggagcacttggactccttagccatgaatgacgatgacagtgaccacaattgctggttgtggtgatgacaacggtggtgatatggtggtgatggtgatgctgatggtggtgatggtgatggtgatgatgatgacagtgatggagactgtggtgatggtggtgaaggtgatggagactgtggtgatggtggtgaaggtgatgatgatggagactggtgatggtggtggtgatggtgatgatggtggtgaaggtgatgatgatggagactggtgatggtgatgatgatagtgatggtggtaatagtgatgatggtggtgaaggtgatgatgatggagaccggtgatggtgatgatgatagtgatggtggtaaaagtgatgatggtggtgaaggtgatgatgatggagaccggtgatggtgatgatgatagtgatggtggtaaaagtgatgatggtggtgaaggtgatgatgatggagaccggtgatggtgatgatgatagtgatggtggtaaaagtgatgatggtggtgaaggtgatgatgatggagaccggtgatggtggtggtgatggtgatgatgatagtgatggtggtaaaagtgacgatggtggtgatggtgatgatacagatggtggtgaaggtgatgatgatgagggtcataggggaaaacgtttacaaatacctagaacctaagtggtcccacacttgatacccagtacctcatttagccctcacaaatcc

SEQ ID NO: 29360 - DNA, 1264 bp, Artificial sequence
  DNA replication origin
aaccagccttaatggatgccttatgaagtggggctccctcctctcctcctcccacagccctggatgagttgtgggattggccgggccgtggcttgtccagtatcccacctctttccctgcactgcgcccttcccaaagcctgcctgagctgtggtcagggccgtcaggactgggtcaggtataaaagatgtccacagcccagggcccaccccatagccccctgcccccaggatgcagctctccctcccctccccagcccatccctccccatgtccttccagggtcagtagcactccctccctgccagaggagaccttcctgcccgcctcatccaaccgactcacccccgcgtttctcgtgagagtgattggatccagccagtggtgctgttctgagaactgcctgtgtctccggccttagctcatctgtggctcacaaagtggggataatttgcatcctactgatggggaaactgagtcacctggcggtgacatctcttgccccaggttcacagcaggccggctccgagtccgtgagtgtgagggcgtgagtgggtgctcgtgtgggtgtctgtgatggttgcgcagagtgttggagtttactgtgtgtatgtgtgttgtgctgtgtggtgtaaatgggtgtgtgcatgtgttgggtgtgaatgtgtgttggatatatgtataagtgtcaggagtgagtatgttgtgtatgggtgtgtgttgtgtgtgactttgttgtgtgcatggctgtgtgttgtatgtgtgactttgtgtttgtgtatgtatgttgtatgtgcatgtgactctgcatgacctgtgtgggtgtatgttgtgtgtatgattgtgcattgtgtatgaatgtgactatgtgggcacgtgttgtgtgtatgcgtgtgtgtcttttgtgtgctgtgtggctatgtgtgcatgtgactgtgttgtgtgtggcctgtgtgtgttgtgtgcgtgtggttgtggttgtgtgtggcctgtgtgtgtgtggctgtgagacctgtgtgtgttgtgtgtatgtggctgtggttgtgtctgccctgtgtgtgtgcacgtgtgcctgtggctgtgtgtcccctgtgtgttgtgtgcgtgtgactgtgttgtgtgtgccctgtgtgtgtgagacctctgtgtgttgtatgcgtgtgcctgtggttgtgcgtgccctgtgtgtgcgtgcgtgcatggggcatcctgcctgtccagcagagctccctctcccactttcgttaaaccccatctccatcctc

SEQ ID NO: 29361 - DNA, 1043 bp, Artificial sequence
  DNA replication origin
tgccgggagggagggaagccgaaaggaccatgctgaagaggttcgccctcagaagaacctctcccagagaagaagctgggctgggatgaaccgggattaccggggaggcaggggttgaggacaaaggccacatgcccagagctggggccagagccaggctcttgaccctcttccctgctgcacgggcattgccaaaaaggcagttgctctgtgctggggaggcggttacttcctacgcacccgcgccacactgccccgggaggggcttgcagcggtgaatgggtgaatggagttccgggaccagcagcctaccccggtgggaagcggggccggcagccctggcaggggaatgtggggccagcagcgggccggggaagtgggctgattgcacagcctgtgctctggaagagagcgcacgggcttgcccacaccgatggacgtggacagctgtgaatggtagcacagacatatacaggagtgaccgtcgaaggagggggattaactggtggaatgggaacagagtcagggaatatttcctgaagtaagagatttcctcactgggttttaaaggacgcataggagtttgcctggtaggtggggaggagaaggccgttcctggaagagagagaggagcatgtgtgtctgttctgttctcacactccagcagttcacggcagagggagagacgaggacagctgcagaggtgggcaggggtgtgggggggccccagcatcaggctaagcagcttgcacaaaccctgcaaacagggaggaggccttcagccattggcactgttctaacctgggtgtgtgggcgtgagctggacagacaagattctcacccccgtgaagcgtgcagtgcaatgagggcctcgaacaaacagatcaacagatgaatatgtgttaggttggatgttgaaaagcgatgtggggaagatataaaagagtaaggattgggggagcagggcagggatggctggggttgtttttgtttgtttgtttgtttgtttgttttgagttggagttttttcctgtcacccagct

SEQ ID NO: 29362 - DNA, 1430 bp, Artificial sequence
  DNA replication origin
ggtgggaggggaaagcgggggctggagcggaggcccggcggggcgcgcggggtgggggcagggagggcaggtgccggaccccgaccccgccgccccgcttgccaggccgccgccgccgccgctgccggcgggtgcaaggggaggcgcagagagcgcgccgccacgcagctccggaaacaaagggccgccggcgccgagggcctggcgcgacctccagggtcagcgcggggcggagcagccagaggttggcggcgggcgcgggcggccccgagcggccggtttcctacaggtcagcagctctggcgccctcccctgcgcccgcgtgcgctaggccgcccgctgggagggggcgccaggcggggcgcagcagcgagcttggggactcaaagacgctcctcgcaccccggcggtcgagccccggaggaaggcggccgccagcacgccgcagccaccgagctgctggcggcggcggggaagagcgccacccctcccttggctccgagcgctccgcccagctcatttaagaatttttctggcggggtaggcgagggtttggcaagtggcttggagaggtcaaaaggcacgccgctgcccccactcccccatctcctccaatttgccctccgtagcttttctctagggtatcgtattccgggagttcaactgtcatttgaagccgctgcatttagcagggaccccggggctgccgctggggacccctgatttacgcagtggttggagagcgttggcaggaacccaagcctggtgtgagcgcggtgccccgccgtgtgtacctgcgggctcaggtctgttcctcaaaccatgattgtatctggggtcaaaaggtgaccccttagtgtcaccaagtcgtgattccggctggttgtgccaccgaggggcccctcaggaggtaaaagggcttgaaaataaattgtcacatcaagaggcagctttgcagcgtgcgtttaaggagagggtggggggacgtgggtaaatggatcctgtctctttaaaatcgctgggctggacaatgagcgcacaggatgtggtttggcggcagggttttttccccttcgatttggggaattatcacatggggccttcttgagctggtgtgaaagggaggcggcgtggggaggagagatacaggctccacactcacactctctgtgcagttgatcgttttcttaaaccaaattagccggggctttcgttactatggtgcagccggggcttgcagaatcccagtaatagcatttattaggtctatttgcctggaagcatgccttcccggatctgataatgcaccagtgcagggagagtgtgggagatgctatcaagcatttgattacacttgcaacagggatttttaaggggtggggtgcggggtgaggggtgagaggaaaagaaaggagggaaacaaaccgctc

SEQ ID NO: 29363 - DNA, 1725 bp, Artificial sequence
  DNA replication origin
aggaaggggggcggcgggggggccggcgagccacgctcgcgccgagaccgcgcaagggggttggctggagggagagggaaataaaccccaggactggggggggggggggcatgctacccgatcggggcggcctgcaggaaagtaacttcacactcggcgcttacttcaccttggaaggtttaagtgcctcggccgctcgctccgccgccgcggcggagccggctcccggcagacaaaaggagcgagacgcgcaacccccggcggcggcgcgatgggggcggcgggccaggtgggcgctccccgccgcacgtagccgcgcacaccgcgggcttgaccgcagcgggaggatccgaggccgcgcgcgtctgcggggggcaccggcggacccaatgccccgaccctggctcgggggtctggcggaggggggtcgggtgagggagggtcccgggcgcgccggcgccgcgcgggacccagggaggcgcacggctcgcttacctggtaagtaatacagaggcggcttcaatccaaacatggttcaaattagaattccatagtggccagagagggatgaagaaggaaaataatattaaaacccaggaatgaacaaaaagcaccgttcaagccacggcgctcaaaaatgtccaaaacaataaaataaaggcagaagagcgatcccgagagcgacgaaaaaaaaaaatcagtctttcccccccccgccccgcaagatgatcaaaaggctctctctccgaccagcgcccaggcaatttcggccaccttggccctggcagatccacaatgaggtaattgacgaccaaggacgggccggagcctccacggctgcccgggtgtcttcgccgcgtgtgtattttctgccttttggacttgagatgcaaataaaaaaaaggaggggggagcgcggcggagggaagcaggcggggaagaggagcgagagaaaaataaaggggggaggtgagggtgatgaaattggggggttaagatcttcagggattactcatttgaaaggaaaagagagaggggggaaagaaaaaaaaaacagcccccaggacgtgcgagtagcaatctctcctccattcagccatttgaatgtcaagggcgagggtcaagagacctgtttccaacagggtttcacgttcagaaccagaaggaaaaaggaaggggggggcggcgggagggggtatctcttgttgccaaggagaaatcggctttgttttgtttccccttagctactgggtgaggaggggcggggtggcggggagaggaggagggggcgagcgggagaggggagaggagaaaattaatacccaaacagccaagaagtaccgagggggagatttcttctcgtaaataaaagaggcggcgattgcaaacaagtctccggcaggagaaagcaggctggggagccggctcccctccccctctcgccaccaacacccctccccccccttttttggttatctccctggcccggcgtcccaccactgactcagagagagggggtggaaggaggaggagaaagaactcgcgggggctctggcgcctgggcagaaggaggcaggaggagagcggggaggcgagagcgcacggcggtggagagcccctcgatcaattttcatgcaagaatcattatcggtaaattggaaagctggctgcctgacagcagatttgtctcccctaatgaaagcgaaagggtaggggcgcagcggc

SEQ ID NO: 29364 - DNA, 1961 bp, Artificial sequence
  DNA replication origin
gacccccctccgccagacccccgagccagggtcggggcattgggtccgccggtgccccccgcagacgcgcgcggcctcggatcctcccgctgcggtcaagcccgcggtgtgcgcggctacgtgcggcggggagcgcccacctggcccgccgcccccatcgcgccgccgccgggggttgcgcgtctcgctccttttgtctgccgggagccggctccgccgcggcggcggagcgagcggccgaggcacttaaaccttccaaggtgaagtaagcgccgagtgtgaagttactttcctgcaggccgccccgatcgggtagcatgccccccccccccccagtcctggggtttatttccctctccctccagccaacccccttgcgcggtctcggcgcgagcgtggctcgccggcccccccgccgccccccttcctgcctgggattccctggaaggttttgttccgccgaggtcggaggagggggccggggaagctcaggagggtatttggcgtggcttcctgtttccttaaccttcctgcgcggtgacagccgcttgccctgtaactttctgtttcggggcaagtcgcgctttcagcctggaggggaggggaggggagggggttgacagctggaggtttggggagcccctcctgaattcaccttatttggatttctaaaccttaaaaaaaattaagtgtaggctacatggaagctggtgatccaggaattcaggcgagggagccctgggtggtgaaccccagggttcttccccaccgcgcgccgtcacccccactcctgtgccccctggggtcggggagaaacgcacaggcctgccccaggtggggccacgtgacgcaggtcaggaaggctgtgctgcgtgtgactgctggttctaggaatgagctgattttattcctccctccctccgagttgatctcccttgagctttgacacacggtacctaatgaaggtggggtgtgtgtgggtggggagggtgatgtgggggtgtagggaggagaggggaagttcctagttttcccatgttgaggcttttataaaattctgcagaagacgctgccctggagctttatttctgaattgttttgctggggaagggtgcacgtggcccggtgttcggtttcgggtttttttttttcctctgttcagaagatcctgtcacttttgctgaggcttccacacctctctggagtccccaggaggagcgtgtggggcaggaaggggcctggacaggacccagctcccttggatctggcctttgctgccctaacctgggcaaacgttttcactgagttaacagagcagggcagagggtcaccagagtccaactgacttaaaaaaaaaaaaaaggcaggagagactcctcctggaggaaatctgtacttttactctttttgagtttcgtggtgtctgttttagttcccagtaactgaccaggtctatgtttttttcttggtgtgtatgccgttttgataggaagaatattgaatattttccagcgtttccattccattcttgatcttttttttttctcctcctctgcctgaaatgcaaagcaacaacaaacagcaagcttcgcttttccctccctcccctagcggatccaatccaaattagaaccgggaatccccaacttagtaaaataaaggttgtaaggggagggcggagtgagcccttgggaactcagagctatctctcccatgggaagattccaggtaaatgagggctgggtctgagtcgcgctgacattcatcagagccctttagcccaaaatgaaacagatcctcatgctgtatctgggtttttctcgtctgtctccccccgggtctgtggctggggaaagcagagagcttgtgcctccccggcagctatgcctgccttggaggcgctcaggaccagcttgtgccaagaatgaatcttcttaagtacagggcgtcttcaaagcaca

SEQ ID NO: 29365 - DNA, 986 bp, Artificial sequence
  DNA replication origin
actgccaggcctgagtgagaggagccttcagacgactcgggactctgcacagcaaatcaccttgcctcccagtcttcccagctgaggccccaggtgtagctgggcagagaccggctccaccccaccacaccctttctgaatttccaacgcacagcagctgggagaataaaacgatgttttatgaccacacacttgctcatgaagtcttcctccatgccaggagccctggtcccctgcagacccacccaccagccgccccatcccctcccccgcaacggttggtctgacctgcccaccgacaggccggcaccctgtggtgagtgctgtcataaagacagcacaggcggttgaaatccgcctgtgagtgaaactttccaggagagaaattgggcggaggggggtgggggtgggggtgggggtgggggtgggggcgggagtaacaccttgtccctgggcccttaagatctaagataaaggccgtgacacttccgacagtgacacaggttcttggagcgggtgagaggcctacgtgaccgccccctactgcccatgcagtggccggcccttccgctgcggcccctccacagcaagttcaattaagaccccgccattctctcctcctcccttcttttatgttccctgccggcccccctttctcttgtcagataatcacgggaaaccagcaaacggttgacacagttaccaagacgacagaagttaggaccagcgaggaggtctgaaagctaatcctaaatgaattacaggacaagaatgacaagaggtggggagggttggggccggttcaaaggccccagagtctgagacaaggtgccatcggcctcggggcactggctgtgggcctgtcactcactaagggtgacactgaagtcttctggggttggggaggtggaagaagaaatctataacaaagaaattctccgctgaggccgggctggccaatagcgccctccatccagtgactcctg

SEQ ID NO: 29366 - DNA, 1190 bp, Artificial sequence
  DNA replication origin
ctgaggtcaggagtttaagaccagcctggcaaatatggcaaaaccctactaaaaatacaaaaattagctaggtgtggtggcgtgcgcctctaatcccagctactcaggaggctgagacaggagaatctcttgaacccaggaggcggaggttgcagcaagcagagacagcgccactgcactccagtctgggcgacagagggctgccggccctctgcatgtgtgattcctctcttgcaatgccctgacttgatcatctgcaggttctccaaagtgggccttcctttaggtaatagacaaggccccacacctcttccagaaagcccacaatgaccccttggctcccctttcccggatgaggtcctggagcagcaggggcccctagggttgggggagccctcggaaaccgagggaggagaactgggttccggagcagcccctgctgggttctaagcagcccatcccaggcacatcatttaacctgctctggaaaagaaggcaaggcacactgtgctcacacacagcctggtgtgtgtgtgtatgtcgtgttgtgtgttgtgtgcacgtgtatgtgtgtgcggtgtgtgtgtggtgtgtgtggtatgtggttgtgtgcatgtggtgtgtgtgatgtgtgttgtgtgtgtggtatgtgctgtgtgttgtatgtgctgtgtgtgtgtggtgtgtagtgtgtgtggtgtgtttgtgtgtgggggtatgtggtgtgtgtggtgtgtgattgtgtgttgtgtgtggaggggtatgtggtgtgtgtggtgtgttgtgtggtatgtggtgtgtgttgtgtgtgggggtatgtggtgtgttggtgtgtgtgtggttgtgtgtggtgtggtgtgttttgtacgtgtggtatgtggtgtgtgcgtgctgtgtgtgttgtgtgtgtagtatgtggtgtgtgtgtagtattcagtgtgtgtgtggtgtgttgtgtgtggtatgtggtgtgtgtgtgtgcgttgtgtgtggtgtgtgtgtggtatgtggggtgtgggggggtgtggttgtgtgtatggtgtgtggtatgtgttgtacgtgtgtgtgtgtgctatgtgttctacgtatgcatcactagacactagtactgatgtcctccagggtccacctggtccccacatccaataccacttgacaatggaaaccactccttccttcatgaaactgcc

SEQ ID NO: 29367 - DNA, 1710 bp, Artificial sequence
  DNA replication origin
ggtacactcctgcatgccaggagggccatgggctgtgctgacttccaggcccccaaatcctccccttcccgggatccccgtgtacccgcctctcccctccctccctcctctctgcccagctggggacttttcaggccccacccccaccggcttcctagcaggagctgaaaggaacgttggtgaccactctgcaccccagacctcctgcctggggcatgggagacccaggatgccacctgagcacctgctggggtggggagggtttgtgggtggcttctaggtcgggcagggccctgtttctcagctgtgcacacaggtggagagggagagggctgtggacctgagagccctggacgctgggcagagcctggatgctgggtgggcagggcctgggctgggtgggagctttgacacggcgcgggtggagcctgggcacttttggaagaactccagaggagccatggcgggaacctggtgggttgagtttccctggcatctctggaaggtggggcggggggtccctggtatttgtttaccagctctccaagtgaataacatttctgaagcatcgtgcctgagcatgtgtgacccagtgtgtgtgtgtatgcgcatatgtgtgaatgtcagtgaatgtgtatgtgtgacgtgtgcaaatgtatggcggtgtatggaatgtgaacgtgagatattgtgtgtgtgtgaacgtgtgaatgtgactgtgtgaatgtggatgactgaacatgtgtgaacttgtgtgacattgtgaatgtatgtgtgaatatgtgtgagacgtgtgtgaatgtgagtgtgaatatgtgtgaatgtgtgtgaacatgtgtgagatattgtgaacatgtgacagagacattgtgtgtgaaggaatgtgtgtgatgtgaacctgagtgattgagcatgaatgtgaacgtgtgtgacattgtgggaatgtgagagtgatcgtgtggtgtgtgaatgcatgtgtgaatgtgagactgtgtgacctgtgtgaatgaacatgagacgtgagtgtgaatgtgtgaactgtgtgtttatgaatgtatctgattgtgaaggtgtgtgtgaggcgtgtgattgaacatttgtgcaattgaacgtgtgtgatcatgaccctgtgattgtgagcgtgtgagtgaatgtgtgtgacattgtgtatgtcactgaatgaatgtgtgtgattgtgtgaacatgtgtgaccttgtgtgcgtgtgtgaacgtgtgggcccgcgtgtgaatgagtgtgaacttgtgtgaacatgtgtgactgtgtgtgtgaacgcatgggcccatgtgtgaatgtgagtgtgtgtgattaacgcgtgggcctgcttgtgaatgagtgtgagtgtgtgagattgtgtgaacatgtgtgacattgtgtgtgtgaacatgtgggcccgcgtgtgaatgagtgtgagcatgtgtgattgtgtgagcgtgtgtgacatcttgtgcatgtgtgaacgcatgggcctgtgtgtgaatgagtgtgtgtgtgattgtgtgagcatgtgtgacattgcgtgtgtgactgggcccgcgtgtgaatgagtatgaacatgtgtgattgagcatgtgtgacattgtgtgcatgtgtgaatgcgtgggcctgtgtgtgagcgtgtgtgattgagcatgtgtgatatgtgaatgtgtttgagacagcgtgtgcgtgtgggagggatggagtgtgtg

SEQ ID NO: 29368 - DNA, 824 bp, Artificial sequence
  DNA replication origin
aggccctggaggggaggcactcctgtggcctccagagcttgtgctgggccccatggagccagggcactctctgctgtggaggggaggggcggggtggggcaagctggccccgtccctccagctggctgccccacagtgagagctggcccgtgggaccaggtttggttaggtaggcggcagccaccacaatgacccactcgatagaccaggatgcccacggttgcccccagctctgtgactgacccagcagctgtgtgaccccagccagtttgcttgtggtctctgggctcagtttccaaacaaaaggactagagaggatgattccttcacttccctgcagctttaaaagatggggtgacactctccaatagccaaatgcaatccaagtctcccagagctggctgaacagaggtggcggggcctggagagagaggcagccatgagggagtccaggcaccctcgcctagagctggtctcctccacccagagcgcccccacccacactgctccgaatgcttagggtgactcatccagttaagccttccaaaaggtctgcaaggggtgccgtcatcatccctattgactgaggcacagagaggttcagtaacttgcccaaggtcacacagcttgtaaagggcagagcaggaactgtcacgcatttgtgccttcaactcaggctcccctgaaacgccaagctctgggtggaagttaaacataaaaaccgatgtaaccaaggcccccatccttgaggggctgcattctgctggagagaaatttctggatctgccgtgtgtttaagcagaagaaggggccacgggtagaaa

SEQ ID NO: 29369 - DNA, 1396 bp, Artificial sequence
  DNA replication origin
gtgggccaggccccctcccctcacgttaggcggaccatcatgctgatgtgagaagagcagatgcatccgtccttcgagctgcgatgcagcggtgggggaggcagccacgtctctgccagagaaaagatcctacctttagaccaaatgtagggaccacggatagacagtggatgagtgcatgggttgagggacagatgggttcaggggtggacggaggaatgggtggatgggtagatggatgggtgggcagatgggagaatgggtgggcggatggaggaatgagtgggtggatagaggaatgggtgggagggcggaggaatgggtgggtgggtggatcggtgggcagatggaagaatgggtgggtggatggaggaatgggtgggtgggcagatagaaaagtgggtgggtggatggatgtgtgggtagatggaagagtgggtgggtgggtgggtgggtgggtgggggaatggatggatagagggatggatggatagatggttgggtggatgagtgaatggctgggtgtggggatagagagaggaataggtgcatgaatgaatgggtgggtgagtggatgggaggaaggaagggagggagggagagaaatagatgaaaggtagatgggtagatgatggatggaggaatgttaaaacacagaaaagatctggcattacaaagtcccaaccacatggaacgtgtcctagaggctcctcaacaggcatcagagggttttcaggaaggaacataccagtgtttcctgatcaacaagaccatgaggactctgagccagctatctgccctgaggggttctcagccaggaggcacaaccctctccaccagcctaagtctctaagtctccgcagaggggccttgggcattcaggctgtgtctgtcaaactgaaaaggagaagctgggcccccaaagagaaaggatgcagagaaaggatgcttcctgagtttctccagaggaaaatgctagaagaccccaggtaataaagacccttggggcagcgtgtgaggcctgggcagggcttccagaacgcagtctggaggggatgcaggggccagagagcaggaccatgtgctggtctgtactcgagagagacaggaatgtcccagcctgtgcgggccccagagaacctgccggtctgtactcaacagagacaggaacgtcctggcctgtgtgggctccagagaacctgccagtccgaactcaacagagacaggaacgtcctggcctgtgcaggccccagagaacctgcccttccttaccgcccctctgcctgttcccctggccccctggtttctttccaaggctcctcattcctgggcccttcccatggcactggtacctcttccttcagcatgttcagcacagcctcgtgggcctccaatg

SEQ ID NO: 29370 - DNA, 1000 bp, Artificial sequence
  DNA replication origin
tttgcaaaacactccagctatgaagaggggaggggctggcgtagcatcgcagatgtagggactctgaaggctgatgaaataaacccatccttgtcaactggggaaaggcactcagcaatccaggacaagacggcatggtgcggatcctgcaggaggttcccgcatccttttttggctgggtttattttggggacaggagggctgtttggcgctgatgagggtttgtgtcctcctaggggcttcttgatttcatttagctcagtctcctctccaacggctcagctcagtgagcgcctggaagaaagtgagaatgccaaagcaacccctcggtgggaggagggaaggtcggcttccaccagtgggggggttagagctgccatccaggaggactccctggaggaggcagaattttaagccagggcttgaaggaagaggtcagggtttgaataaaggagatggggctctgctgggggaggatacagcaggcccagggaagggtggtggggctgggcgagtctagagagactgtgagacgcttccagacgcccctagtgcagtcgtgagggccaggagggagtctcagaggggaaatagaccccagaggcaggctgagggagaggtgccgtgtgaggggtgggaggggagcagccccaggagaggaggcagcaggggtggggcagccatgggtgtctgccaggcccacggcagtcagggaacgtgggagcaactttactggcactgggagggattgcaggggccaggctggtggggaggaggcctttcagaatgggagctcaaagacaggccagaggaaggccaggcgggaagaggctctctggcaagaggcagagctgaggcaatcaggtagaaatcaaggtgggggggtgacctggggacccactgcctccacgctcaccttcagcgcggggccggcagacacccagaagggccacaggcggctgactaaaaatctccacaccaggaacttcgagcgatgaaa

SEQ ID NO: 29371 - DNA, 1270 bp, Artificial sequence
  DNA replication origin
accacaggcttgtgccatcacacccagctaaccctggcctctctgaggtgcttgctgaaggcttactggaattttcagttttgtttctggaaaaccaagtgtgaaacacagcccagggtttagtgtgtttgttgagtgaaaaaccgcccaccctctgtggttcaaggcgtccctttctttctggtggatcctcctaggactcccgtctccagacacccctcttagttcctgagctcagggagtaggtttaaggtgtctcatgttcatctgagatggaaagctttcttttttttttcctcctttgaaacagggtctcactctgtcgcccaggctagagtgtagtggcacaatctcagctcactgcgacctctgcctcctgggctcaagggatcctcctacctcactttcccaagtagatgggactacaggcacacgccaccatgcagggctaatttttttttgtttttaatagagacagggttttgccatgttgtccaggccggtctcgaactcctgatctcaagcaatatgcctatcttggcccccccaaagtgctgggattacaggcgtgagctaccatgcccttaggaaagcttttaaattttaaatctcttttgtggtgcaggtctaataggttccagggcttgtggaggtagggctagagtttgcacctaggtgtcactgaagcaggtacctgaggcaggtgaggggctgggagcctgccttccgctcttggaggcacagtttagcttggcaggggcctcagggtgtgagcaaacgcgcaccaggcaccagcatcctgttgccttggcacaaagcacagtccgtggtaaggagcaccgcgtgcagcatccccagggcaggtgtcctgctctgggaggtgcctccgtaggcctggccctggcacctacctagctccttccaggcaaatgggagtggagggtgggaaggaggtccagggaaagagagctgtgcccaggaagggctcgcactatctgggggcgcggggctgtgggtagggcgctgcttaggaagagagaggaggaggagcaggcctggagggaaatggagggaggccagccttagccccagtgctgggaaattaggagtcaagcgacaaacctcgttagcgaggagcgcgccggctgcaggagagcaattcccacccttaaactcggaggccgtgctccggattactaatttccgggggccgggcgcactgacagtgagtgtcatccatctcccccttgccagcccgcctggtggccgc

SEQ ID NO: 29372 - DNA, 1058 bp, Artificial sequence
  DNA replication origin
gggcaggtgtcctgctctgggaggtgcctccgtaggcctggccctggcacctacctagctccttccaggcaaatgggagtggagggtgggaaggaggtccagggaaagagagctgtgcccaggaagggctcgcactatctgggggcgcggggctgtgggtagggcgctgcttaggaagagagaggaggaggagcaggcctggagggaaatggagggaggccagccttagccccagtgctgggaaattaggagtcaagcgacaaacctcgttagcgaggagcgcgccggctgcaggagagcaattcccacccttaaactcggaggccgtgctccggattactaatttccgggggccgggcgcactgacagtgagtgtcatccatctcccccttgccagcccgcctggtggccgccagcgtttcccggccaggactcacagagcggctcgctgctgccccccggcggttgccggggtgtccggcagcgcctcgctcccctaggcctactgggttgggaaggggagtgacttccaggtgtgagcagtttggggcgcagcttgcatgtcacctgtgtgcacatgatcttgagcaactcagggcctcaacttcctcatctgtgaaacgggaccagaccacccatctcgcaatccaggggagctagatgtatacgccggagggattggccggctctaaaaagccgagtgatgcacctcccagtggccactccacacgtttttgtggttggccgtcgtggtcctgctcaaacaggtggagaaacctaaccccaccttcacccctggcccaagggcctctccaaggaagaagggagtaggtggtggcaccgtgtccgggtgagagacctggaggtggggcctaggtgtctacccggccaggtgcgagaggttcatttgcatgctgttcccctccccccgcagcttgtaatccaggtgggaaaggggttgggccagtcccggaggtgaattttgtttttaaggctcggggccagtcgtcgtccattccttcctaacacctccctatcctcccctccccccgcccgtg

SEQ ID NO: 29373 - DNA, 1167 bp, Artificial sequence
  DNA replication origin
acccgcgaacttgcaggaggacagtgcggtggggggaggggggaggaccccgtccccggccgggtgcggcgcgctcacctttcatgccagggccccgcagctccacctcggctgatacatgctggagccaccgtcgcccagtgtttgtctaaactgcttatctcacccggggctgctcggcggcggcagctcgggcccgctggggaggtggagcttccggggccccggccaagaaacacctgctgctgtcgccgccgaggacacacccaaacgcaacgccgcccactcccgggccactggctcgctcccggctccctgacctcagccagcgggaggtgtcgggtttcagccgcaaacacacaggcgcgcgcgcgcgcaccgacgggcgcccggatccacccgcccaggcacacgcccctccccggcccggccggccaggtgagccggggacaccagcggggccgcggaggtgccacccccacactctcgggagcccctggctggactgctcgggggtcccggggaccttggtggctaagaccggccacttaactcttaaagtagtgcagcaccctcgccacgtgagcggagccctgtctcgcagctgcgtcccgggaacctagaacagtgcctgacacagagcaggcccaataatgggcggacgggtaactccgtgtcctggaggccttttggagaacaactttctgggcgctggtggcgcgtggggtggggggaggcgacacaaaacagactgtgtacccaagccccaccccccccatgcctgaccttattaccccaactagaaaaggctgaatactaagaacttggcctcaaaattccataaggcaccccaccccccagttttaagtaacttttgggaaggccacaattgcgggccgctgcggggggtgttctttaaagaacccgcggcccaggggctggagaacccacggaggcgccgcttcgccagggggatcattaagtagctggggttgcggtcagaggcgaggtcgcccgcctccagaaactggcacgacccattgcgcttctggccccagcgcagcgcctccccattcctggcaccccccaccctacctcacccaggcacttgactggaatgactcagggagcgtcctgaaattcctgggcacccacaggcggcgcgga

SEQ ID NO: 29374 - DNA, 1006 bp, Artificial sequence
  DNA replication origin
tccgccgccccccacccgcactggcctttttccctccccggcccttcctgctccgcctggatgcgcctccccgcccccagccctcccgggccctgcggccgcgctgatgggcggcgagtggcccgaccgagtggagccgattcaattatattgcagcaccagagacacctcctcggccgcccgcccgcctctctagcaggctaattaaattcccttcatggaggcggagcgggagtggagctcaccctccctgcgcccgcccacccccagctttccgcctcccctccccagcgccgggtgggggaccaggggggcacttagaaatgtgcggtggagactcgaggcgcaggccatagggagggggttcccagatggggggaagggacaccgcgacaccctcattagatgggggagtggaggctgcgccctttccacgtggtgggccgggggcctggccgcagtgcccgtctgagttccgagggcagcgtgctggcggtgggggagcacctgccgggttcccagctgggcggtggatgccagccggagttgagtcggtttggctcttacaaactagcctttgtacaaagtgcgtttaaaacacactaaacccttgctccccgctgcggtgccttatctggggcctgaggggtagcggccacacaggttggggtttggaaacaaaaagcggggccaccaaatggaaagagggctccttttgtaaaaggcgcctgaacaaaaggcccagccgcactccgggtggaagcgaacccgcctaagccgatttccaggcggcgggggacaaaggggcagagagaaggtcttggtgggggcgttgtgaaatgtgccccctggtcggccgtctcgtcctctcctctgggattccgtgctcccgcctcccggcaggggtggaagggggaacccaggtgagcagccttccctggcctccctcggtgttgcttaagcttggggcacttcagtgttgctcaccctgtgtttacggccgcct

SEQ ID NO: 29375 - DNA, 1390 bp, Artificial sequence
  DNA replication origin
gcctgaggggtagcggccacacaggttggggtttggaaacaaaaagcggggccaccaaatggaaagagggctccttttgtaaaaggcgcctgaacaaaaggcccagccgcactccgggtggaagcgaacccgcctaagccgatttccaggcggcgggggacaaaggggcagagagaaggtcttggtgggggcgttgtgaaatgtgccccctggtcggccgtctcgtcctctcctctgggattccgtgctcccgcctcccggcaggggtggaagggggaacccaggtgagcagccttccctggcctccctcggtgttgcttaagcttggggcacttcagtgttgctcaccctgtgtttacggccgcctccaccagcagggacggcagaacctgaggcacaggctgtgcctgactcagccgccacgccacaggtgaggggcccagggcgcaggctccgacggcgaagtgtgtcatcccggccgccggctgtgcagggagtcgccccgcccaggtagattcaggagcgctggaagaggccctggcctgcgagagcagcgacctcggtgcttcctaagagactttccgagacagccagccccgtgtcggcagcgttcctgatctcctgcgggccgggtgcgaggatggcttttgtcactctggcagcagacaccaaagtcaggaggggaagctggggaagctggagccaaccacggttttgacgcttggagttttctttcctggagccttgggggcggtgccgggccagagctggtgagagcccgccaggagcctccggtgacctagggtcagccctgccttgggaagggaggtcgggaagtcctagttctaggcacagtgaggctgagctcaaaacaaggaaggcaacaaggtgtccactgtggcgcaggctctgagctgtttgggacagtttttaggatcttggagtgtcagagttcaaaggggcttgtacatctccaaactcggtgttttaaaactgctgctggccaggcctttccaagcccagttaagccacagcctctgggttcctgacccgggtctgggggttgtcagagctccccagctgatcctaacgtacacactgggggtaggaacaaggggcaaactgaggcttggggccaggcgtggggcggacaccgcgctcacagcaggaagcctcctccgatggccccgatgagccctcccctccagcagtcacttccctgtctctgggggaagttcaggggctgcagatctgagtgccttgtggtttcagagcagaagccaagcctgcctgtgggctcagcatcgccggccccaggaagagccaagtctgcacagcgccactctgtggcagaccggggtcctgcacctctgagctagagattcccccc

SEQ ID NO: 29376 - DNA, 1197 bp, Artificial sequence
  DNA replication origin
actgcaccccagcctgggtgatagagcgggactcttgtctcagcaaaaaaacaaaattaaactgagctgcttcacccagtctcgggatgtgagtggattcttccaactgaattcccagtgtacatttatctttgagtgtatttttgtaatgtttttgcatttgacatgtggtattttttccattcacttaaatatacgaggatccactagacagccgatgctatactgggtgttgaagacacaaagtggaatgcggttcaagcaaaaattctcagccagatgggagcattggagagacttccgcctcccagaggctgccgatccacgcggtcgtctctgccgcccgtcgggagggtgcggttagtcaccccgtaacagataagaaaacagggtttcggaatcagcccttgtggaatgcctgggctggcgccccactcagccctgcatctctgagctgttggggaacccgtttagatggtctcagccttgggtctctgcactgttctcagccctgggtctctgctctgttgaggaacccgtttagagggtctcagccctgggtctctgctgtgttggggaagccgtgtagatggtcttggccatgggtgtctgctgtgttggggaacccgtttagagggtctcggccctgggtctctgctctgttggggaagccgtgtagatggtctcggccatgggtgtctgctgtgttggggaacccgtgtagatggtctcggcccggggtctctgctgtgttggggaatccgtttagatggtctcagccctgggtctctgctgtgtgggggaacccatttagatggtttcagccctggatctctgcactgttggggaacccgtgtagatggtcttggccctgggtctctgccctgttggggaacccgtttagatggtctcggccctggatctctgcactgttggggaacccgtgtagatggtcttggccctgggtctctgctgtgttggggaacccgtttagatggtttcggccctgggtctgtgctctgttggggaacccgtttagatggtcttggccttgggtctctgcggtgttgggggaacccgcttagatcgtctcttgaaaaaggtttgtgtccaccgccccccgtgctggggtgtgcagggagtggagtgtgcgctgagatcgtatctattttaaatcaagccgatgtcctggcgtcc

SEQ ID NO: 29377 - DNA, 757 bp, Artificial sequence
  DNA replication origin
cccccctcgtttaaatcctgctgttggagcgtttggacagcaggcagaccggtttggggtctgttctgaagaactaagaacgagatgggttccggaaaatagcagctcgctgggccagccagccttgtccctctccactgggactttgcttccttttcttcttgccttttttttttttttttttttttttttttttttaaagcattgtgctgcttctgaccctattagaaacctagccagagaataggagaaagtattgattcaagaagcggtgctttgttacggggggcggggggtgggggcctcacccgggggcggtggtctttgcttccccagacctttcctgtctgtgaaatggtgggacctgagggttttgcggtgctgtgggctgctgcttcattctccgtttcctgccctctggcttctggcagaagcctctaggttctcagctctgccaggcagactgtctagaccaggtgggttctttctgaaagggtccagggagcagacagttgaggctcacatgaagaaggggtatgtcccctggcccctcagtttgagggtgcccagggccgaggggcctttaggtgtctggctgtggcagctttttttttcctgggggtgggggtcaaggtggcagctgacagtggcaggaagggttgtccagagcagcacgtgatgtaaataagagggtgggggcctcgcagacctggtccacctagacccctggctcgttttcgcctgctgagctgcacat

SEQ ID NO: 29378 - DNA, 1277 bp, Artificial sequence
  DNA replication origin
tcagacccagcttctggatgcttctggctgaacaaccttttggggcaagttactttgcctgtcagggcctccgtttcttcatctaccaaacggggtaacagcacagcaaagctgacctcatgaggtcactcccctgagcataatggggtaactgacatgaggggcttcagagcctgtggggcaccccagggccattacgagacagcatgccagccagcgaggacagatgccagtcccagcaggcagatgccagtcccagcaggcagggggtccagccaaggccacgcaggtgtctcagcaaatgggacccatgctctgagtctgcgatgctcaccccactggagccacaatggggagggcacatggtgtcaagctggcaggcaccctgcccacaagccccgtgccctgggcccacgagcccacacaccttcggcagagggccaccccgtgaccccaaaaggccggtggccgggaaaaggtgacccacaggacactggaggatgggggagaccagagctcttgtcctggtgcctgcaggggacactggaggacatggccaacataggggctgccatgggcagtccagaggacctccgggtcctatctgtcaccgaagcaccttcagcaccacaccgagtaggctgcgggtttttaggagggaatgtctagaaagacgaagtggcacaggacagagccccaccctcacagggacccacacggacatcaatgaaccaggtcctcgtggtcccaacgaggcactcaggagggtgacgctaggagagctgcctggaagacaggagcagggccccggggaacgcaaagaccacccccccaggggatactgcagcagctctcagaagtcacacagaccagtcgggcacctctcaagacagcctcacaatgagcccaggagaggccacagcagctgaactgtcacccaccacccagcctgtgtcccacccctcacagccatcgcccaagcccaagaggcctagcgtacagatggggaaaccgagaccaggagatgacctaagcttggtccaaggtcagtcagttgagcagcatgtccaggacttgaacccggcttcctgggcccccactgctcattaccagcacctgcccagtacacggcccaaccatggcacccgatcagaaggcgtgaatggtcacatgtgcgcgcaccacacacagctaagatacgttgaactgtaatggttaaaaacattcatcctgggcatggtgggcacacctgtaatcccaggtaagtaggagggtga

SEQ ID NO: 29379 - DNA, 1493 bp, Artificial sequence
  DNA replication origin
gggtgagcatcgcagactcagagcatgggtcccatttgctgagacacctgcgtggccttggctggaccccctgcctgctgggactggcatctgcctgctgggactggcatctgtcctcgctggctggcatgctgtctcgtaatggccctggggtgccccacaggctctgaagcccctcatgtcagttaccccattatgctcaggggagtgacctcatgaggtcagctttgctgtgctgttaccccgtttggtagatgaagaaacggaggccctgacaggcaaagtaacttgccccaaaaggttgttcagccagaagcatccagaagctgggtctgagccacaggcgcgttttcatcgcctccaatggacccgctgcgcctctgtgcacagggagaggcactgatggcagcccggtgcgggggacacgcagaggccaggcccgccttgggggcagcgtggctggcggtgcggagcagagagcagctggcagggttcaggctggccgaggacgggccctcattggcagcccgcattttctggaagtgaggctgccaggcagagcccccgccctcccgcttgtttggatgtctgtgccgggttgaagcggccttggaaaggcaggatgggggtgcaggtccccctccacccctggcccctccagaaagagccaagggaagacaggctaggtggggcccgctgctgcagggcacggccacggcgccacctggctgttgcctgccatgggcatggggctctcaggggtcctttgttcccaaggtgtgagctctcactggggagaacaaacgatgccccccgaactcgttcccgcctctctgttctctcatttgcagccccctctctcaggcagtgcccccagcccttccctcagtgcccccaaagaattattttctccctacgtcccctctatcaggagagggaggacttggctccctgaatacatggccaggactcacggcctttggtggcaagttctggggatagcaggtggacaaaggaggtcttgagggggtcctctccacgctgcctccgagcctgctgtcccatggggacaggttccaattagacttgtcaatgtcacttagaatctggcagaggtggagtgggctctggaggccagggcagcctcttccggggaggaacctgggggcccccttgcccttaccccataggaagtgcacagtccgcccctcttgtgtgttgccccccggatctctgtgacaccagccccaccatgtgtggccccagcgcccccccgccccaagatgcatccacagggaggaagccgggaccctgtctgtgggtgatgtaggggtgggggcgtctctgcgggggagggatgttggtggaaacattttgaccaggttgggcttttattgattggacacacggggtgggcggactgagggcttgtttggaggtggccatgtcctttccccagtggttctgatgtcaccaggtggctgcccctgggc

SEQ ID NO: 29380 - DNA, 1420 bp, Artificial sequence
  DNA replication origin
tggggagcactggggcccagctctccctctgcagcctcttggggctcccctggtccagggcacccaccctcctcccaatcaagtcacagagctggtaggagcacctcgctacatccggacacccctgcagtggctccgggggccgaggaaggacagaggcaggagagacagaagcacagaggcaaagcggaggtgctggggcaggcggactggcccagggtctgtagctcagccagcactgcctgctccatgcagagcacacggcgtgggaaagacgagacctgctgtgagcgtgcacgccgcaggcgggaggctgagtcccggcctcgggagccgccgctccccccacgcgcagcctggcgggcccccttacctctgggctcctccgcctgtttggcgagcttgcgcagcgcggcggcaaagctggaggatggcgcggcctgggccgacagcgcgctgctggtggcggggctgccgctgggcaccagggcgccattgagcggcgagggggtgagggggttgacggtggcggtggtcctggtcgcggtggaaagcatccctagcgaaggggacttgggctcatggctcatgcctgaaacaggaaaagaagaaccagaggtcacccagagagcaggagcgcccagcaccagagcagggtcggcagggccggtgtcagcagcagcaggcagggagcaggggcagccccgggggctccagcaggacaagcaagaacaggacagagccagcgctgcagagagaacagaccccgtccccagagtccagctggaacccggcacagacccaagaggcccccaggaccccagatgctgaacggcttgggccagcactgtccctctacctctccagggcagtccaggctgggcaggtcgtggaggatcccacgcatcacccaacaggcccctgaccatcaaatggcgtggggaaggagactgaggcccaggcggaggaggcgtgcggcccgcatcctcaggatagaaacacgctggtggagaggcccagggacgacgggaaccaagacaactgctgtggccactgacgcgacaagcacacgatgccaggcacgcatggcaatgccctcagaagactggcgggagttctgccccacgttacagaaaaggaaactaaggccccaactcggcccagtccacgcgggcactcagggcagacccccggcctccccgccactcagggaccctgtgcgtctctgtctgagaggggtcccagagatggggccacacaggcaggctgacagggagcggtggggaagaacacggccgcactgcagaccccactgtggccccttactgggcacagagtctgcccggagatgctaaaaacagaaaaccgcaaatccaaaccgcggtgcagcttggaaccctctttcctcccagggccaagt

SEQ ID NO: 29381 - DNA, 1427 bp, Artificial sequence
  DNA replication origin
gagccatgagcccaagtccccttcgctagggatgctttccaccgcgaccaggaccaccgccaccgtcaaccccctcaccccctcgccgctcaatggcgccctggtgcccagcggcagccccgccaccagcagcgcgctgtcggcccaggccgcgccatcctccagctttgccgccgcgctgcgcaagctcgccaaacaggcggaggagcccagaggtaagggggcccgccaggctgcgcgtggggggagcggcggctcccgaggccgggactcagcctcccgcctgcggcgtgcacgctcacagcaggtctcgtctttcccacgccgtgtgctctgcatggagcaggcagtgctggctgagctacagaccctgggccagtccgcctgccccagcacctccgctttgcctctgtgcttctgtctctcctgcctctgtccttcctcggcccccggagccactgcaggggtgtccggatgtagcgaggtgctcctaccagctctgtgacttgattgggaggagggtgggtgccctggaccaggggagccccaagaggctgcagagggagagctgggccccagtgctccccaagtggctccttgcccaggttttgacactccctccagaagtggcagagaacatggtgtccctggaaacacagtggtctggagcgggggtctctggcacagctgaacccaccactgctcaactccctgaggcagagactgtggggagcatagacaagcggcccccggggtctggagccttggcttctggtatcacctgggcaggacctgctgtgtgaacctgggcacgttgctgatcctctgagcctcatttttcctgtctgtgcagtgaggctctaaagacgccccctttggctctggctctggggtactttttggcgcctgcgatgaccattggcaggggctgctgctggcacaaatggggaggggcagtgggcggctggagctgctgggggccttggccatgtggattctggcctcggacaccctctggactcgctgctgacaggcgggggggctgaggaaaccgggaccccagtggcatccgcttcattcacctccaaggcccacgggttaagatccgggtgccagggccctccggggtggccacagcaacacatgcaggagccatgtccgtctttacattacccgggttccagcttggcagaggggacacctgccctgaccagggcgggctggggggacttctcatttctgaatgtctccttcctggatcctttctgctgctgctcgttggagaatggggggagtgtgagaggacacacctgacattgatggatggggggtattggcccaggagggaggcccgttggggtctggtttccgtaccaccagggggcagcccctcgcctcctggctcttcctggcaaaccaggcacagg

SEQ ID NO: 29382 - DNA, 986 bp, Artificial sequence
  DNA replication origin
ggcgggggggctgaggaaaccgggaccccagtggcatccgcttcattcacctccaaggcccacgggttaagatccgggtgccagggccctccggggtggccacagcaacacatgcaggagccatgtccgtctttacattacccgggttccagcttggcagaggggacacctgccctgaccagggcgggctggggggacttctcatttctgaatgtctccttcctggatcctttctgctgctgctcgttggagaatggggggagtgtgagaggacacacctgacattgatggatggggggtattggcccaggagggaggcccgttggggtctggtttccgtaccaccagggggcagcccctcgcctcctggctcttcctggcaaaccaggcacaggcaggaccgccagaaaaccctccacgcccttggcaggggactccctggccacacctgagcgggccaggttgcatgggccccacctgtgtcaagaggccggacagctgcaggcaagatggctcagggggaagcagactgcctgcctggtggaggcatcctggactctctggggcggtgaacaaggcagctggggacagaccctgggaggaagctgagcttggagtcgagactcgggctctcctgagaggggtggagagaagcgaggtcagagctggcccagctcctgctgctgcagttgtctttttttctcagcgtttgggggcaggagaaccagggctggtgagggatttccgaggccacgggcggcacgtgactggcgctggtgctacctgggctgggttatccttgcatcctgctttcatccagcagctgtgtctgctttggggcctctgggctccacccctgggtaacgctgcagaggacgtggtcaggaaagggcaggtttccctcctcgccaaggaaggtggtagagaggtgttcagactcgccttccctccctgggcccagcagcggccgtgggcgtcacagcagg

SEQ ID NO: 29383 - DNA, 1898 bp, Artificial sequence
  DNA replication origin
gggcaggagaaccagggctggtgagggatttccgaggccacgggcggcacgtgactggcgctggtgctacctgggctgggttatccttgcatcctgctttcatccagcagctgtgtctgctttggggcctctgggctccacccctgggtaacgctgcagaggacgtggtcaggaaagggcaggtttccctcctcgccaaggaaggtggtagagaggtgttcagactcgccttccctccctgggcccagcagcggccgtgggcgtcacagcaggagcctgctcacagggccgtcgcttcctctccgctgccccatgctgctggccccagcacttggtttggtggctcggccagcgggtggcctgagtgccagaggccgctggtccccactggccaggaacaaagtgccgctgggcgcccctggcgggaggccagacaccatggcctcgtggccctgctccctcccagctgcaacctgggcactgggaagggtcccccatggtggatgccccccaggaaagatgcccccggggtggatgcctgggaactgaatggcagagggtcgggagagcgggcgagcagtgccactgcctgagccatgtgcccatcggttcactcacccacctcaccccctattgagctgggaatgccaaggtttgtggggctcggagtctgcggatgtggagcagtgtttgggtcctggaacgccctcagccaggcctgggccctcgtcgcccccacccgttttgatgaatctccagctggtcacccctgtcaggccttggtctggatggggagggactgggtgactcgttcctcgtgacctcagccactcagtgcacctggtccccattctcatggagtcacccggaccctgacctcacgtttccccgtccatggaactggccggcagccctcccgggaccctcgggcagctgagaaggccaaagttcagagaggacaagtcgcaagacggcagccacagcgggtggggtcgtgtccgtgtcccactgctgctgggccttcccgggggggggctgggagagccgccgttaggacagttctgagctggtggtcccggcggtccctgctggaaaggaagcccccctcacccctagcaccactgccagtggagcagggagctggcgttgggcgcacaaaagggtctatgcctggctgtcagcacgctgaccctgcctccctgtgggttgtggagtcctggatgacagtggggacatgtggaccccccagctcccctgtgctacccccccagctccctggtgctacctccccatctgcgccagagggcagcagggggaacctttggcggacttggcagtgggaggggtttgcatttcttatttaaaatttttttagttacaattcacatgccataaaattcaccctgtagaagcgcatgatttggtgattttcctacacagttgtgtgaccatctaattctagaacatttgggtcacccctaagagaacctcggttgcatttgccgtcagctcccacgccctcccccagcccccggcggccgctgtctgctttctgcctctgtagatgtacctgtgggcattttgtacacatgggctggcgcggtgcgtgtctggaccctgagcgtgacatctcctggtccttgtgggccatctgcggcgtgacagcccttcctgcttctcgtggctggacgacccgggtcgggggagctgggtggggccacgaacccgcagctgcctttctgctccgtcctggagttggaccagtgagggcctccccaccttcatcatggcagtggctgtgcccccttgattgcagcagtggctatgtatcgagtccccccttgatcgcggcagtggctatgtattgagtccccccttgatcgcggcagtggctgtgt

SEQ ID NO: 29384 - DNA, 2139 bp, Artificial sequence
  DNA replication origin
ccctgcaccatgggtggtgctggggtgaggtggggcttcctcgccagccaggagcacctgctcagaactgtcctccagacggcggctctccagcccacctgggaaggctctggagccaccctgttcccaaagcgccggcctcccagagcaaaggcccgcagcacgatcgcccccaactgtttcccagggagggggtgcctggtcccaggtgctgcctgtgcctcctggagcagctgaggacacgcaaggctccccgtacctccgcccccggccgccttggcagacgggcgctgcgtccctgcgggaggctgccgcctgctgcacacggcaagcagatgccacacagcttgcgagggtgcctggcagcagccctggcttcgtcacacagcagtgggggcggcggtggaggctccacggcctgccctctgcagagacactgggcaggcccgacagctgtcacaccccagcctggctcagggctgccttcagggtgtggagctggggagctggaagcacagggcctggctccacgcacaggcgttcccggggcaccctcggggcaaacacctcttattcagtcagtcaacaagcacctccaaggacaagggatgatggggggatcccgacacacccgcaaggcaggctaggcctggcgcccaggaggcttagaggggagtcagaatctgtccagcgcagggggtgggacacagggctgggacccatccccccagtcttgggactcctaggctgaggtttcagatgcctatgggggtggttgggtgtctgtgcagaagaggtcctggtaggagaggcagggagggaggcggtggccaggccgccattccgaggaggggacaggtccctgcttgtacccaaggacccggtgccacccgaggagtctgggctacagcgggagctggcccagctgcgtcgaagggagggctgggcggccccggggacgtccctttggtggctgggacaatgtgggaggaacaaagagaccaatagccaccagggcagaacagggtcagggacgcctcggctcagactgcagcccaggccggtcgctgggaaggggctgggggtgcaacccaggatcaactcaggatcacgcccaaacctgcagcctccttctagaatgttctgcgtggggcccgggcactccaagccccatttctcccagaaagtcaagaccaacaggcagccacttggccctgcctgcaccctgcaccactgggacagaggaagccaccgcaggctcccggcccagagccattgacggggggaagccatggcggacccacaccttccaaccccaccggggaagcacacgccctcccagggcagatgatgggggtcacaggggtaggacggggagtcaggggaaggggtggcagtgggtggaggggtaggggaggcacgtaggaggtgggggtggcaagaatggggaaggtgaaaggaggcagcattagggtggggggcagggaaggggaggcgggggtgggagccagggtggaggcctgctgcattgacactcatgccaccattcccggctgtggcacattcccacccagtccccacgattcatgaggtagagacctgctcctcacccaagaaaaagtggaagctcagagaggcaaagcggcctgcccggatcacacagcaaggaaggaaagtgctggggcatgcatcggcgattcgcaagcgtctgcccttgcccaaagcgccccagcctcggcagtgagtaggtgagtaggttaaagggtcaggctggccctggggaagggtgtctggcccgcgctggtgggcgggtgactgagctttgaagaagagaagacgtctcagcgcctccagaaaaataaatcccagcgagggcctcctcttcctctccttcccagcctttctcccagggcagcgcatgccacagcttcgtctgaattgaatttttaaactacacccttgagacacaatgagaggagagacgcggaggcaatcgcagtcagatggcgaaaaccgagaggcacttccagaagtcgtcaggcgtgcactggagaggagggtcagggtgagtgagaaggcttgccgcaggcggctggggcccagggcacccagaggaggggccgcgtggggcagcacagc

SEQ ID NO: 29385 - DNA, 1234 bp, Artificial sequence
  DNA replication origin
gtcgggatccccccatcatcccttgtccttggaggtgcttgttgactgactgaataagaggtgtttgccccgagggtgccccgggaacgcctgtgcgtggagccaggccctgtgcttccagctccccagctccacaccctgaaggcagccctgagccaggctggggtgtgacagctgtcgggcctgcccagtgtctctgcagagggcaggccgtggagcctccaccgccgcccccactgctgtgtgacgaagccagggctgctgccaggcaccctcgcaagctgtgtggcatctgcttgccgtgtgcagcaggcggcagcctcccgcagggacgcagcgcccgtctgccaaggcggccgggggcggaggtacggggagccttgcgtgtcctcagctgctccaggaggcacaggcagcacctgggaccaggcaccccctccctgggaaacagttgggggcgatcgtgctgcgggcctttgctctgggaggccggcgctttgggaacagggtggctccagagccttcccaggtgggctggagagccgccgtctggaggacagttctgagcaggtgctcctggctggcgaggaagccccacctcaccccagcaccacccatggtgcagggagctggggttgggcgcacaagagtctgagcccgttcccaccccgcctccttgtcaccagcccggtggccgggactcatggcttccctgcccacacttcgctcccttaacaccggccgggggctcatggtacctgccctggaagctgccagaggcctctccaagcaggtgttggccgctgtgttacctgcggcaggggtggcccagccacccatagcccggcttgggccacagggacggggccgacaggtggtggcagtggggctggaactgctctcttgtcatcgaggcccgcggggccctgtgccgccttcccctggtggtgtctgctggctgcctgcctcgtcttgtcactggctttgcaggcaagaggggaggcagatccggttactgtcctgtccctggtgccacctgaaaccgagatcccacctgagtgagtggggactacgtgtgcggggaccacggagcagggaccacagacccatcctcatgagctgccgtgggaatgcttccaccgtggagccggcctgggcgggggagaggctccccctttctgccgctgcctcggaaatctgcctctcaaagaaaacagcaaaacaaacacggagg

SEQ ID NO: 29386 - DNA, 1673 bp, Artificial sequence
  DNA replication origin
gagacacaggtgaggggcagcttgaacagatgggtgagcgacagacccctgtctcagccccttggaaggagggtccccaggtgcactttgccccctgctttcaaccatgcaggggcaggtgccggccagggtgggaacccaggggaccctgtgtgtctgctaacctgggggctcttcctgtcatcagttctgtccccaagttagtgtttaaaattttctttttaattacaaaatatttttagagacagggtctctctctgtcacccaggctggagtgcagcagtgtgatcatgcctcactgcagcctcaacctccagggctcaagtgatcctcccacctcagcctccgagcagctgggactataggcatgcagcatcatgctcagctcccagctcaaccttgaaaagctctgggcagagtccactcagcaggagactcagtgtgccacgtgccatgactctggagcagacccaccaacggcgatgccagctgggccctcagccggtgtaggctggaacagctggagggagggcggggcaggtccacagagcctgtgtctgccagggctgctcctccactttctactttcgcctaccgacctgtttccacccaaaacctgggaacccagccctgggcggacttgtggcgacatggatgtggaaaggagcccggccagaggaggtccagccccttggcccaggaggcccacgggagccacaggaagccgccagccagtgagtagggaagtgggacaggagctgagtcaccccagccactttccttgaaatctgcccagtggaacgggaatagcagaccccagaggaaagagccaatcagccccccacccactgggaatggtgcgggtctggaaggtgaagtccccatcgcacaagtgacaagaacaggctgggaaaccttctggagtcaccgcagccctggtacacgggacagcaggcacaccacagcgcaaggctgaagtcacgccgcgaccccctgcgttccagggagaagcaggagaccaagtagcagcagccgccctacaaggctcccagggcagggctctcccgacccgcggcctgcgtccaccaacgaggctccacctcacagctgcaaaagggcgggggggggcgtcagccagtggcgggctcccatgcccaccctgccatcacgtgccacagtcatcaaacccaaactgacagcgggaggtgcgggtttctagctggagatgcgttttgccgggggcggattatgtgctgaacagcgtgagcttagatgctggaccctgggagccggatggagccgggagagtccgcgtgggaccaaaggagctgagacaggtaccctgagggaggtgggacgttaggacgaggaagaagaaacgggcacaggggctgcagggaggcacagggtgcatcagggaaaaccggaaaaaaatcacccttatgtccacgtggctaggggaggccttgcctccattatcccaggacaggcccccaaaggctgacacgccaagtactgggctcctccaccctgcccagggctccccactgtgctatgcggagaaggggtcgggataggtggtggggtcctctccgtgggccttgctcccctttggctctggcttcccctgaccaccagccctctggcccccgggccaggagaacggagaggca

SEQ ID NO: 29387 - DNA, 1239 bp, Artificial sequence
  DNA replication origin
ggaagccacagacatgtgggtctggctcgccgggcccctgccccgcctgctggctgccccccagccccccggactccctgtttgtcctcagccaggccaggaaggtgccatctggcctgcgagcagggctttgtcctcggctgaggggagaaggggttcaagggccgtgtctgggctggggacaggcccctccttgtggcggggcggctggggccctgtgctttgccgtttgacccggcccacggcgcgggcagcatgcggaggagggcggcaggcctgggctgttggtagtttgaccctgggtgctgtcctcaggtcgaggtctgtcctccagccctcttctgactctggccacccaaggctgggtgatgattgaagcccctggctgtcgtctccctcctgccctggaggcctccccaccagcctgggagggggagtccaggtaccccgggtgcctgagcaggcgaggcccctgttctgggcatccagagacccactagctttaggcctggtgttcattggggtgctacttggatgctggggggccaggggccactccgtcttgttaagtccatcccagaccctaggaacagggtgtgtccttcctcgtgctccgttcctcagatgtttggccctatgccaggcagggtaggggcgtgaggcaggatctagaagcccagcctggaaatagcctcacggggctggggtaggcaggccagcctggcaacacacctgccatgtccgggcccccaccctgctggtgcgtcccccacatgcccgtgcacagctgtgccatcaactctgctgccctgtgagtcccccgcatgcccgttcatagccgtgccatcaactctgctgtcctctgagcaggtgccgtgacgggcacatgccattgatgtgtgcacgaggcacgacaggatggccaggtctcccaaggtcaggttggcccctcggccactcccccactaccccggttgctgacaccggctggagaccccaaggccaggcgctggctcctcaataggaagttcccggccccacgcagggcgtcagtgcccatgtgtacctcccaccctcgagaccagcaccctggagaggcaggtcagaagtcgtgaacccaggaggaccctacagagaaggggggccggggctcagcccgcgggaagggagcagatgctgcctctcattgaagattccaggcggcggcggcggcggcggctcctccagttaatcctcgct

SEQ ID NO: 29388 - DNA, 779 bp, Artificial sequence
  DNA replication origin
ccaccttccgggctgaggtccctgccaagttcaaggataggccgtgccacccctagccacgcagaggctgccccgcacacacgcagggtccagcccggagaaaccagagcatgaaaaggccttgcttgttcctgttattcgtgtgactaagtgggaggaggaggaggagggggtaggaggaggaggagggggtaggaggaggaggaggaggaggagggggtaggaggaggaggaggaggaggggggaggaggaggaggagggggaggggggaggaggggggaggaggggggcggagggagcctcagggcggcccagatgggggctgtgctctggactctggatggctgccaacccaggcgtcactctgtcactggggcagccgttctcagccccagcatcttccccatgtggggacagcactgcccaggcctaccctgacctgggggtgtctgagagccatggccacgctggcccctctgagcttcccagggatgcagagccacgggaacccggcccttcctcacgttccatctggccatgtcaggtaacgactgctgatcagcgggcagtgctcctgaagagcaccagccccgctctgcctccctgagccacgaaatgccaaacacccaaaaaacaaggaggccatggccgtctccccacaagatcagcaggaatgatggcccaggggctctgagacctgccccaccgtggagaagcatctgtctcccaggggccgtgcctgtgtccctgacccgccagcccctcttcctgggcccat

SEQ ID NO: 29389 - DNA, 1180 bp, Artificial sequence
  DNA replication origin
ccacttagtcacacgaataacaggaacaagcaaggccttttcatgctctggtttctccgggctggaccctgcgtgtgtgcggggcagcctctgcgtggctaggggtggcacggcctatccttgaacttggcagggacctcagcccggaaggtgggctttgggccactgcctcctcctgctttgtgcctggagaagacccctcatctgagtcctctggaccaccttcccagctacacccaggtccactgtgtccaggagcctgggacaggcgagctgttgccttccctgccccaccgtgtgtgtgaaggccggtaccccagctggccagtcagggcccagctgctgcctgttctggtgggctccagggccagggccaccccaggaggtggttgggggcagaccagcaccttcggcccaggggcagtgccagcttcctttgcccctgccctccacgtgggcaccagggccaggacatctgcggccaggtgggcagctgtcggcgcagttgacgtcttggctacatcgtggcactcgcttcacggcgtgctgggtgccaacggtgtctgcttccccgggtgtgtgtctggtgtgaccttcggatgtccacaccaggaggggtggaggcaggagcccctgccaccctgcatccttcacctgcacacattgtgtttctggggggttctagttcttttgctggactgaggaggcccagggagggagacggatcccgagacgcacttcaccccagacctgtcgcagccacatcccctttcttacggttctgcttcccacaccacatgcaccatgttttgcgtagaaagccttagggaaaggatgtttctagaacatgaactaaatctagcgccttcccgtgagtcaggagacctggctgtgtcctgtggtcagtggcctataccaggctcctgccctgactggacgctctcctcccgcaggatgccggctccaggagcagcagtggaggtcgggaacgcctcattgtggagcccccgctccctcaggagaaggcagggggaccagccatcccctcgcacctgctcagcaccccctaccccttcggcctctcccccagctcagttgtgcaggattcccgcttcccgccactcaagtaagttggtcggcggggacttcggtgaggtggccaggtggggacacagtgctc

SEQ ID NO: 29390 - DNA, 1142 bp, Artificial sequence
  DNA replication origin
agccctgtcgacaggtgtgtctcagccaggtacacacacctgcctgagcgtggggaacgtgacaaaatggctggggatgaagaccatgcctgctgctagccccaaagccccttgatgccggaggctgctaggtgccgacagcttggggttccagggcgccgcctgccacctccctcggctcagccagaccagcacagagtggtcaagcgcccaggcccttccaaggctggcgagcaggctgggctgccctgacgtggggtggtccatgacatgactacaggcccctctgacctctgacaaggatgggcagagcttctccacggacccaggccagaccacagtgccaccgaggtctcctgctacacagcaaagcatcgcctctcccacgggcaaagccctgctctcttaacagtgacttgctgtcaatggaccccccggtgagaaggggaggagccaaggatgacagtacagtcaccaagggggactgtctaccaggaggggacccctaatgggccatcagggctgaatttaggctcaaagctggggacgatttcaggggctactctagaccctcccctaggagcctggctctcaggtcataagaaacaccttccccgccaggttccatcttgccaggaacaggccagcacctagacgagagggcgcgtgggggatgcctcacctgaaggccgggtgggggaaggggtgtggggccaggtagctggggtggtagtaggctgcagcagtggccgggtccaggccgaggggaggcagtgaggacatgcggaggtcgtcggtggtgtggtagggccggaagcttctcaggtagtcctcggtcacggtactggggggcaccacgtggtgcacgggccgctggaggctgcaggcggggatagtgggcaaggtggggacaggtgagtgcacacctgctcctgcatggggggacggctaaactccctgcatcacccctggcgctcagtcggcacccagactcctggcaccccgaacgaggacggggcttaagcagcggggggagcgagctgccactgccacctcagtgtgaaggggcacagacagggctgcaatccccagggctcagcggccgacaaccatctagcaggcacagcctcatctgtgcagac

SEQ ID NO: 29391 - DNA, 1556 bp, Artificial sequence
  DNA replication origin
cttttagggcgaactcagctggggaacatttacaccacggcaaccggcaggtgctgcgattcagggctcctccccgcgggtggctgagaccttgcccagcacagcccacccacgcccaggtacctgctcgggttggggtcagctgctccgagggcttgccccgctcctcagtggcatggccacgcagcccatgcagctcggccacgggcaggaagctgggctccagggccttggcggccagcagctccttctcccgggcccgctgctcccgctggcgctccagctcgcgctcgcgctccttctcacgctcacgctccttctcttgctcgcgctccttctcgcgttcgcgctcacgttccttctcccgctcgcggtcagcctcacgctcacgctcgcgctcgcgctcgcgctccctctcccgccttagctcctcgtccatctgcagcctgcagcacatggaaagagttgggggctctgctgcaccaggaacaagagacggacctggggcaggcccttaaaaagcataaccaggaacgagccagggcgctaatctgaacagtgacgggaggtgagccgggtttcactggtgcaggaagaacttaaggtccatacaatcaaagcggcttacaaaatgcccaagcacgcccgagagctcctcggcctgcaggtttactgcaggagaccacggctaccgagacaggcgctatttcagagcagagcctgaacgatcattgtcccatttggcaggtggacaaactgtgaggacaggcatggccaaggagtccagtcaggttccagcccaggctttctgcccagctgccatcaagggacagggagggcagaggggctcctcggctcgagacgcacttacctctccgcgctgaggccagacatgcgctccgagtgcagcgctgccagggatgagtgggagagctcgggagggtagcggaccccagagaggtgcaggtgcatcgctgatgggtgcagtgggggcagggagccgggggtggggatggggtagaacggggacctcagggcagacaggcagtaggagtcgtccatcctgtgcagagaagacggggctgtgagcagcaaatgaaccaaggggaagacccagccctgtcgacaggtgtgtctcagccaggtacacacacctgcctgagcgtggggaacgtgacaaaatggctggggatgaagaccatgcctgctgctagccccaaagccccttgatgccggaggctgctaggtgccgacagcttggggttccagggcgccgcctgccacctccctcggctcagccagaccagcacagagtggtcaagcgcccaggcccttccaaggctggcgagcaggctgggctgccctgacgtggggtggtccatgacatgactacaggcccctctgacctctgacaaggatgggcagagcttctccacggacccaggccagaccacagtgccaccgaggtctcctgctacacagcaaagcatcgcctctcccacgggcaaagccctgctctcttaacagtgacttgctgtcaatggaccccccggtga

SEQ ID NO: 29392 - DNA, 1378 bp, Artificial sequence
  DNA replication origin
tgcaggccgaggagctctcgggcgtgcttgggcattttgtaagccgctttgattgtatggaccttaagttcttcctgcaccagtgaaacccggctcacctcccgtcactgttcagattagcgccctggctcgttcctggttatgctttttaagggcctgccccaggtccgtctcttgttcctggtgcagcagagcccccaactctttccatgtgctgcaggctgcagatggacgaggagctaaggcgggagagggagcgcgagcgcgagcgcgagcgtgagcgtgaggctgaccgcgagcgggagaaggaacgtgagcgcgaacgcgagaaggagcgcgagcaagagaaggagcgtgagcgtgagaaggagcgcgagcgcgagctggagcgccagcgggagcagcgggcccgggagaaggagctgctggccgccaaggccctggagcccagcttcctgcccgtggccgagctgcatgggctgcgtggccatgccactgaggagcggggcaagccctcggagcagctgaccccaacccgagcaggtacctgggcgtgggtgggctgtgctgggcaaggtctcagccacccgcggggaggagccctgaatcgcagcacctgccggttgccgtggtgtaaatgttccccagctgagttcgccctaaaagcgtggtgtggctgaacatggagtagggagcagaggcacgttggcacacgatgtagacacagtggatatagctgaccccaggaggacagttgtgaaatgtagccggggcattaggaagggatgttttgagtgcttcgttgattttatttctctgtaagtttacgaaacaattgtccagtaataacaaccagcttttgcatgtttcccggaaatttaatagtctgctctttgagccagcatgagctggctctggcaccgcactggctgggcaagagttttgccagccagccacggagcgtttccttccagggacaagacatgcttcttgaaagctcccgtagggccccttctgaatatcttggttctggctgcgggaagaaccctttggaagggctctggtttctctgggcagttgggtgagagaggacggggagggagcatgctggcccacgtggctgagatcctgcttgaccgtgtttccccccacagagaagctgaaggatgccggcctgcaggcgcccaagcccgtccaacaccccttgcatccggtgcccaccccacaccacacggtgcccagcctcatctccaaccatggcatcttctctctgcctagcagcagtgctgccacagccctgctgatccagcgcaccaatgaggaggagaagtggctggcgcggcagcggcggctgcggcaggagaaggaggaccggcag

SEQ ID NO: 29393 - DNA, 1121 bp, Artificial sequence
  DNA replication origin
tgctgtcctgggataagaaacccttgggctctgggacggaagcgtgttggtggtttaaaatctgtcctcccttctgcctgcctccgttatccagtagggcagcgagggaatgcgcccccgctgatcagggatgactgggagtgactgtcaccaggccacagctaagtctccctgtggctcacactgcccggcacggccgaagtgagatcccttctgcctctcccagcccccgtccctgaggcctctcaggctcagccttgcctactacccagaggactgagggcagccagctcctacctggcatggcctgataacatcagggtgccctgactcctgtaggcatcttcttcctcagggctccccagggccccagcacaggtgttgtgactttgcccacccatggactgcttccagccagtgtagctgccccatccggacctggggcatgatgggaagcagggcctggcctcccctggctgcggtggttcccctgtggccggctgcacacgtggccttacagcattgtgaacttgggggcctgacagggccctcatgctccaagctagaaaactgttcagtgcttggtgtggcgcatgaaatatttattctcctgcaggtttcattcccttgctgtttacttaaggacacagcttcttcctgtggttccctgttgtattctgctaagagggacagcagcgtcggatttgtcccttggcctggagtctggaataactagggagagccttggtggctgtgtttaaacagggctcccggggcaggctagagatccctgagcccggccgtgtgcctgctgtggcctctgcctctttcttcccctcaagctttgcccagggtctctgcacagtattggtccagacatcctgtgagtatatctccctttaaaaaaaagaaagatagccaggcacagtgacacatgcctgtaggcccaactactctggaggctgagatgggatgatcgcttgagcccgggagttctcggctgtagtgtactatacccactaggtgtcccagctaagtccagcacaaatatggtgacctcctgggagcgggggaccaccaggttgcctaaggaggggtgaaccagggcaggtcggaaatgg

SEQ ID NO: 29394 - DNA, 1063 bp, Artificial sequence
  DNA replication origin
aggagcagggaatgaatccaggcaagcactgagagtggcctctggctgatggaggtgggagatgtggtaggtgtctaggtgtgttttgaaggaagcagcagcaggattggctgaaggactggccatggggtgtgagggagaagagtgaaagctgacagccaggctcttggctggaggcccaggagagggagttgctgtctcctgaggtgggaggctgcaggagcaggctgtgggctgcagtgggtatcaggagttgggggtttgaactgttgtgctttctggatatccaggaggaagttacagcagcaatgaggttattgagttaggagttagagctcaggggctgatgggggtataaatttggaggtctttctgagcatgtgggtagcatttggacgaggtggtgtggatatgagtttaggtagtgaagaaaggggttgggagctgagctctttgtcccagtgtcgagaggtcaggaggaattgccaggagacaaaaaggggagcctagtgagttcataagcaagctcagaggggtgttcacggagggccttctttttaaggctatatctattagtgtgtttgggaggatcaagcaaggaggggacagtgatcatttaagagcatgagagctgctggagtgccttactgtgcaggtgagaggagggtccaggacacctggaaggctggtcctcgagtgggtaggagctacacagggagtttgggggatggggtggtgtgtgggtcacactcagctgggtgtcaggtgagaggtgggtggtgggttgaggcggtgctggcggcagtgaagagagggtgagtagaccaaggaattgggccaggattgcaggacggcaccaagggccctggggatgggtagttggccgtttacaatgggaccctgcagcgtagctgtgctccgtgcttgtcccttagctatagtacacagtctgctcccaggacaggtttctctgtagagggggagggctgagggagctggagcatgtgtgagaacagtgctgatgctggtggaattggatacagctgtttgattctagacgctg

SEQ ID NO: 29395 - DNA, 1922 bp, Artificial sequence
  DNA replication origin
ccgcccccccgcccgcagacagcgcctataggctgtctaccgccttcctataggctggcgcaggccgtcttccggccggggcgggctctcgccgtggcgggaaaacggcggccgcggcgtctcctccgggacgctgaggggcccgaggagaccgtgaggctctggcctgcagctcgcgccgccatggacgctgccgaggtcgaattcctcgccgagaaggagctggttaccattatccccaacttcagtctggacaagatctacctcatcggggtgaggcctgggcccgccgtggggaggggaggccgggctgggcgcgtccggggctcccgcgtggccttcagccccggggtcgcgggctcgccctgctcccgcatctgcggaggccaccactcggcgcttgactcgctcaccgccgttcccgcttctcggatgaggaaagcgagactgcgctctttgccagtgccccgaacgcccgggtttacagggtttttttgatctgtttgggggcttttttggtttgttttttggtttttgaggtggagtgtcactctgtcgcccaggctggagtgcagtggtgccgtctcggctcactgcagcctccgcctcccgggttcaagcgattctcctgcctcagcctcctgagtagctgctgttacaggtgcccgccaccacgcccggcgcatttttgtatttttggtagagatgtggtttcaccgtgttggccaggctggtctcgaactcctgacctcatgagccactcgcctcggcctcccaaagtgctgggatgacaggcgggagccactgcgcccggcttatttatttggtagagatgcggctggcctcgaactcctgggctccccaggcgatcctcccacgtcggcctcccaaagggctgggattatgggcaaaagtcggctttgcctctgtttgtttttgtctttatctttgagatggagtttcgctctatcgcccgggcgggaatgcagtggcgcgatctcggctcactgcggcctccgcctcccgggttcaggtgattctcctgcctcagcctcccgagtagctggattgtgagcccccgcgcccgcccggctttgcgttttcagtatgagggaggcgcctcggcgctgggagtcctggagaaggagggcaggctctgtacctgcccagacccacctccccgcaccccaggaccccaacattgggtgtgtgaaacctgttccggagttggagggtgcaggcgggagagggagcgccccccacccactcaggggagacttgcatcctgtccgcggaaaggccagaaggactgagccccacgctcgcaggtgtctcggagccgctcaggaggcgctttgttctgagtctggtaacagttgggtttttattatttgcatttggacttcagcctctgcaatgccttgcctcttatttgatagcagtaacgcacagtaatgctttttttgttctttttcaatcttacggggaattgttttacttttggcagggggacctggggccttttaaccctggtttacccgtggaagtgcccctgtggctggcgattaacctgaaacaaagacagaaatgtcgcctgctccctccagagtggatggatgtaggtaaggatgtggtggagactggttgatgcgtgggtggggctgggcttggggtgacgccctctcccacggggtggaggcatggggcctccttcctgactaggtccgtgctccctctgttccgttatctactgatcagctgaaaggaatacttccagattcacctctcagcagagtctgctaaccactgttagtaatgtcatgttaggttttggtgtgtgtgaaagttgtagtttgttttttgagacgggtctgactccatcacccaggctggagagcagtggtgcaatctcggctcaatgc

SEQ ID NO: 29396 - DNA, 1622 bp, Artificial sequence
  DNA replication origin
gcgggcccaggcctcaccccgatgaggtagatcttgtccagactgaagttggggataatggtaaccagctccttctcggcgaggaattcgacctcggcagcgtccatggcggcgcgagctgcaggccagagcctcacggtctcctcgggcccctcagcgtcccggaggagacgccgcggccgccgttttcccgccacggcgagagcccgccccggccggaagacggcctgcgccagcctataggaaggcggtagacagcctataggcgctgtctgcgggcgggggggcggagaccgcgctcgcgaagagcccgcggattggcaaggccgagggaggctgcgcgccggccccgccccggcccgcggacaggccccgcccccaccccggccccgccccgcccgtgggcgtgcacctggcgctgtcaggatctcctgccgcgggcgccagctttggtgtcccttcacctgtccccggcgcccgccgcaaacggccctaatcaagagccgggggtggggttccgggccgcttctacgccggcgttccgcatggggccaagagtaaacgcatttattttattttaatttttaaacaacttttcgtggatttgggatcttgctgtgttgctcaggctggtcttgaacttccggtctccagcgatcctcccatctcgacttcccaaagtgctgggattacaggtgggagccatcgtgccaggccaagagtacaagcatttattggcccaaactcagcaccgggcccgggactaggcatcacccgggctgacagatagagggatgagggaagaccttgtttccattaatttcacaatcttctgccctctctgcacacattgtttaaaacagctgtaaaaatgcagattcctccatcccaccccacagcttccaattcggacacttcagagcaggagctcagaatttgcacttcggcaggagccccacatgagacaggagcggcaggtttgcaccacctgagcaaatactcacctgctcgctggaccggctgcccctgtacagtgggcgcaggtgaagccagagcggtggctggagctcacctgtgtcagaatcccctagcgggtgcccattgtctgtgtgcacgctcctgggagttgggattccggagtcgtggaaaggacagaaagctgaatttcatccagggccaggtgattttgatggggtggtcatggccggaaaagcttcctgggggtgaagcgctattctaggactgcagtcgaatttgaaaccttgataattaggcccgcgagaaaaatcacaggagacatgaggattccagggtttggaattccagcagaaagcaccccctgcccccgccccagctaaccggatgctctcctctccaacctccctgaagccccatagagggtcactgggaaggtgaaaaaaagccgtaaagctcacaggcctgctcacaaagctgtgtctgttgtgtatctgccttagaagttgttatttacagatctggagttttcgctgagttactttcatgtgtgaagacacatactcttggccaggcacgcctgtaatcccagcactttgggaggccgaggcagaaggatcacttgaggccaggagtttgagatcagc

SEQ ID NO: 29397 - DNA, 1488 bp, Artificial sequence
  DNA replication origin
ttcgtgccaaaaacaaaagccacagccagaaccccagctgcaggtgggcagggcagctccctcttgaagggctgcgtgtgaggacatgaatgaattcacgaaagcacttcgcccagccagctgccccataagtgttctctattatcatccacaaagagctccttgcggaggcccccgacaaaaggaatcgctgatgatcggaggcccccgacaaaaggaatcgctgatgatcgtgtctgtaacaggagggagcttccctgctcagtctccaaaccccttcctcggtgaatactccaagattctaaaataaaacaccccacgtttgcattttaacgtggtctggagcttgaggacaaaacctacacatataacctggaaggatcaggttctcagtgagccctggagaggcagaagtctcggaggagagggggttggagggagaggaggaaaggaggagagaacggagggaaggaggagagggaaggagggagaagagggagggaggagtaagttgggggagaagagggagggaggaggaagaggaggaagggagggaaggaggagagaggagaggagggagaagaggaagggaggagggagaagagggagagaggaggaagaggaggaagggaaggaagagaggagggagaggaagggaggaggagagaggggacgaaggagaggaggaagggagggaggagacaggggagaaggaagaggagggagggaaggaggacagagggagggaaggggagagggaaggagggagaaaaggagggaggaggaaagacagggcaggaagaggaagagaggaggaggagggagcagacaaggcagagggagaaggaggaggaagggaaggaggaggaaggcgagagggaggaggaagggagggagaggggagggcaggcagggaggagagagacaccccagcccctctcacatccccagggcctgccaagcctcagcagcagaggtggccaaacaggagggaaagctctcaggaggatgaagccaatgctggggattaaaaaccaaatgccagccctgccccagacaaggagctcatttgtgctaaggccagaattgttatttgttaattatgtgcctgcctcgggctattaaaagcctatttcctgagcctgggattccagaaggaagggagcagatcccagggacccaggcccgtcccaaggcttcagaaggatggagcctgtgcaggaagacctccccacttccggggaggcttcgtgctccgggtcaccaggccctgacccccgctctgcggccatgcactgtcctcgcagtgggggcagagccacgcagaccagaccacagaacccaggcccctggagctggatttccacatgggttacataggcgggtgctggcatggcgaggttggacaggctttgagacccggctctgggccctcctagctccaggacagcggttcccatcgcggctgcccattgagatcacctggga

SEQ ID NO: 29398 - DNA, 1882 bp, Artificial sequence
  DNA replication origin
ggtcgggaccgccgccgagggcgccgggcgggtcctggcacgctccccagggaggcgacgggcgggcccgctccgccccgcgcctggcccgtgcaatcctggcgcccgcggcccggcggctgccgtcagcgccgccctctaggagcggggcgggaccgcgggaggcgcgcggctgcccgagcgccggccgggccatgacccccgctgctctgtcttgcaggctcgtcgccgcggccccccgagcccgaccgccgccgccaccaccaccagcgcccgggcgggcctcgcgcgcctcgggcgcggctccgcagtgagcccaccaagaaggaagcggtgagtgccccgcgcctcgtgcccgccgccccttccccgggacgcccgccttccccgagcaacgcggccccggccgggcggcgtccacgcctcgcaagctctagccgctgcaggggcgcggcccgggggtcggtgggagacccacgcgggcccgggcgtccccccaacttcttgcagactttgctgcggagacacgggctttgggaaacttggcccggctctggccgcgctgcaacttgcacggcggtgggggtgtgaccccgcgcggaagcctctggccccccactcaccacaggccaccccgcgccgtcacgagttccttgggaatggaccagaacgccattcctgagagctggaaggcagcccggcggggggcgggggcaggaggcctcccgaggaaccatttccactctatcgagtatttccaaatctattatttatgaactgcctcacttaggggcccccctgcgctcccagggcatcaaagcaggtttgcaaccgcgaagggcgacccgtgtggacgcacgcgctccttctcctggctggctgcgctcgagcggaactaggggaggtctcagtaaaaaggggcacccgcagctccccccagggataggcggagggcggggtctgagggcggctgggacttctctcagaccgcctccggctgcggggcccagatggaatcaagggaaaatctgtgcaggctcgacaggctttggagcccggaggaagagggaggaagggaaggctgcgaggcaaaggcacttgtgaggtagtgcggttctcggggaacgaacgcctcaatgtacaggttaggaaactgaggctctgagagggataccctgagtcacaggctctggcgtttcctgcctagaccccacccatccaacgctgtggggaggcccctgtcctgggctgggttaactccaaaaagcaccctcacctgtgcaggccacgccctccttgggttctgcgcccccaccgctggggacccggtcctgtggatgggaggaggccgtgtatttatggaaacacttaatccctcaccagccccaaggaggctgaaagctcaccacctaatctcgtctccctggaagcgccttcccatgccggtggggtgcaccccagacccacgtagagtgtattttcccagcccaaggtgcaggtcacctctggagacttgaaatgggagcgtgccgtcagtggacactgaagaagagcgcactgatagttcatgcttacggagcactcctcatgcaccagaccctgcgttttctgttttaatcccctgaccaactctccaaccaaatactgtcagccccattttaaagatgaggaaacagggccaggcacagtggctcacgcctgtggctgcaatactttgggatgccaaagcaggaggagtgcttgaggccaggagttcgagaccagcctgggcaacacagtgagtccccccagctactaaaaattttttaatgagctgggtgtggtgcatacctgtagtcccagctacttaggaggctgagacgggaggtttccttgagcccaa

SEQ ID NO: 29399 - DNA, 1315 bp, Artificial sequence
  DNA replication origin
ggcgcggggcactcaccgcttccttcttggtgggctcactgcggagccgcgcccgaggcgcgcgaggcccgcccgggcgctggtggtggtggcggcggcggtcgggctcggggggccgcggcgacgagcctgcaagacagagcagcgggggtcatggcccggccggcgctcgggcagccgcgcgcctcccgcggtcccgccccgctcctagagggcggcgctgacggcagccgccgggccgcgggcgccaggattgcacgggccaggcgcggggcggagcgggcccgcccgtcgcctccctggggagcgtgccaggacccgcccggcgccctcggcggcggtcccgacccctcgctgcttgcctgtttcctccctccaggccccgggcagtcccggggaaagtttgggccgcggcccgtagggctccccaccgtgcgcccctctccggggctgggtgccgggctccctgaggccctgcaccccagccctgggtgttgaaaaagggcaccagggttcctcccatactggggggcccgggttcagtggacctcgccgcccggaagcgaagaggagaggcgagaacagcccccccgccccatctcgccgtctgcagccgccctccccttgtgcaggaccccagggactggtaggcagtgccccttccctgtggctgcagctgtgggggttcccttttgctctccacgcaagcctttgcaccccacttcgggggcgaaccctgggttgcagcctacaaggaggtcagggcttgcctcctggccccctgggcagcttcaggtgtttggtgatgaccttgatgagcatcagggagaggaatcccccacctccccgcggtgtggacacagagctccccgcggtgtggacacagaggtcttttggccagatgagcttcttaggaggcacactccctccgtcagccctacctgtgtggaggcctctgcagacacctgcccagtggggcaggaggaacagaaagatgcctgccctgtgctttctatgtcattgtcacaagcctgtggtaccctgtccaccctacaagcccaacgtctccacaccccctgccctatatatttctggaggcttagaaggggaaactgagtcacagagcaggaaagtgacattcctttagtgaatgtggcaaagagttgcaggaaatggagtcatcttcctagccgtgtgctgctgcttgagtcattcctaaaaatggggcgatctttaggttcccctgaccttatagagtccagactgacaggcaggaaatgtatcatgtcccccactcccccgcctctaacaaaga

SEQ ID NO: 29400 - DNA, 832 bp, Artificial sequence
  DNA replication origin
aaagatgcctgccctgtgctttctatgtcattgtcacaagcctgtggtaccctgtccaccctacaagcccaacgtctccacaccccctgccctatatatttctggaggcttagaaggggaaactgagtcacagagcaggaaagtgacattcctttagtgaatgtggcaaagagttgcaggaaatggagtcatcttcctagccgtgtgctgctgcttgagtcattcctaaaaatggggcgatctttaggttcccctgaccttatagagtccagactgacaggcaggaaatgtatcatgtcccccactcccccgcctctaacaaagagaaggggcaggcctggggcaggacgttccttccattcgtccccaccctccggaggcaggatgggacctgccgctggccggtgctggggtggtgggcgtgcccatcaaagctgctgccccagctgctgggctgggggaggcctgtgcaggtggctccctgctgagggcacatccctggggaggggctagaaagccagaaagagctcagaggcttcagggtaggagggttagggggctcaacaagctggctgtgggcaaatcatcatgcctggctgtgtgccggcccttcgctgggtgtggggaggcagggaccagacctaggcttctgaggaactaagatggacaagcctaggcgactaagaactgaggctccgggaccccacggcacagcgtctccctcctccatcagtcacctcccagcccagctgtccctgccctgcagccaggttccctttcatgattgtgcaaagatttgattaatatctatctcccccgcactgccggttcc

SEQ ID NO: 29401 - DNA, 1357 bp, Artificial sequence
  DNA replication origin
ttgattgagacccggagtttgtggccatgatcacacctgtgaatagccaccatgctccagcctgggcaacgaagcgagactctgtctcttttttttttgacgtggagtctcactgttgcccaggctggagtacagtggcatgatctcagctcactgccacccccgcctcccgggttcaagcgattctcctgcctcagcctccggagtagctgggtctacagatgtgcatcaccacacccagctagtttttatatttttagtagagacagggtttcaccatgttggccaggctggtctcgaactcctgacctcatcaggtgatccacctgcctcggcctccgaaagtgcagggattacaggcgtgagccactgcacccagccgaccctgtctctttaaaaaagagagcgagcgagtgaccgtagaaattatgagaccggttaggaagcagttttagaagcccctgcctaaggtgagagactgaaggaaataaatgacagggagaatgcaggaaaggagggcagagaaaggacctgtggcctgcagggtggggaagagcagagggaaaggtggcctcaggtcggagaggctggaaatggactggcctgcctgagagtggtgggttcccgctgggaggcttttgagggggtagcagtcttggggccatcaggcagtggtcaggagacttccggagtgctgctctgcaagggaatgggttagatggcagattgcacagagctgtggtgaggacatggagcaagactagcggcttgttaaagaagttgaagaaacagtcatggaagggaggagggaagctggacagcagctagagggaaccggttcaatgcttttgtttttccctgaaaataaagacttacacagatttgaaggcagaactggggcttgggcacagaaagaatataaataaggcccccgaggagaaggccccttcctggcataggatagaagaataactttgtgtttggagacatggtgcaggaatggtggaggagctgctctattattagctctattaacttaaggtagaaaggtgtcatttatcagggttgggtggcggcagggccagagccagcagtggaggctcatgagcgtggagaagatgtggaaaggctgaggaatttctcagagggtgacggactgccagctgccctgaggttgctcttacttgttacagtggacaagctgctttgctagcgtgcagatggagaaggcgggcccgggaggcttggagtttggcccaggagctggcaggtgcccagcagcagtttcactgcccgcttcaggcgactctccactggcttcctgggagccttccgttaggagatgctctctcaagat

SEQ ID NO: 29402 - DNA, 1161 bp, Artificial sequence
  DNA replication origin
tccgcggcgcggccttgctctcttccggtcgcgggacaccgggtgtagagggcggtcgcggcgggcagtggcggcaggtgagacaggaggtggccggtgcggcgccgccaggccgggccgggtcggggggccgggagccatcaagtctgcacgtccgcagcctggccgctcggcttcagcaggaagcaccgaatgggcctcggagccaggtgacattgaggccggcccgtggggactccgggctcggtggctccaggctcggggggccgccccgaagtgcccggtccatcttacccggtctcgcagcggctgcggaccggcctcgggcactgaccttggagcgcccgctggccgagggctcaggctgcggggaggcgggcccgcgctctgtgcctgcagcctccgcccttgctccttcaaaaggtccctgtgcaacccctcccgggttttgcggggctcccgggcggcgctcggctttccagcctggaaggcgcctattgtttgctcacgcaagggctaggcccaaggagagaagctagacgcgggcgttcagccctgacgtcatgcttgtttattctgccccaaggagggtatttccccacatcactctcaccagtcctccgaagggtcgatttaaagggggccgtgtaaggttgatgggcctgaatagaggagggcccgggtgagggggggtctcataggttttccgctctcctcagggattggaaattgatcggggctgtgttggcagccttctccaatttccccttctagtctatgtacaggcggtattaggttttaaacactcagttgaatgtgatgcgtgccacggtccctgtgagctgtcacctccccccaccgctccctgaagaatggagtctgtcacggcagcacagtgctttaatgatctctagctttttcagagtcaccttgttagcattttttcttcttgcctttttttgtttgagacggactcttgctctggttgcccaggctggggtgcagtggtgcggtctcggctcactgcagtctctacctcccgggttcaagcgattcttctacctcagcctcccaagtagcggggattacgggcgcccactaccatgcccggctaatttttgtattgttagtagagacgggatttcaccatgttggccaggc

SEQ ID NO: 29403 - DNA, 867 bp, Artificial sequence
  DNA replication origin
tgggaagtgaggagcatctctgcctggccgcccatcgtctgggatgcgaggagcccctctgcctggctgcccagtctggaaagtgaggagcgtctctgcccggccgccatcccatctaggaagtgagaagcatctctgcccggccgcccatcgtctgagatgtggggagtgcctctaccccgccgccctgtctgggaggtgaggagcgtctctgcccggccgcgaccccgtctgggaggtgaggagcatctctgcccggccgccccgtctgagaagtgaggagaccctccgcccggcagccaccccgtctgggaagtgaggagcatctccgcccagcagccgccccgtccgggaggtgaggggtgcctctgcccggccgcccctactgggaagtgaggagcccctctgcccagccaccaccccgtctgggaggggtacccaacagctcattgagaacgggccatgatgacaacggcggttttgtggaatagaaaagggggaaaggtggggaaaagactgagaaatcggatggttgctgtgtctgtgtagaaagaagtagacatgggagacttttcattttgttctgtactaagaaaaattcttctgccttgggatcctgttgatctatgaccttacccccaaccctgcgctctctgaaacatgtgctgtgtccactcagggttaaatggattaagggtggtgcaagatgtgctttgttaaacagatgcttgaaggcagcatgctcgttaagagtcatcaccactccctaatctcaagtacccagggacacaaacactgcggaaggccacagggtcctctgcctaggaaaaccagagacctttgttcacttatctgctgaccttccct

SEQ ID NO: 29404 - DNA, 1150 bp, Artificial sequence
  DNA replication origin
gccttccgcagtgtttgtgtccctgggtacttgagattagggagtggtgatgactcttaacgagcatgctgccttcaagcatctgtttaacaaagcacatcttgcaccacccttaatccatttaaccctgagtggacacagcacatgtttcagagagcgcagggttgggggtaaggtcatagatcaacaggatcccaaggcagaagaatttttcttagtacagaacaaaatgaaaagtctcccatgtctacttctttctacacagacacagcaaccatccgatttctcagtcttttccccacctttcccccttttctattccacaaaaccgccgttgtcatcatggcccgttctcaatgagctgttgggtacccctcccagacggggtggtggctgggcagaggggctcctcacttcccagtaggggcggccgggcagaggcacccctcacctcccggacggggcggctgctgggcggagatgctcctcacttcccagacggggtggctgccgggcggagggtctcctcacttctcagacggggcggccgggcagagatgctcctcacctcccagacggggtcgcggccgggcagagacgctcctcacctcccagacagggcggcggggtagaggcactccccacatctcagacgatgggcggccgggcagagatgcttctcacttcctagatgggatggcggccgggcagagacgctcctcactttccagactgggcagccaggcagaggggctcctcgcatcccagacgatgggcggccaggcagagatgctcctcacttcccagatggggtggcggccgggcagaggctgcaatctcggcattttgggaggccaaggcaggcggctgggaggtggaggttgtagcgagccgagatcacgccactgcactccagcctgggcaccattgagcactgagtgaacgagactccgtctgcaatcccggcacctcgggaggccgaggctggcggatcactcgcggttaggagctggagaccagcccggccaacacagtgaaaccccatctccaccaaaaaaatacgaaaaccagtcaggcgtggcggcgcgcgcctgcaatcgcaggcactcggcaggctgaggcaggagaatcaggcagggaggttgcagtg

SEQ ID NO: 29405 - DNA, 994 bp, Artificial sequence
  DNA replication origin
tgcactccagcctgggcaccattgagcactgagtgaacgagactccgtctgcaatcccggcacctcgggaggccgaggctggcggatcactcgcggttaggagctggagaccagcccggccaacacagtgaaaccccatctccaccaaaaaaatacgaaaaccagtcaggcgtggcggcgcgcgcctgcaatcgcaggcactcggcaggctgaggcaggagaatcaggcagggaggttgcagtgagctgagatcgaagcagtacagtccagcttcggctcggcatcagagggagaccgtggaaagagagggagagggagaccatggaaagagagggaaagggagagggagggggagggagggagagggagaggaccctgcagttttcatgttggctagggtgggcggccaccagttcagggaggacagccccactctgaggtctgactgaggtgtgggtgctggccccgtctcccttggactgcttgtggcctgctcagctccctggctactcacaactctttgatctaaaaagtagtcacaaggccagtgtcaaagcggtggtcttacgagcatcatcctggccctggcaagctctctccaggactcatcctcttacctgtcccacccaagcaccagttcccaaactggagaccctgtctggagaagagaacaaatctgcagcctgtgtgctgagagtagcagagatggttggcagagaggggtttcctgccagcactgggggataggaatgaggcaaggggagagaatggccccggagaagcatagctgtagccaggaagggaaaggggacccttagatcttgcccagaggaaatacatgggacaaagaccttggctggctggaaggtttgggctcagttcaaaatcaagagcaggtcaaatacaccccaatcgagcaccttccagtgctgtagaaacgcccttgatcccttgttctcgaaggaccagctgagccccccgggagagtgggat

SEQ ID NO: 29406 - DNA, 1424 bp, Artificial sequence
  DNA replication origin
gcccgcctcttctgatgggaggcattctcccgcagagaaggtggtgggatggcaccagtcactttgttccacttggtctgctgggtagaagagatggaaacaatgcctgctgagtatcagaatcagatttggctgtgtcaaaggaaggaaggagggagggaggcagaaagggatggaggaagaaaaggggaaaaggaaagatgaaagaagggagagaaggagggagggaaggagggagggagggagggagggagggaaggagggagggaaggagggagggagggagggaaggaaggagggagggagggaaggagggagggaaggagggagggagggagggaggagggagggaaggagggagggaaggagggagggaaggagggagggaaggagggagagagggaaggagggagggaaggagggagggaaggagggagggaaggagggagggagggagggagggagggagggaaggagggagggaaggaaggagggaaggagggagggaaggagggagggaaggaagaataggaaagataagagagagaggaactgtgttttttctctagacaggccatttccccccatcatattaaaacaagaaaactacacaggtatcagcagcagctcagggctgaccatggcatggtccacagtgcctgctctctcttctcgtgctcctctgccattctagcacagcacctcagggtctaagacagctgcagaggctccagccatcgtgtctgccttcaaaccagcaagaggggaagagggggagacagagccagctctttcactttgatgagaatgcatggaagtgacagactgcccttcagctcacacgtcatttggttcagtgcttaatggtgggggccgctgggaatggggatggggatggggatggggatggggtggtgctcttgatttctgcctaaggagaaactcccctgcttaccaggagttgaccagccagggtgcagctggagtccagagacccaagcaagccagtgaggggtgaggagcagcgaagggggcttggtgagggctgcaaccctgagccatgtgagggccgccatgcagagaagggagtagtagcctgagcggctgtgggcccagggcaggtgcaggagccaggtttcaacatcagcagcttcaaacggggtggtgcaatggattttctctgggtatttgggatgggtttggggggcaaccgcctgcaactcaatgtatctccaagaattgagagcttaggagctcctgtccactgaggagttcctgaaccactcctcaggagtgtgaaaaggaaaaagctttgccctctgagctcaactctgatccctttcaggaaccaccggtcctcctgttgtacgtccttgccctgtgctgggtgctgttccaggtgcctgccaagtgtcatctcacgc

SEQ ID NO: 29407 - DNA, 1320 bp, Artificial sequence
  DNA replication origin
agaaatcaactgatttgggccgggagcggcggctcacctgtgtaatcccagcactttggaaggctgaggcgagtggatcacctgaggccaggagttcgagaccagcctgggaaatataccaagaccccaaatctacaaaaaaaaaaaaaaaaactgtaattgactaggcatggtggctcacacctgtagtcctagctactcaacaggctgaggtgggatgatcctttgagtcccaggaggttgaggctgcagtgggctgtgactgccactgcactccagcctgggtgacaaaatgagaccccatctctaaaaaaaaaaaagaaggaaggaaggagggaagaagggagggagggaggtaggaaggaaggaaggggaaggaaggaaggaaggaggatgaaggaaggaagaaggaggaaggaaagaagggagggaggaaaggaaggaaggaaggaggaaggaagggagggagggagggaggaaggagaaggaaggaagggagggaggaaggaaaggtcggaaggaagatgaaggaaggaagacggaggaaggaaggaagggagggagggaggaaaagaaggaaggaaggaaaaggaaggaaggaggaaggaaggaagagagggaggaaggaaggaatcaatcaatttataaaagatctggaattaggcatttctgttgaaaaagggccagagttgaaccactgacaccagtgatggaattagtccctgtgctgggcggtctgagtgaggatatgcggaagtgtatgttggacacatgcaataaaacagtaacaaaaattcaaaatgaagacagaggcataggaaagccagcatcaggaagtcaaaataagtaacatcatggtaatacatggacaggactttcaggaacccaaagcagagagcatgggaggccagcactggggcgctgggatgttggggataggggaggttggggagttccagactaccagagtagccacaggaggccaaaagtggaggccaaaagagtggcagagggacccagcaacactgccgcgtggggagagttcacacagcagcctgagactgctgcccctggaaggcggcctccaaggtcggcccttgactggcacctaggaacttggacctggagcgggttcccaccatttccagagctgatacgagtagctccatgtgcctaaagtgggtcaagagttatcacaagaatggctaaaacccgtaagttagtagagcaagccgcaccacgctttttgatgggacttccaaaatcaatgcatcctaagtgtaaactatattgattaccacgaacaacaacaacaaaaat

SEQ ID NO: 29408 - DNA, 846 bp, Artificial sequence
  DNA replication origin
aaaatcatggagctcttcacatatgacttaggtattctgtatcttgaataaaaaattgttaaactgttaaatctttatcttgaataaagagcttgttgcaagctagaactcttccaaacagagaccaaaagaagcttctggagaccacgttgtccctgccccgcatttgcccaccctcagccgtggtggaccccatagattaaaaacctcaggggaagccagaaaactgttgtgtgagggctgatatgggccctctgtcctgagaagaaaggaggacaccccgacaggaatggggtggcaggtcaggtgatatcatgagaccgggaggcagcagcctggggggttcatgctgcctatgcaccaggcaggaaagtgcaactcaggcaaagccaggagagggagaaagcagagtggctgctgggcagccgctgaggggtgggcggtgggactgactccacaggaggtgtgaggggtggggaggacctggggtgaccggcaggatgagtgtcatttgcagataaagcatggccatgggaagcctcagaaggtgtttgaacaggggctgatgtgaacatgtgaatgtaaccaggctttaaggagagtgcttgggctacggtgatgtgggggaaggactagagttacaggagttagaggtggtggggggctgcctatagggagtgtgagggttgagggagggaagctggagagggactggagaggaagaccttgattggagacaccctttagggaaaggagtgacctcgatagagcttggaaaatagctggaaggaggagtaatggaagaagacgctgaggtcctagggggatctgagcgggtgttcatgt

SEQ ID NO: 29409 - DNA, 995 bp, Artificial sequence
  DNA replication origin
tcagtcgcatgacgatctactgagaatggtaccaggattttacccattttgcagctgaggaaactgagcagagagagggggaaaaggttgcccagggtcactcagcctgcaggtgggtggctgaggttcaaactcaggcccgtgtcacccacttggctgtgccggccaagcaccgtaggacagcaggtttccacctggggctgctggttggaagagtgtgtgccaggtggctctctgggactggctcccctagagaatcccccagtgggatttgtgtgcaaatgattaaggcagtgaaggcgctgccaggaagcagagggaagagaaggcaccaagcaagcagtggtttcttgggggccctgccgcaggctgaccaggcagggctctggagggcaggctatgggcgggccagccttcacagccccactccgaagtccctggcgaaggccgggatggcgccacgtggtcctagaagcacaaggacggttctctgaagagagttccaggtgaggcccacagaaacagaaacacacaggagctggggaaggaacaggcaaaaaccttcacagggatctgggtcacgtgggtggagcccgatagtgtctgtgccatcagtttctagaacgctcaccgccactaggattttagcgctcccgggtggctgtactgttcacagctgagcccccggaagcaaggacacatgtgccaccggtttgctgggtgactttatttctcctgtaatccttggttgcccagcagctgagacttctgtgatctccctgttccctccctctgcacgcgctaattcccttcccgatgcccatgctgcctatgcacctgcccctcgggttctgccttcctggtgcctttgctgtctacttgctgcctctgccatgtctcgtgtggccagtgtcctggaaaagtgatgcctcagcatgtggcggaaggagagggaaggagagggaaggagggaaggagagggaaggagtgggaag

SEQ ID NO: 29410 - DNA, 1279 bp, Artificial sequence
  DNA replication origin
aggagagggaaggagagggaaggagggaaggagtgggaaggagagggaaggagagggaaggagagggaaggagagggaaggagtgggaaggagtgggaaggagagggaaggagggaaggagagggaaggagtgggaaggagagggaaggagggaaggagagggaaggagtgggaaggagagggaaggagtgggaaggagagggaaggagtgtgaaggagagggaaggagagggagggagagggaaggagagggaaggagtgggaaggagagggaaggagtgggaaggagagggaaggagtgtgaaggagagggaaggagagggagggagagggaaggagagggaaggagtgggaaggagagggagggagagggagggagagggaaggagagggaggaagagggagggagagggaaggggagggagagggaaggagaataaaagagtgtggggggagatggggggagggaagaagaggaagcctgagcagggagggtagagggtggggaggggaagagatggggtggggagagccagagaggctgggcttttggagctgtagcagccgcagggagttgtgggctggccggcacatttccggtccttgggtctcatttgaggcctgggcctctgcttgtcctgtctgtcgttggctgtgtggttgtcaactcctctttgagcttctcaccaaggtggcacctgtttattgagcacctactatgtgccggctgtttgctgggatccagcagtgagcctcaggcagcccctgctctctgagctcgtatcctagtgggcccagaccacacccactgaacacatggtaactccaggcagagcccagctgtcctgcagccttgcagcccagggtctgtccgttgggtggagaacctgctccaccactggctcctcctccatccccagatgtgtccccccgagtccctcgagctgtcccagggaccctgactgcagggagactccccagcttccacccttccatggccctgtggttcctggggtgcaatctggcctctcctgatcctcagtctgcccctctctccttgctctggaactttctacctgcatctggagttaatttctctcccatctccccggccttcgggccatccccagaggcagtcccacctggaaggcacattcaaatcacctgggaagttaaataaactacccagagtgctggccacgtgcagaccaatgaaggcagaatctctgggcctcaggcctggtgattccttgttcccagagccgagacttccccaggc

SEQ ID NO: 29411 - DNA, 1677 bp, Artificial sequence
  DNA replication origin
cagcttccagggcccacaggcttatccactctggaggctctgatcatcaccttgggagactgggagagaggaggagagagctgaagaccaagcacagagaagaaggctgagaggctaacgaggaggctaaggaggaggagagaccactgagcggggattcggacagagtaaggagggtgacacagccccactcgctgctgcagcccaagcaaggcctctccacacccagtctcttcacctggcccaggagattgttggatggaggctctaagccagctctgaaagacactgccccagagcaggaatcgtttctcctccccttttaccccatgagcaccagttctggaatctgaagtcacaccttggtcccagacttcctgacctcgtgagtctcatcctcctcctttgcaaaatgaagagcattcacctcttgcagttgtgggggctgcacgtgggggatgcacgctcagcactgtgggctcagttgtgctggccttgatctgcagtgtctggtcaccaagagtcaccctcagcatcagcccgggcagcagctccagatcaaagtggagaaggggcaggagagagaggaggatggaagggaggtggggagggacaaggagaaggaggagggacaaggaggagggaggaagggaggacgggagagaggtggggagggacagggaggaggaggatggacaaggaggaggaggaggcaggagtaggagggaggaagggaggaaggtgcggcgggacaagcaggaggagggaggaagggagagaggtggggagggacaagcaggaggaggaaggactaggaggaggtgaaggaggcaggaggaggaggaggagggaggaagggaagatgggagggaggtgaggagggacaaggatgaggaggaaggatgagggcagaggaatggagtataggagggagatggggagggacaggcaggaggaggagcaacaaggaagaagaaggaggaggagggaggaggagggtggaagggaggatgggagggaggtgaggaggggcagggaggaggagcaacaaggaggtggggggatgatgatgagggggaggagggtggaagagaggatgggagggaggttggaaaggacagggaggaggaggaggagggaggaggagaaggagggaggattgcagggagaaggaggagggaaggggagagggacagggagaaggaggaggagagggaaaggaaacaggagttggtttgattattgtgagaaagtagccctgggatcttgtcctcattttaaatatgggctttaattacacatatggggctggcaaagaaaaatatgaacccccaagagatcatgaccctagaatacgtttttcagtacaggggaaattcccaatttgatgctgctagataggccatgtttttgttcttccccctcactaaaatctggctcataaccttaagccaaaaagcaacgctaccttgacactttgcttttaacatttaaacagggtctaaggccagaactggttgttcaggatgagatatgggggtgtgaactggcactcctgctggccataaatcagggcaaatcccacagatgcacctcctgtttggataagaactgcggagccagcttggaggctggtggggagaaagagagagggaggagaggaagaagagctagagg

SEQ ID NO: 29412 - DNA, 1236 bp, Artificial sequence
  DNA replication origin
cttgagcctttgcctaaattaaatagccccctctcctgggccccaccctcacgcaaatacacactcactcccacagccccagcacacatgtgtgtttattttctttgccgttcacacttctccttttacggtcccttccactctgatcctaaaggcttgtctgattttgtacagagctcaaagcatagcactgaagacacacacctggtcttcctgcggtaggtcagtgagtgaaatggagaggctgtccaacactgagcaccctaggggatatttcctgagtgtccaccatgctgggagccatggggaggcacaaaaaaggaaaaggtgtgtataaagctcactctgcaaggagacagcaatgtggtaaagaggaaggagccacggtctgtgtggtgtatggggaggggccacagtctgtgtggtgtaggggaagggaccatggtctgtgtagtatataggaaggatccatggtctgtgtggtgtagggggaggggccacggtctgtgtggtatgggggaaggaaacatggtctgtgtggtgtaggggaaggaaccatggtctgtgtggtgtaagggaaggggccacggtctgtgtggtgtaagggaaggggccacggtctgtgtggtgtggagaaagggaccacagtctgtgtggtgttggggaatgagccacggtctgtgtggtgtgaggaaggggccacggtctgtttggtgtggaggaaggagccatggtctgtgtggtgtggaggaaggagccatggtctgtgtggtgtaggggaagggccatggtctgtgtgctgtggaggaagtggccacggtctgtgtggtgtggaggaagaagccatggtctgtgtggtgtacggtgaggggccatggtctgtgtggtgtcggggaaggggacacagtctctgtggtgtgtgggaaggagccacggtctgtgtggtgtggaggaagggaccacagtctgtgtggtgtgaggaaggggccatggtctgtgcggtgtggaggaaagggccacagtctctgtggtgtggaggaagggaccacggtctgtgtgctctagaggaagggaccatgatctatgtggtgtggaggaaggagctatggtctatatggtggtggtctatgtactgtagagaaaggagaccatggcctacatggtagtaaagtaggatcaaatgatctagggctgcactatctggactgaaaacctgggcaccatcattcactagga

SEQ ID NO: 29413 - DNA, 1026 bp, Artificial sequence
  DNA replication origin
gagttccacactgtcattgggattgaaaccgcacatggattggaaggacttctcttccccatgtgattatcccaagggactcccgctgcccatgtggtaggtgctcggtgaggatggcatatccccaacactgtgccaggcaggcttgtgggatgtgatggggctctgggccgcaggggcctggagactggggttgtaaagagaggcatcatccaggaaagcactggagaagtgaagcagcatttgaaacccgtgtcaggtctattgcttgggccgagatggaagcagttcccacgacgaagaggggagagtgtgcctggaggccacctccacgctggtgcggccaggcaccctactggtctcctgccagcacgtctctctcctgcacacacgtgtgtaggcagctaaggctcagcaacagcagacctccttctgttcaggggttgggggcaagggtggtcggactcaccccctcatcacatgggagcgccaagggtggtttgctgacagtgcaaggtacaggaaagtgtgtgagagcatgggtgagtgtgagagcgtgtgagggtgtctgaatgtgtgagtgtgtcagagtgtgggtgagtgtgagagcatgtgagagtgtgtgggagtgtgtgtcagagtgtgagtgagtctgagcatgggggggtttctgaatgtgtgtgtgtgtcagagcatgggtgtgagagcctgtgaggatgtttgtgtgtgtctgtgtgagcatgggtgagtgtgagaccgtctgagggtgtctgagtgtgagtgtgagtgtgtgtgtggatgtcagaacatcggtgagtgagcatgaggtgtgtgtgtgtcagagcatgggtgagtgtgagagcctgtgagggtgtttgagtgtgtctatgtaagtgtaggggtgagcaggggtgagtgtgggagcacgtgagggtgtctgagtgtgcgtgcaagagcatgaacttgtgtgaaagtatgggtgagtgtgcacaagtgtgtgtgagtgtgtgtgtgtgataaaagagg

SEQ ID NO: 29414 - DNA, 1026 bp, Artificial sequence
  DNA replication origin
ggaaagcgggacttgccgctaagggtatagtgagggaggttggagaagagagtaaaaagaggccgcttaccggatttgaaattggtgagatgtttcttgggctggtcggtctgaggacctgaggtcataggtggatctttcccacggagcaaagagcaggaggacaggggattgatctcccaagggaggtcccccgatccgagtcacggcaccaaattgcatacgtgtccgtgtgaagagcccaccaaacaggctttgtgtgagcaacatggctgtgtatttcacctgggcgcaggcgggctgcgtccgaaaagagagtcagggaagggagataggggtggggccgttttataggatttgggaaggtaatggaaaattacagtcaaagggggttgttctctgctgggcaggggtggatctcacaaagtacattctcaagggtggggagaattacaaagaaccttcttaagggtgggggagattacaaagtacattgatcagctagggtggggcaggaacaaatcacaatggtggaatgtcatcagttaaggctgtttttacttcttttgtggatcttcagttacttcaggccatctggatgtatgcgtgcaagtcacaggggatgcgatggcctggcctgggctcagaggcctgacagtcgtctcaagagagccacttaaccttggggagtcttcatttcagcatctgtaaaatgggtataggacgccttcttaaatttagtgccaacccaagggggctggtggcacttgtgtgctcctttcccagcaggcatgattgtctcctgtcctggagaccatttgatctggggacatgagcttgaagttaatttctgcaactggcaatttagggagagcctgaatgtgcaaatagagcaatggaactctcagatggagctctggcccctcatgttctggtcaagtggccctggtcatttgacttctcagtctctgtttggagccttcagtggctgttctgggcttctctatggggagacatggccttact

SEQ ID NO: 29415 - DNA, 999 bp, Artificial sequence
  DNA replication origin
tcctccctttccaatgataatactggacaaaaatgggacaatctgtaatttttgcccattttcttaggaatttttcccctctagttaaaaatcaatcaatcaatcacacacacacacacacacacacacacacgcacgcacgcacgcacgcacaccatgaattgagtcagggttccctctgatcatccccaccgcgctcttccttttgtctgaaaggggctgggcaatgataattgtgcttctggggtgagaggtgtggtgtggggggattcgcagcagaggctgcggcagctggtggggggtcctccttcctggtcctccgatgactccgacgacgacgaggagctctgaagggagaccaggaggcgtctccactgaccatggggcccagcagcgcggggcccggggccagccccgaccttcccctccaccagcggacggacccacagcctgaaggcggctggcaccagaggggccccggcaggagccgatgggctgcgagcgcgctggcgaggggcgcaggagaatggaacggggacaggggagaggcagaaggaggaggagagggaagcctggagaagaggagagcgcagaactgaggagcggggcagaaaacagagggagagttgcagaccgggctgagctgcagcggagcgcgggagtgagcggcggcgggaaagctggggttagggggccaggacgtcgcgggcgaggggcggtggtgagtgcagcccaagggcgcaccgtccctgcaacagcttcgcgggcgggaacagcaggaaggagtgagccttgggcgggcggtgggtttcagaggagggagggccgagcagctgcaggggacagaggggcagaaagacagggaggcggggagaaggtagggagcggttctgggtaactacttcgcttcggaaaccgcccgggtctcaggccccaagggcatccccctcctcccagatccccgtcttgggtccctggacccaagtcccgtggaaggcg

SEQ ID NO: 29416 - DNA, 1109 bp, Artificial sequence
  DNA replication origin
tgtcctggacttagattcttggacctgccactcactgcttgttttcccttgggcaagtttattaaattctctgagtattgttttcattctttgtaaaatgaaaataactgacttcagttcttagagttgttgtgaaaattaagggaaatacagtatgtacagtatctagaatatagtaggtgcaaaataaatggtagctgtgatgatgacaatggtgatggtgataatgttagtgatgatggtgatgatgatgatggtggtgataatggtagtgatgatggtgataataatggtgatggtgatgatgatggtagtgatgatggtgatgatgatgatggtggttgtggtgatggtgatgatgatggtggtggtggtgatggtgatggtgatgatggtggtgatggtgatggtgatgatgatggtggtgctggtgatggtgatggtgatgatgatgatggtggtgatggtgatggtgatgatgatgggggtggtggtggtggtgatggtgatgatggtggtgatggtgatggtggtggtggtgatggtgatgatgatggtggtggtggtgatggtgatgatggtggtgatggtgatggtggtggtggtgatggtgatgatgatggtgatgatggtggtgatggtgatggtgatgatgatggtggtggtggtgatggtgatggtgatgatgatgatggtggtgatggtgatggtgatgatggtggtggtggtgatggtgatggtgatgatggtggtggtggtgatggtgatgatgatggtgataatgatggtgatgatgctggtgatggtgattgtgatgatagtgatggtgatgatgatggtgctgatggtgatgatgatgatggtgatggttgtgatgataatggtgatggtgatgatgatggtgctgatgctgatggtgatgatgacgatggtgatggtggcgatgatgatgattggcagtgataatggtggtgatgattatgatgatacttatggtggtgatgataatgtgtcagtgtgagcagtggtgatggagatctcaagcagtctgaccacccatccagtccaaacatttctcttcaggagacctgagataaaaatcaatcaac

SEQ ID NO: 29417 - DNA, 754 bp, Artificial sequence
  DNA replication origin
gtgggaggcctcggcgctgttctctggatgcaactgagattgccgctagagggtgacgcctgggtcggaatccaaggtagacgaatctggggtgctggaaccgtgcttttccccggaaaacccaagaaatgcacttacagtgcgagattggttggggcgtgtctataggggcaacgggaaacagcgaatactacggattatgtgctaagggagggaaagcagatcgaaggtccattacttgcacatttctacctacgatttggggcctgaatcatccaggaagccggctttgtactccacctgtctgtgccagtgtagacggagtctggggccggggccagctgattttccattgcagtccccaaaaccctcccaatttttaaaatttggtcgggtgcgggccgaaattggggtacaggcggtgcgggggtgggcgggtgggggacgcgcagatgtgagactcccgggttactgtagtaagctctatttggggcggggcgcgcccgcggagaccctgcgcggcgggagggacatgtgcacaggcgcgtgggggtggggtggttgtgaaccagggaacgcagacccccgagaaccgccagatagtcgctgcgtccacttaacccggcggcagagccctccgcatgattgctcttcctccaccaaaagcccaccccagcaagcgtgggcctccaaccccaggccggaggtcccaggctgcgtctcacctcccgcccccttcccccgtccccgcctt

SEQ ID NO: 29418 - DNA, 882 bp, Artificial sequence
  DNA replication origin
ggcgccggcggcggcgggagggtgccaggcagccccggctggtaactgctgttctagctctgcaaccgagcgctcctttccaccgcggtttgggctaatgatgggtcctgccggcgtgaacgccgtgtttattataccttcaccagcccaggggaggggtgcgcgcctgagcgcccggggtccaggaacgccagagctgcaacgccgaaaacttttcaggctgggaaaaggtcttggggcccctcatacacgcctttttcgcactcgcttggcctcgacttggtcaagggcggattcggcctgccttcaggctggggggcctcggggcaccggggtgcacccggggcccgcccccttggggaggcaccttctggaaacccaggccccgcgcgtctcccgccgggactgccccttgggcggtggtaaaactgcccaggccccgggtatcaggatcatactcaaaccccaacccctgcccgccccagccaggaggggagacggttgggagtgggaggcctcggcgctgttctctggatgcaactgagattgccgctagagggtgacgcctgggtcggaatccaaggtagacgaatctggggtgctggaaccgtgcttttccccggaaaacccaagaaatgcacttacagtgcgagattggttggggcgtgtctataggggcaacgggaaacagcgaatactacggattatgtgctaagggagggaaagcagatcgaaggtccattacttgcacatttctacctacgatttggggcctgaatcatccaggaagccggctttgtactccacctgtctgtgccagtgtagacggagtctggggccggggccagctgattttccattgcagtccccaaaaccctccca

SEQ ID NO: 29419 - DNA, 1491 bp, Artificial sequence
  DNA replication origin
ttaaaatccatgaagaccggccccctcccaccccaaaacaaatctgcgccccatctctggccccaggaatcctgaaactggccgagcagggcgggggtgggtgtgtaaaaacggacacgactgcaacgtctcccactccccaggcccaaggtatttttactagctaattgcttaagcgaagccgcccgggccgagagcgcgccgtaacccgagcggggaaccagatcccgctccgagggagcccaggccggccgcgcgggcggggcagggggccgccgaccacccaccgcgagggcagccgccccgccggccgccgccgcccccgctccgcattaacgccgggcccgcgccctcctcgcccgcccccgctccctccaaccccccgcgaggcgaggttcaaacgacgcctcaaggtagggcggccagccaggacccgacgcgggagctgggcgggagggaagcggcctgtcctcggggcttcggaagggagggaaggaggacccggccgggggaaacgaaacttcacggctgccggaggagcgcgggagggatatttgtgggtgaaagtgcagccctggggactaggggactgtggggaaatatcaagcccagcgggtggattataagaagatctgtgtacggatacctgagatacttctcgcacgctctaagtgtgcacgcgtcatgctgctggcgtgcagaggactgtggcccgcacagccagcacagggaaggggagaaccaaagtctcccttggcagaagagtgtgaggtgggcgtccagtgtgaggggctgggcacgcagaacagtgagaactgtgcacatatatcagcctctgtgcgggacattccagaaggatgtcggtaccatgcggtggtttcacgtgtaatgaatattttaagatgtgagcaatgtaacttgttatggaagccgaatatttgagtacaaaatgaggtgctctctacacagaatatgaggaaatgtgtgcacagcataatagtgttgtgtacacagattctttcagatgtgtgcaggatagcatgttacacagacgttacatgttcctctgggaggtgtgcagcaaataacgtattccagacacggagtattgcaggctctgtgagcataaaacctgggatacatgtagactgcgtgtgccctgcaatgggttccatgcagggtgcatttagagttgtatacagtgcagtgcctgaggaaacagaactccgtgggagaccggtggatgcaaaatgaattctggctacagcacgttgcaaggacagggtccacgtggtgaccagtactctctccgcccaagcgtcaggccatgtgtgtacagtagcgcacggctatgcgaagggaagactgtcccaaggtttccacgccgcttgacacgcagtcatagtaagaaggcaataatgcagtgaccacacagaaatcggtttcggaaccctgcctgtgccctggctaggcgcctcaaggtcatcacca

SEQ ID NO: 29420 - DNA, 1807 bp, Artificial sequence
  DNA replication origin
agcgctcgggtgcgggctgggggcggtggagccacgaaaggtggtgccgagagcggagcgcaggacagcgcaggagccccggcgcatcgcggcgcgcacagacccaggtgagtgctgctctcgcagcgactgctggccgggcgcggcctctccctccagggttccgagttgagaagaggggggcgaggggtgttttcgcgggtcatcgcgaagagcctagaggccaagccccagcgcgagctggggcgagaggcgtgtgccgggctcgcagcacggcccgcggcgcggcgcgttcaaagcctacccgcctctcggttttctccggactccttgtctcccgctaactacccgcccccaccttcctggctcggacgccttcattttcggcgggagacgcctgtcgccttcggggcgcctggcacgtcggtgagaggagctggggggctcgccggcgcagcctgccgggcagtcgccgcctcctccgccagatctgcgctcgcgggagaagagagccgccttcccgcgctgcccttccgctggcctctctgggtctccgcgtgcagacagcctggcccgcctagggaaagaatgagtgtgggacgtgacccgtagtgtgtggttgtgcattcacgcaggtaaacgctctctggcagacccgctaccacttcacacaaccagctcagcctccgcgcacacagacacgctccgcaccgcccacggcctcaaacacccttcccagcgaccctcacacagctcaggcgctcccaacccttggaccaacacacaggcctgcccaacggggagggcacactttggtttaagtgcacacttcatgcacgcccacatgttctccactgcgcgttcgcccacgcatagccaggcgccacgcgcaaataatcataggtaccgccgctccatacgtgcgcacgcgtccacgaacacaagcattctcacattctctcccaacttttgtgtgtgtgtgtgtggcaaatggcagttgcagatgaggagaccctggcctccggaggaaagttctgttcccaggaaggggtcgctactgccgactgccagagcacatctggcccttagcagaggtgagcagagaaggctgcacagctcttaagccagctaggggtgcagggcgcacgctgcggctcgctgaaagtggaaatagcatctcccttcccctcgcccctcccccactcatggggcgccttcaaagtgagcgggtccctagagcatgaagttggggagccctttcccagcagactccttcactcctgggccctcttcagttggggaagggaagccgcaggtcccatcgttggctaacccggagatccatttttccctcctttccacccttctttctgccctttcaccggctctgatagcaaaccagaccttacagaacagccagtcacggagcccagcgaaagagccggcccagtaggcctgggagtctcaggaaggccaaagatggaggctctccccaactgctcatctctactgctgggtgtgtgtagaagtgggggcgtgagagaggaggcgaatgagctcccagctctgtaatttggaggggaccccctgaattctggggaaaaccacagccgtagcaagaagggctttccttcatgctcagagacttcattctcagctcttacaatgtccctgagaggtctcccttgatcctacatttttagggtggagaaactgaggctcagcatggacttgaatctcttatcagccagcactgagaggtgaacactctccatctcccctctctacgtccaaggacaaaatttcc

SEQ ID NO: 29421 - DNA, 986 bp, Artificial sequence
  DNA replication origin
ctctcgccccagctcgcgctggggcttggcctctaggctcttcgcgatgacccgcgaaaacacccctcgcccccctcttctcaactcggaaccctggagggagaggccgcgcccggccagcagtcgctgcgagagcagcactcacctgggtctgtgcgcgccgcgatgcgccggggctcctgcgctgtcctgcgctccgctctcggcaccacctttcgtggctccaccgcccccagcccgcacccgagcgctgaggtggcaagggcaggtctgcgtgcgagccccctgcgggctggcagccaggtgcgcgagggccgcccttgccggcgctcccagcccgcgctgtctgctctcaggaacctggcctggcgcgcagtgtcagaggccccgcggcggcggcaggccgagcccacaggggcattaggccaactcccccctcccgccctgcgcacgcggaattctctattattattattaaagaatcccccagaacttgtttacgttaaaccctgtaaacttcctgccagggcctttgccatctctcgggaaatcggaacctgcgctttgaaaacggggccgcggggccaaataggcgggttttcagtgtgtgttgggggtgggggagggcaactgaactacgtgtgagttcagatccgagcgtggcgtgtgtacgcgtgagtgggagtgagtgcgaacttaagctcctgtgggccttaagcttccgtgtcaacgagtgcattagtgggtgcgcacatgcctgagcgccctctgcatatgagtgtgcacacacgcatgggtgtgtttacacgtctgtttgcgtaatttaccgggtttgcatgtgcatcaagacatgtatgtgtgtgctaatgtgtggacaagagcgcgagggtgtgcgcgcacgggtgagtgactgagcacgccgcttattcaggggcctgtgcggtctgggtcgcctctgggccagcgggttctcactcgcccccgtc

SEQ ID NO: 29422 - DNA, 913 bp, Artificial sequence
  DNA replication origin
cagggcgccctcggcctccccactcaccttgcagctcggctggggcgttgtggctgttctggtgcagatacggctgctccagggagtgcgtggagaggctgccggacagggggttggccgcggggttacagggggacaggggctgctgcttgatataagaggcgccgctgttgagcgccgcggacgccgagggcggccaggccgccgccgagcccgagtagacggcgtgcggctccatgaccccaccggcgccggtgggcagcagcggggaggcgggcaccgagctgtcgtggtgcgggtactcgccggccgccgcgccgccgcagccgcccatgtacgagtggccgccgttggaaggcaggtggggcaccgagtggctgggcagggccatgccgtccacgttgcccggcaagtggccgttcatcatgcccaggccgccctccagcgccaggctgttgggcgggcacgagaggccgccggccgagccctggaagccgtaggtgtccgggaggtggttgaagccgagcccgttcatcatgctgtacatgggcttgagcgcctggcatttccttcggaagccgcgcggccgccgccgaaaggagccctcctcgaacatgaactcgctggccgggtcgatggtccagtagtggcccttgccgggccgcccaaggcccttgggtagcttgatgaagcactcgttgagcgagaggttgtggcgcacggagttcttccagccctggtaggagccccggaagaaggggaagcggctctgcaggaactggtagatctcgctcagcgtcaggcgcttggtgggtgaactctggatggccatgacgatgagcgcgatgtaggaatagggcggcttctccgggcgccggatgccggcgttggtcttcttggccttggacgggcc

SEQ ID NO: 29423 - DNA, 949 bp, Artificial sequence
  DNA replication origin
ctcctgcctcctggggctgctgacagctgaccctggactggccctggcaagctcactccagctttttccagagctgggcctgcaggctgcggggggcctggggcagaatcaggaggcgaggctgctgcatctcccttggcagatgcttctgcatgttcggggtattggggtatcaggggtgttgggggtgtggggacctgaaaacttggatcctaaaaaacaaggagcccccatggcccggtctgcagctctgaccctccggggcctggccacggcaccctcctgcctcagtcaccacaaaatgcccctggactcagctgtgggtctgccaggtctggtcccctgaaaggccggggctgagcctctgagcgctggcccagcggctttgggcctaacaccttccgttccgcccagccccaggcagaggcagccctccaggcagcctgagggccaccaccagggagggacagccatctggccagcgctgggagccttgggtccatcccaggatctttccaagctgtgaggggacttaagggacacaaaaggacttagggcactggggtctgggacatctggctcaggaccagcctacctggtcaggcctggagcagctggcagctggagttcgaacagaaagagaaacagattggcccaaactagggtcaagagcggtagtcactcttcgaagggggagaggtggggccaagagacaccttggggagctggtgcctcccctcagccttggggttccgaccacagaagtggaggggctcgccccagctgggtcccgctgccactcagactcgacttcccggggaccagggcgccctcggcctccccactcaccttgcagctcggctggggcgttgtggctgttctggtgcagatacggctgctccagggagtgcgtggagaggctgccggacagggggttggccgcggggtt

SEQ ID NO: 29424 - DNA, 1027 bp, Artificial sequence
  DNA replication origin
ccggtgtacaggctcatcgctcgcatgctgcactggtagcccccggcggccccggcctccaggccctgagcgcacggctggccgtaggcggcgggcggcgcggcggcgtagggcagcgccagcggcggcaccaccaggcccgcgcgtccggcccccgggctcagctctccgcccggcggcgacgttcgcagggtcatgatgttctccacgctgaagccaggcagcccgttgggcgccgcggcgtggtgctccggcagcgagccgtcgggggagccggcgggcgtggaggccgcgctgcgcgggctgccctgcagcgcgctctcggggctcagcgtctccaccttggtgatgaccggcagcgccggggacgccgcctcgctcttgatcaccaccttcttctcggcctccttgggggcgtccgctaggtggggggtggccggggcgcccttggacgccgccgggggcggctccttgaggtgggcccgctcctccttctccttggacacgtccttctttttgaagcgccgccggcgccgcaggaagctgccgttctcgaacatgttgtaggagtccgggtccagggtccagtaactgcccttgccgggcttcttgtcgtcgcggggcaccttgacgaagcactcgttgagcgagaggttgtggcggatgctgttctgccagccctgcttgttctcccggtagaaggggaagcggtccatgatgaactggtagatgccgttcaaggtgatcttcttctcgggcgcgttctggatggccatggtgatgagcgcgatgtagctgtagggcggcttcaccaggtccttaggcgccgcgggctggtggtggtggtagggcgcgtaggagcggcccatccccgcgctgtactgctccgggtggccggaatagacgcccatggggctggccatgccgccgtagctgcccgcagcccggtagtaattctgctcgctcaggtagggcaccactcccagggcgttggggtcggacacggagtagcgcgcctgcatgctgc

SEQ ID NO: 29425 - DNA, 966 bp, Artificial sequence
  DNA replication origin
aaaccatcacactttgtaaataaaaagtatcagatacttgacttctttatccaccaacaaaaaaataaattattttcttgttttgtaaaagacctacaatgggaaaaagaattatatctcataattgtacaggaaacaaaacccacatcggtttcttgaattcaatttggcagttagaaatggttgggcaagatgaaaaacttatccagtgaactcaactttaaatattatattaatggctctgaacaacaacaacaacaacaaaatagcctgattacaaatccacacatttgtacagcacggttggagaaatttaaaattacacacagcacatatattatctatagagacccccatacacctatggggacccctacagaaagtcactaggggctcgctatgggatttggtccataacttaacttttgaaagctcaggtcgagcacagcacagccgtcctggtaggggagggggattttaagatcaatactcattttgttgggctgcgtccctttggaggggtttcctgggatcccagaaacggggcggcgaattaaagttacctgcgctcttcacagacggctgggggctagcgtgcccgctctctgctcccgggtctgagaaaaggttggtggacatgttttgtttcttttttgcgtctctgcagccccttaattgtctggttgggtcggggctgggaagcgaagccggagcgggccggggaggggaggtcccgggacacgtcagtatttcgtgcagtcgtaggagtagggggctgcgtggcgatagagaggcggcgtggatctgtagggcagctggcagctggcattgccactcacctgggactccccgagggtcgagttctcaatccccagccggtgggagttgaacatctcccgcacgttggggaaagtttgctgctgggccgcgaacgtgtggccggggaggtggttcaggtccccgctg

SEQ ID NO: 29426 - DNA, 1235 bp, Artificial sequence
  DNA replication origin
gcgggggtccagcgtccagtagctgcccttgcccggccgccctttctcgcggggcaccttgacgaagcagtcgttgagcgagaggttgtggcggatgctgttctgccagccctgccggttgtcgtggtagaaggggaagcggtccatgatgaactggtagatgccgttgagcgtgaccctctgctcgggcgcgtcctggatcgccatggcgatgagcgcgatgtagctgtagggaggcttctgcggggtctcggcccggcccgaggcagctagagcagccgcgggggcgaaggccagagggaggccgggtctctcgggaccgtacagatacagcatgggcgaggcggccagggcaggcagccggggatcgaagaggtgactcatggcaagcgagagcctgcgctgcgctccccgcaacgcaggagacccgggcggcctaggcactgcgccccgcgccgcaagggccctcccggggagccagccgtgcctctgcctctggctctgccgctctccccggccgctccgtgctctgtcccttcttcatggctttaaaaatgttaaataattgttgtaagtttgctgttatatgttgacttagccctggaaaataaattgtctatgataaacagtccttgtgttctcagcccacccacattaattaaaatttcattgctgaaaaactccaagcttttccctccacgtgtctttttgataccagccaatcggttttggggctattccttcatttgtttatagaattagtctgttgataagtccgcccacccaagttgaatcaagctgtgtttatttggaaaaatttccgggcacccaatatataaacgcactgatctgatgtttgaaatatcacgtccaccccttgacgctgtaagcacacacagtcagtgaggcaggatgtagactgcggtggctcagagcagggtctgctgagccaggaaggagaggtggagatgggggtgggtgtgcagggatgagttttacgctggcctgggggagccccataacgccagggcctcccacaaaaggtcttttcttctcccaggcttaaccggagatatcgagatgccacagtctagtaaaacactttctgaggtcctaggaaccttttagattggggcagggagagtatctaagaagcctgagtgtctgctgagaaggggatgcggccctccctggaaaaacaggtggcagacccagtaggaggtggcactctctag

SEQ ID NO: 29427 - DNA, 1010 bp, Artificial sequence
  DNA replication origin
actaccaaactgagcccctgcgtctatagtcagacgccactggagagaatggaaaagggaaaagccttcttacgggggcctctcagtcagctccatcggcccccactccccggtacctcaatcacagcccccaggccccctcctggggaagagtggggtcacccacctgcgccagtgggaaatagctggagctggactctgattggcccaatatgagccatgtgcctgacacagggccaattgctgtggcctgggggtggagtctgatacagaaaggctgcgggaggtgtccctgagcagccagcccaaattatttctagtacctccagcaaggactcatggctttcgttttagtttctacctgtgttaggccattcttgcattactataaacaaatacctgaggctgagtaatttataaagaagaggtttaactggctcacagttctgtaggctgtacagtaagtgtggcactggcctctgctgggtttctggggaggcctctggaagcttccaatcaaggcagaaggtgaagcaggaggaggcgtgtcacatggtgggagtgggagcaggaggggaggggaggtgccacacatttaaccagatctcacaagagctcactcaccagcactaagccatgatggatccaccccgcaagacccaaacacctccaactaggccccatctcatgttgaattgcaatccccattgttgggtggggatgagatttgagtggggacaaatatccaaaccatctcactacccaactgcctgcatgatatcctttcatagctccagaaagatgagtaaatggggaatcaagaagaaagcagaaagactgtatattggaggagggaggaggaggaggagggagaaggagaaggagggaggaaaaaggagaaggaaaggaaggaggaggagggaggaggagaagaaagaggagtgaggagcaggaggaaagaagagaagaaggaagagggagaaggaataagaggaggagagggatatggg

SEQ ID NO: 29428 - DNA, 1579 bp, Artificial sequence
  DNA replication origin
agagcacaggggacaaactccaagcggcagagcaaggactttcgcacaggactgaggacagagggagtcactgggtcatgaacagaagggcatgtagactggcatcatttggaagtataactctggctgctgacatgatagaagtgggcaggagcagggagaggccaagatgtcagcccccagcaaagtccctcatgctgatgccaggtattaaggaaggaaggaaggaaggaaggagtaagtgaatggataaatgaataaacaaataagtaaataaatggatggataaatgaatgaaggtatggaaggaaagataaatgaatgagtggatagatgaatggatgaagagatggagggagggatgaagagagaggaaaggatggagggtgaatggccgagtggatgaacaaatgaatggtgggagggatggagaggggttggagggatgaaagggatgggaggatggatgaatggatgaagggatggacagatggatgggtggatgaatgaagggatggagggaaggatgaatcggcagacggatgtatgaatgaaggaatggattgagggatgaatgaatgaatgggtagatggatgaagggatggagggatggatgggtggttggatgaagggatgaaggaagggatggaagaatggaagggtgtatggatgaagggatggaggggggttggagggatgaatgggtggataggagaatggatgaagggatggagggagggatgaacagatggatggggggatggagggaaggatgaatgggtggatggatgaatgaatgaagagtgaatggagggatgaatggatgaatgagtagatggatgaagggatggagggaggaatggaaaatggatgggtggttggattaattgatgaagggatggagggaaggatggagtgataaatgggtggatggagggagagataaatgagcagatgggcagatgtatgaatggatgaaggaatggagggaaggatggagagataaatgggtgggtgcatgaagggaaggagggaggtatggaggatgagtgggtggatggatgaatggacaaaatgatggagggaaggatggagggatgaatgggtgaatggacaaatggatcaagggaggaagggaggcatggaagatgaataggtggatggatgaatggatgaaggaatggagggaaagacggaaggatgagtggggggatggatgaatgggtgaatgagtgaatgaatgaagggatggagggaaggatgaatgaatgctgcacaaatgaatgaatgaagggttggagggacggaaggacggagggatgaataagtggatggatggatggatgaacaggaagcctcagagcactaggggccaactggggcctgagaggacagtctggggaggaagctcagtgtgaagctctgtttcctctattagtaatagtaataatacgattgtattcatttcctgtggctgtggtaacaagtggccagaaacttagtggcttaaaacaacacactttcattctctcacatttctggaggccaaaagtctgacacaggtctcactaggctaaa

SEQ ID NO: 29429 - DNA, 1159 bp, Artificial sequence
  DNA replication origin
gatccctgaatctgtaggtatccaagacttgaggatcacctgagcctcaccccagaaggcggtcacgattccccattgtaccaaagagggagtcagggcttgaagggaaactctgcgctcaaagcacttacgcgaaaagcacatctgtcttcaaccgcatccaaagtgctggccaccggtcttccatatggtctcccggagtggggcgtcctggcctgaggaacaggacccgaggctgcggtggggtctctgcctccttttgtgtctgccgcccaaccgtcttccgacaggagcaggtgtggaggtcccttagctctttctgtgatgcgcgctggttcattccatcggcgtttccgagcacctgctgcatgcccgcagggtgcgtgcacagagggtacatcagggaacagaatggggcgggtccgtgccctcccagcttgtgagggtgggggtgggtaatgaggaaattagtgcgatggcctcggagggcgctgagaaccacgggaaatcaactcagggagactatggggtgaggcttcgattggctgctcaggaaagacccctctgaggacagaagaagctaccagggaagagcttgccagacaggggggaacaccatgggtgcaggaacccctgcggaaggtcaggaggacagagagggccagggtggccatggggggcgggaaggggaaggggaaaagcggagcaagggagcaggtcctggatcgtgcacgtctgtgggagcccagagaagccctctggattcgattccaagggtgatggaaagccatgacccaggccacggtgggacggggactgcaggtggcgggggacgagggaagcagctggctctgtcctccggaaggagaggatggagcttagctcaggtgtggaggctgtggagcttcttgggtgcccatggaaggctgcacggtccacactcaaggagggctggacgggggagttcaacaaagacaactctgggaggtggagggtggggtgcccttttcagagccatggaggaggagaggaagagcaggcctgggcagagcccagagggcccgtttggccattttacatctgagatgcctccaagatgaaaacccggggcatctccaaggcatctggacgtgggccttcctgatcggggactcgacag

SEQ ID NO: 29430 - DNA, 873 bp, Artificial sequence
  DNA replication origin
atatacttgttatcaccgtttaaaccatttttattcatattgttttgtatccatcactaccatccatctccagaatttttctatcttcccaaactgaaattctgtcccattaaacgctaagtcaacacttcccatgcatcctctcccagccctggcacccaccattctttctgtctccatgaatctgactactctaggcacctcgtatatgtgcagttgtacagtattgtgtgtgtgtgtgtgggtgtgtgtgtgtgggtgtgtgtgtgtggggaggtgtgtctgggtgtgtggttatgtgtgtgggggtgtgtgggtgtgtgtgtgggtgtgtgggtgtgtggggggtgtgagtgtgtgtggggtgtgggtgtgggtgtgtgggtgtgtgtgggtgtgggtatgggtgtgtgtgggtgtgtgtgtggtgtgtgggtgtgtgggtgtgtggggtgggtgtgggggtgtgtgtgtgtggtgtgtgggtgtgtgggtgtgggggtgtgtgtgggggtgtgtgtgtgtgggtgtgggggtgtgggagtgtgtgtgtgtgggtgtgtgtgcctggcttatttcactgagcataatgccctcagggctcatctatgttggagcatgggtcaggatttccgtcttttttaaggccgcgtaatattccactctatggatggaccacattttgttgactcatttatctgtcaacggatacttggattgcttccaccttttagctattgtgaattgtgctgctctgaatgtgggtatgcaaaaatctctccaagtccaggtgcagtggttcacacttgtaatcccagcactttgggagggtgaggcaggtggatcatttgaggtcaggcgttcgagaccatc

SEQ ID NO: 29431 - DNA, 780 bp, Artificial sequence
  DNA replication origin
cgagcaggacctgcccgggtggaggagaggttgagaccacacccacattgcggtaaacctgtgtctaagccgtcagtttgaaggatatccattcctgcaattaaggattggggtgcacgtagcagcactacccgtaggaaccccagctgaaagcaactgaaacgcacaccacagtggaatgggtgattaaatgtgtctattcacagcaggggacaaaactgcacagactcctgccctcaggggcttatgttctggagggaggactcagacaataaaatcagtaagtaaagtgcacagacatgaacacatggggagaaaataggtgtaggggggatgggtgtggggtctgcattgtaaatagagaagtcactgaaggctgcagagagggcggcattgtagaagtaaaagcgtatggaagggaagatgggagccatagagatatcaggggaagagcatgccaggagagggagcagaaagagcaagggtcttgaggcaggttgcttatggaggaataggagatgagcctggctgtgacatggtgagtgggagcagtggaaatgagggagttcaaagggaaagggggagtggggagagcagagagccctgggagcctgtaaagactttagcgttgactctgagggacaaggggctgtggcggggttctcagcagagggagggcctcttctactcaggatttacaagggccactgtgattactgggctaagggtaacgtgcaggtggacaaggcaggggaacaagaagacaggaaggaggccaac

SEQ ID NO: 29432 - DNA, 1225 bp, Artificial sequence
  DNA replication origin
gggggcctctaaaccccaggaaaggtcagggcctaccagaggcctcaccctgagggtcccaggggccctgtcaatcacggctgatgcaggagcggtggggacgggtcaggccggcgtttaagaaagcccggtattgtttttaaaggttaacccgtttgcatcttgggtttcatcgggaagtctgtgtggtcacaccagccaatttagcatttgttgggagctgggtgagatgggccatgaggaacagccccctgggggcccttaggtagttctgtggtcatgacttgtggggaacgcaggcggggaaagggcacatttgtatcccatatttggtgatgtggtgggcttcaagttcttctttctctctcatttgtcaggatcttaatgagaaaccccaaaaggatttagagatttccctttcccaaggacaggaaataaatgggaacgttctatgaaattaggggaaaacccattgcaagttaagacagtagagtctttgttgtctacgtgtgtgtgagtgtgagagacagagtgtgtgagagtgtgtgagagtgtgagagtgtgtgagtgtgagagagtgagagagtgtgtgagagtgagaatgagagagtgtgagagacagacagagacagggagagaccagagacagacagagagagaaaccaggagaaaacagagacagaaaaacagagagacagagacagggacagggagggatggacacagagagagagggacagggagggatggtcacagagagagcaagacagagagagagagagagagagacagagacagggagggatggacacagaaagacagagagagagacagagacacacagagagacagagaaacagagagagagaaagagacaaaaagagaccagagagacagagagaccagagagagagagggacagagacagatcagagagaaacagagacagaaagagaccagtgagacagagagagagaccagagaggggcagagagatactagagagagacagagacagagacagatcagagagagtgagagacagacaggaagagaccagagagagaccagagagacagagagacaggccagaaagagagagacagagatacgagagtcacggagagagagaccacagagagaaacagagacaagagagagagatagcaaacagagagacagagaaacagagagagagatagagaccagagaaagccagagccac

SEQ ID NO: 29433 - DNA, 1522 bp, Artificial sequence
  DNA replication origin
ggagcccactttcccaacgcttcctgggttcacctgaattccttaccaacatgtatttcttccactttgttatttttggattaatgtaaatgaagtctgtcttgggctctctaagataaatgaaagggatgctagggtcagaagcttcagtgttggctctgctggagaaagattaaggtaagactctgcataatgctcttaaacctcccacttccttagtgtgagacgaggaggaaaagagcatgaggagaaaaaatgaaggaagaggaagaggaggaagacagggaggaggaggagaagggggtggaaggggagggggaggaggagggggtggaggaagaggaggagtgggatgaagaggaggagggggagaaaggggagggggaggaggaagaggaggagagggatgaagaggaggagggggaggaaagggagggggaggagggggaagaaggggaggaggaggaggaagaggcggaggggatgaagaggaggagaaggaggagggggagtagtcatacctgcttccatcacgcctgcgttttggacagcgtgatggaggaaaggaggggtgcaggtatatgtcttccctttaagaccacaagctgcgagttgggcatcactgttgttcacatcccagaatctagatgtggagtcacacctacctgagaccttaggtcttcactgagaacgaagggtggggtggtgaatcttggggaagggcagtcacgcacctggttgtgattaatacggtcacttaagagagggaatggatgtagacagaactagcaatttccgacacccatcaggttggttttagtttggggacaggtattctatacaaacctgtgactgcatgcagggttatccctcccacgtgcggccaagactgtgtctcctcttcccagcctgtgttcatggaaagctgcctcctccccacccagaccagaggcgggttgtgagtgcaggcagtttttgggaggtgacctcaggaagtgtaggggagttgggaagggaccgggggaagggacgaaaccaatgcagggtggactgttgatcagctgaccatggtgggcaaccggggctccaccctctggggagcgctgggagactgtctggcccccttggagtttgcagccgagcagggttttatgttgcagggcttcaccgtccctggcccagggctgctcctgatgacagtggctcctgggcatttgtgggctgcctgtctgtgagggggcctttttataaggacaccatcatagcggtttagaggccaatcctactccagcatgacttcagctcaactaattacatcttctagggccctatttccaaataaggtcacattcggaggcactggcagtttggatggcaacgtaagaatttttggggaacacaatggattcataacagggtgggagaaggggcagagggggcactgaggagagtttcatggcaaacacttgatgtttgggcgagcactcagcgccgtcgtgcgccgtcgtctcttgggaggagc

SEQ ID NO: 29434 - DNA, 816 bp, Artificial sequence
  DNA replication origin
tgaaaattctagagtgaacaaaaaggccttgctaaggtgcccatgagtataaacctcagcttggttgggagtgagtcatgtggctaggtggaaggtggagtggatggataaatggatgggtggatagatggatggatgcatgagtggaggtatgggtgggtggattaatggatgggggagagatggatgcagggatggagggagggaggggcgggtggatggatgggtagatgaatggatggatggatgggcaaaaggatgcgtgagtggatggatggatggatggatgggcaaatggatgggtaagtgggtgggtgggtggatggatggatagatggatggatggatggatggatagatgaatgggtgggtagatgcatgagtggatggatggatagataaatggatggatgaatggggatgatggttgggtgggcgggtgggtgggtgggtgtgtggatggatggatggatggatagatgaatggatggatgggtgggtggatggatgaaagcaaagacagatggtagatggatagatgatgaatggatggatgatggctaggtaaatgagtgagtgaagaatgaataaatcaatgaatgaatgaacagccctatgatatacacaatcttttttctccattattatcatggctgttattctttttttctctcctcttgctatttgtattccatctgtcctttaaggtcaattctgggtgcctcatctagcgacactagactgcatctgtctctccttgctgtcaatgccgagaacccttagaggttgtgcccctagtacagatggactcaacac

SEQ ID NO: 29435 - DNA, 876 bp, Artificial sequence
  DNA replication origin
ctaatatgtgtggcagcctgtacacaagcacaggtcaggactggacttctcaagagtttgttgaggcccagcgtggtggctcactcctgcaatcccagcactttgggtggccaaggcggaaggattgcttgagctcaggagttcaagaccagcctgggcaacatggtgaaatcccacctctacaaaaaaatcacaaaaattagccgggcatggtgacatgcacctgtagtcctagctactcagaaggctgaggtgggaggatcacctgagcatggggaggtcggggctgcagtgagccatgatcacaccactgcatgccagcctgggcaacagagtgagacctcatctcaaaaaaaaaaaaaaagagtttgttgaggctgaggtagaggctggggtaatcttaagggtaaggcctgggggtaaaatttggggggtagaacctagaggagaggctaagagtggaggctaggggagggaagcaggggtggaggctgggggtgaaggctgggaggaggctgagagtggaggctggaagagattggaggtagaggctggggtggaggctgggaggagactgagagtggaggcttggagtgaaggctggggagtttggaggtggaggctgagggtggaggctggaggtagaacttgagggatggaagctgagggtggaggctgggggtggaggctgggagttgaggtgaggttgagggctatggactcagatctatgtttgattgcaaccctgccttcatcaaggggctcaccttctctcacttaacagattcctcatctataaaattgtactgataatactcagctttcggatgttacgcaaatcaaacaagataacatatatcattatccactgaagcc

SEQ ID NO: 29436 - DNA, 1684 bp, Artificial sequence
  DNA replication origin
ggtgcaagcatctggatcccgtgtgtggagatgccatagcgaaggcccaggccttgtgggctggcacaggcctcttctggtggagcctcttgcactctgtcattccttcccctcaccctctttcgctgagcccccttcctccaccgtcccagccgtggcaaagctgggtctcaccacgtggccctcaaggctaaaaatagcacaggggcaactcgggtttgccgatgacctccgcagttcggtcaagtgtacgtggcctccctaagttaattagggccagccccagaccctacacatctgtatctgggctccaggggtgaacaaggtcctgctctccaaacaacggggcgacacaacggccggtgcaccgtgcatgtctctgctctgtgtgtccctgctctttgctggggacactttctcttagagcttctccctggactgccagagccagggctgctgcggagctgtggccagtgcgggggacaaaggtgcacagggcaactgtggtgcaggcccgggtggatgagaagacggccccaagccactgtgcccctgttcctttcacttttgtctgtggtcctcttgtgcagtgacaggtgcctggaggcaaaggggacaccctggggggatggaagctccctgagggtgacagcctgtgagtgggcaccagcagcagccctccacacgcaggtctccgggcacggtcgcgggttcctcggctgtcctaacaaccacggctcgagggcgcacaacagcaggagcactttctctcttggttctggggccagacttctcagtgtgggcaggggctaaaggctccagaggagggtctttcctgactcttgcagctgctggtggctccaggcaccccttggcttgtggccgcatggctccaatccctgactgtcttcaccggcctctcctctgtgtgtctctgtgtctctctcctcttgtaaggacacaagtcattgggtttagcgcccaccctagtccagtatgacctcatcctaactcacacctgcagagaacctatttccaaagaaggccccattctgaggtttgaggaggctgtgaattttggggagatcctgttcaactctgtacatgcattgtcctgtaatgctttattcccgtttcccagaggagaggagaaaactgaagtttggactggttaaatggtgattaggccagagtgaaacttaaaagccactgggttttgggaccccgccctcagcctgcgtatgccctcagcctgcatatgccctcagcctgcgtatgtgccttcagcctgcgtatatgccttcagcttgcgtatgccctcagcctgcgtatgccctcagcctgcatatgcccccggggtaccagagggaaggcttcttgtcgtctgacccctgaaatggagatgcttgggggtgtcagctgccgacacaatgcgcaaggcctggggtgggcaggagggggccaaatatgaggagaaaaggctccgcccttcctgggggcttctctgggagctgggtttcaagcacagggacacggcacacacaggagacagggcaggatttagtgcagggaacttcacaggtaatgacatccgtaggcgttcagaggagggggctggggccaggaactgggtacttcacgcagctctaaagatgcgacttgaacagcagggtcctgctccccc

SEQ ID NO: 29437 - DNA, 1487 bp, Artificial sequence
  DNA replication origin
tgccggcctcggggtgcgtggggaatggtgagataagcacgtgaaaccacagctcggccttgatggtttgttagctggccttagtgttttcaattgtccgaaattgggacactctgtcccacaggcaccttacctgaataccttatcggagaccctggaggccagatccgtttcagaattcagaatctgttagcttttagaacgttaaatcagtgcttatgttgtatgtcattagcagccctgtgggatcccgggccacacggggcagtgagactcacgaaagtttctgtagccgccgcgtggtgcacacagccatggcttgcctcgcctcagcacgggaggctttgctgaccacgggctgcgcttactgatgccactcagatgcatgggacctcagcatccgcaaattcaactgcacacgctcagcactgcatgggtggcatgggggtgagtgcggtgtgcgtgttgtgtatgtgactgtgtggagtgtgtgttctgtgtgtgaatgtgtgttgtatatgcagtgtgttgtgtgtattgtgtcatgtgtgcgagtgtgtggtatgtatgtgtggcatgttgtgtgtgctgtgcatatatgtgtgtgtgttgcatgtgtatgtgatgtgtgtggtgtgcttgtgtgtgtggtgtgtgtcattgtggtgtgtgcattgcatgcgtgtgtgctgcatgtgtgagtgttgtgtatgtggtctgtgttatatgagtgtgtgtgctgcgtgcgtgtgttgtgtatgtggtgtgtgtggtatgtatgttgcatgtgagagtatgtgctgcgtgtgtgtgtggcatgtgtgttgcgtatgtgaatgtgtgttgtatatgtggtgtgtgttgcatgagttccttgtgtgtgtgttgtgtatgtggtgtgtgtggcatgtgtatatgtttcatgcatgtgttgtgtgtgttatgtgtgcgctgcatgtgtgtgtgttgtgtgttgcgcgtgttgtgtgtatgtgttgtgtatgtgatgtgtgttgcacgtgtgtgttgtgtatgtggtgtgtgctgtttgtgtggtgtgtgtgttgtgtatgtggtgtgtgtggcatgtatgttgcatgcacgagtgtgttgtgtgtgttatgtgtgcactgcatgtgtgcgtgtgttgtgtgttgcgcgtgttgtgtgtatgtgttgtgtatgtgatgtgtgttgcacgtgtgtgttgtgtatgtggtgtgtgctgtttgtgtggtgtgtgtgttgtgtatgtggtgtgtgtgagtgtgtgttgtgtatgtggtgtgtgtgagtgtgtgttgtgtatgtggtgtgttgtgtgcgtgtgtgttgtgtatgtgatgtgtgctgggtttgtggtgtgtgtgttgtgtatgtggtgtgttgcatgtgtgtgtcgtgtatgtgttgtgtgttgcgtgagtgtgtggtgtgcatgtgagaagctgctgctctctcagtgggtcctggtgagctcagcccgc

SEQ ID NO: 29438 - DNA, 1166 bp, Artificial sequence
  DNA replication origin
gaggtcaggagttcgagaccagcctgaccaacgtggtgaaaccctgtctctactaaaaatacaaaaacaattggctgggcatggtggcacgcacctgtaatcccagctactcaggaggctgaggcaggagaatcggttgaatctgggaggcagaggttgcagtcagcacagattgcgccactgtactccagcctgggcaacagagggagactccatctcaaaaaaaaaaaaaaaaaaaaaaaaaacaaaaaaaaaacaaacacttccccacctttgaattgcatttttttccttagcttaagtagaaaataggacattcaagaagggccaggctgaagagggcggtagggtgggtgccacggtttagggagtgggtttaggaaagctctgggatgatggtttgtgacctggagcaagtgagagatggagctgcgctgttgtctcagggaagagcagcccaggcagaggaagcaggactgcaaaggccaggaggtgggcggggctgggccagtaaggaggccatggggacagtcacttccaggtggaggcaggggatggggccgggtgaaggaccttgcgactgtgctgtggcccccagatatgggttgcttcagggtgctgagcatggagggcgggggctgccctatagcacaagggatgccctggtgtgttggggaccaggctgctgccctgggaggggagagacagtgttgggggccatgtgaagtgcccggcttcagcatctattctgaaggaagagctgaaaggatcccaagggggtgccaggaagagaaggctgagttcatggtgtcacactcaatccttagaccctcaaggcatgtggcctgaaaggttagtgaatgccaccctgaggattagtgctggcgacactccatgtaccggggactcgaccctttaccaggaagccatggatgggacccaccacagcaaacccgagtttccacctgcggggggaggggtgggcagttctcagcaaccccccttggggaagaggggctcctttcttgaggggcattccctatgatcctgagggtaaaagggccactctgttgaacgcaggcctcctcaggcagtgtaattgccatttaacctttgtggagcttaattaaggatgtttagtctgggcagcctgcacttgactcagt

SEQ ID NO: 29439 - DNA, 1417 bp, Artificial sequence
  DNA replication origin
ggtcagtgaccgggcaggttcctgcccctgccctcccggcccctgtcctggcccagggcccaacactccagtctgttttccagacaggaaacatgaatcaaaatagcatgacacacgaaaccgtaattggggctgtgctgtgaggcccagggaggcctaacgagtagaggcctctgccatcgaacctgctgtgggtgccctccttccgccctcggaaccctctggcctgaaacagcattccatcagcccccctcctcacccaggagaccaatggggggaaggggggtgggggtggggaggaagagggagagggacggaaagggagagacacacagagacagagggagagagagagggagaggggggagagatggggagagagagaaggggagacaaagggagagataaagagggagaaagagaggaggggagagaaagggagagcggagagaggtagaaaaagagagattcataagagaagaaagaggaagagggagagagagagggagagggagagacatggaaggagagagacggagagtgagagggagagggagagagagagggaaggagggagagagagagggaaggagggagagagacagggaaggagggagagagggaaggggggagagagagatggagggagagagagagggacagagagacggggagagagagggaggcagagagagaaggagggagaaagggagagagggaggcagagagaggagggagaaagggagagagggaggcagagagaggagggagaaagggagagagggagagagagggagcggggagagagaggaagagaggagggagagggagagagctacagagggaaagtgggagagggatggggagagagggagagtggaggggctctctgtgcctggtttggttgtgctgttcctgataactctgaccccgactgaccgaccggtgcttactctgaacgtttccagggtctctgcgtttagggcccgtctgaaggtttctgtgacggcctcggcggctctatgggcagatggccctatggctcctcctagctctgacaggatcctctcagcctctgtgtgctttcgcctctgcttctgcctctgcctctctgtctctgtccctgtcctgtgcctgcatctttctgttcccttccctatctctgtcatcttcgtttctttcttttcttttcttgccttctccctccccttgtttcttgcttcaaataaaggacaggggagacagaagaaagcttcggggactttagagctgcatggacggccccttccgacccagcctcctccctgcaacccccaatagctgcgcccctgtgcccctcgtcccctcgctctcctctgtccagcctcccagcccttcctgcccgcctctccctcccttcctgcccgagaccccccag

SEQ ID NO: 29440 - DNA, 1343 bp, Artificial sequence
  DNA replication origin
tgtatgtacacgtgtgcgtgtgtgtgggtgtgtacatgtgtgcgtgtggggggtgtatgtgtgtgtacatgtatgtgtgtgggtgtattgtatgtgtgtgggtgtgtgtacatgtgtgcatgtgtgtgggtgtgggtgtattgtgtgtacatgtgtgtgggtgtatgcatgtgtacgtgtggatgtggtgtgtgtacatgtgtgcatgtggtgtgtgtacatgtgtgcgtgtgtgtggtgtatgcacgtgtacgtgtgcatgtgggtgtaggtgtaatgtgtgtgggtgtacgtgtgtgtacatgtgtgagtatggatgtatgtgtgtacatgtgtgtgggtgtatacgtgtgcgtgtgtacgtatgcatgtgtgggtgtattgtgtacatgtgtgcgtgtgtgggtgtatgtgtacatgtgtggatgtgtgggtatgggtgtgtgtgtacatgtgtgcgtgtgtgggtgtacgtgtacatgtgtggatgtgtgggtatgggtgtgtgtgtacatgtgtgcacgtgtgggtgggtgtatgtgtacatgtgtgcgtgtgggtgtatgtgtgtgcatgtgtgcatgtgtgggcatgggtgtatgtgtacatgtgtgggtgtgtacatgtgtgcatgtgtgcgtgtacgtgtgtggggggctgtatgtgggtacgtgtgggtgtgggtgtatgtgtacgtgtgtgggtgtattgtgtgtacatgtgtgggtgtgtacatgtgtgggtgtgcatgtgtacgtgtgtgggtgtattgtgtacatatgtgcgtgtgttggtgtacatgtgtgcgtgtagggggtgtgcgtgtgtacatgtgtgcatgtgtgtattgtgtgtgggtgtatgtgtacatgtgtgtgtgtgggtatacatggggtgtgggggtgtgtatacatgtgtgcgtggggggtgtgggtgtatgtgtgtgtacatgtgtgcgtgggggggtgtgggtgtatgtgtacatgtgtgtaggtgtgtgtacatgtgtgcatatgtgtgcacgtgtgagtagggggtttggatgtgtgtacatgtgtgcgtgtgtgggtgtgtctgtacatgtgtgcctgtgggtgtgtgtacatgtgtgcctgtgggtgggtgtgtgtgtccatgtgtgcgtgtgggggagtgtatgtgtgtacatgtgtgcatgtggggttctatgtgtgtgtgcgtgtgcatgtgtgtggggtgtgtgtacatgtgtgcgtgtgtgggtgtatgtgtacgtgtgcatgtgtgtgggtgtatgtgtgcatgtgtgcatgtgtagacatgacagagctcatcatatgacctccaagttctcaaagcaactt

SEQ ID NO: 29441 - DNA, 1148 bp, Artificial sequence
  DNA replication origin
ggtccgcgccctggcgtcaggtgcgtgctgggggttaggtccacacctgggggtcaggtccgtgctgggggtcaggtctgtcctgggggtcaggtctgcgccctggggtcaggtccgtgctgggggtcaggtccgtgctgggggtcaggtccaagctcggggatcaggtccgtgctgggggtcaggtccgtgctgggggtcaggtccacgccctggggtcaggtccgtgctgggggtcaggtccgagctcggggatcaggtccgtgctgggggtcaggtccgcgccctggggtcaggtccatgctgggggtcaggtccgtgctgagggtcaggtctgtgctgggggtgaggtccatgctgggggtcaggtccgcgccctggggtcaggtccgtgctgggggtcaggtccgtgctgggggtcaggtccgtgccctggggtcaggtccgtgctggcggtcaggtccgtgctgggggtcaggtccgagctcggggatcaggtacgtgctgggggtcaggtccgcgccctggggtcaggtccgtgctgggggtcaggtccgtgctgggggtcaggtccgcgccctggggtcaggtccatgctgggggttaggtccacacctgggggtcaggtccacacctgggggttaggtccacacctgggggtcaggtccgtgctgggggtcaggtccgtgctgggggtcaggtctgcgctgggggtcaggtccgcgccctggggtcaggtccgtgctgggggtcaggtccgtgctgggggttaggtccacacctgggggtcaggtccgtgctgggggtcaggtccgtgttgggggtcaggtccgtgttggggatcaggtccgtgttgggggtcaggtccgtgctgggggtcaggtccgtgttgggggtcaggtccgtgttgggtatcaggtccgtgttgggggtcaggtccgtgctgggggtcaggtccgtgctaggggtcaggtccgtgctgggggtcaggtccgtgttgggatcagatctgtgctctggtctgcggtgggatccatgctggagggtcagctccgcctcaggtggttgagtgaaacgcaggtgagatggtgcctgcctggagccctccccttaggggagcagagcaacctccctagggcggccgcctg

SEQ ID NO: 29442 - DNA, 1204 bp, Artificial sequence
  DNA replication origin
cagcacaatctcacattcacacacacacatgcagtcacacaaacacacatatgcactcatatgcactcacatattctcacatacatatgcactcacacacactcaaaacacattcagcctctaaacatgtctgcatgcatgcattcgtccagagtcacgctcatacgcttgcacactccctgtcacactttcacacacacattgattctcaatttcacaccctcactctcacactctcatacacacattcatgcacgctctcacacatactttacctctgtctctctcacacggacacacatacacacccttccttgagcatgaaacacaacacgtgacgcactgtgggaggaaggaaggggccacacatctttcagagccttaattggacgtgctcaggagtcagatccctactgggtgtcagatctgcactctgacggggtcagatccgagctcaggtcacatctaagcttggggtcaggtccgagctcgggggtcaggtctgtgctgggggtcagatccgcttgggggtcaggtctgcgcccgggggtggggcaggtctgtgacctggggtcagactcttgctggggggtcaggtctgcaccctggggtcaggtccgtgctgggggtcaggtccgtgctgggggtcaggtctgtgctgggtgtcagatccgtgctgggggtcaggtccgcgccctggggtcaggtctgtgctgggggtcaggtccgtgctgggggtcaggtctgtgctgggggtcagatccgtgctgggggtcaggtccgcgccctggcgtcaggtgcgtgctgggggttaggtccacacctgggggtcaggtccgtgctgggggtcaggtctgtcctgggggtcaggtctgcgccctggggtcaggtccgtgctgggggtcaggtccgtgctgggggtcaggtccaagctcggggatcaggtccgtgctgggggtcaggtccgtgctgggggtcaggtccacgccctggggtcaggtccgtgctgggggtcaggtccgagctcggggatcaggtccgtgctgggggtcaggtccgcgccctggggtcaggtccatgctgggggtcaggtccgtgctgagggtcaggtctgtgctgggggtgaggtccatgctgggggtcaggtccgcgccctggggtcaggtccgtgctgggggtcaggtccgtgctgggggtcaggtcc

SEQ ID NO: 29443 - DNA, 1031 bp, Artificial sequence
  DNA replication origin
gatgaatgtatttgggcccacatgtgaagagggtggactttaaggtggcagatctgaagtcatttggcagataactcagcatgacaggcataagccagcacctaaagaggacagagggtgtgggtgtgcaccagtcctggtgtcaaacccgcgattttccagcggtggtaccagaggtagatcttataacctctgtgggcctcagcttctcatctaccaaatgggaacagtgattctacctatgcctatgagggtttttgtaagaaataaataagtgaatgtagacaaagtgcataagattaaatgtgcatggtaagtgctcagtacatgttagttgctactatttctagaaatatgatgctgatagtgataatgatggtgagggtgatgataatggtgatgatgatggtgatgatgataatggtggtgatgatggttgtggtggtggaggtggtgatgatggcagtgatgatggtgagggtgatgataatggatcacgatggtggtggtggtgatggtgatggtggtggtgatgatggtggtggtggtggtgatggtggtggtggtgatggtgatgatggtggtggtgatgatgatggtggtggtggtgatggtggtggtgatggtgatgatggtggtggtggtgatggtggtggtgatggtgatgatggtggtggtagtggtggtgatgatgatggtcatggtggtggtaatggtggtggtagtggtggtggtgataatgatggtcgtggtggtgatggtgatggtggtggtggtggtgatggtggtggtggtggtggtggtgatggtgatggtgatggtggtggtgatggtgatggtggtggtggtgatgatggtggtggtggtggtgatggtggtggtaatggtgatggtggtggtggtgatggtggttgtggtgatggtgatggtggtggtggtgatggtaatggtggtggtagtgatggtgatgaggtggtggtggtgatggtgatggtggtgatgatgatggatgatggtggataatggtggtg

SEQ ID NO: 29444 - DNA, 1308 bp, Artificial sequence
  DNA replication origin
cgcctaggccgagagtaaaggagtaagaggaagtagctgttccccgaagcccagctgtggcccggggagtggccccggaggcttcctgggggaggtatcccagcagaaagccatggctgtgggcagcaagggtgccaggggcgaaactcgaagcctgggcgaggatagggactagagaccaggggaaggggctttctagtatggagactggcggctggggctcaagctggggacaggcaagaggtccccatacctgagggggtgctcagagctcagaggctggagggtgagtggctgttaagatgcaccgtcaaccccaacataacaatgaaaatttatggaaactgggacccgtgtccttctgggagcagggccattttagaacttgggaagagggaaggggtggaagtgccccacgaggcccccgccgcccccaggctgccctggcatctctaggtgacgcggggcagagcctgcgctgtgcagagcaccacaggacacactcacagtgccgggccttggacgcctgtcaagttaagccccaccccccactcttccacatccctgatggccaccaagcctccctcaggtggacgtcaccatgccagggccacccactgtcccccatcccccacctgctcaccgaatggccatgatgaccctcgggatggcctggaggagggtcaggaggccgaggggcagcagacgcgctgcaggagccggtagctggtcctggtagggggcctggagctgctggaacttggacaacaggcactcatcaccgcagatccgccagcagttgtgccagcagcatgcatccagcaggggtgctaggcaaagaaaaggtgggttgaggacagggcgtgttctccgggactctgtgagccacgaggaggctgcaacaccagccccagagcctccgggaaatggggacttccaggacccagccacagccccggggtggggacactgacccggagctcacgagataaaggccgtcttgcgggtttatgatatcctgggtaacggcagccttggggctgtttttcaagaggcttgctcttttagaacagcatatggaacatgtgcaatgtctagctgggacttgtttccaaatcctcttttttggagcgggagtgggtggtgaagatcagaggaaccacactggataatgactggagccgagtgatgggcacgtggggctgatttaagccaatctccacttcggggtatatttgaaattttccataacaaaagtttaaggaaagccacaagcacggatggaattccaacgtttccatttccttg

SEQ ID NO: 29445 - DNA, 1354 bp, Artificial sequence
  DNA replication origin
aagtcagtaggagggctggtgccagctcgctcagccagaggtggatctgggctggagcccacacagtggtactgctgctgctgctggcctgagccctgctgactgccacctgctccacagggcgaccccaacatccccgctgggcagcagacagtggagatcgacctgaggcatcggatccagctgcccgacctcgagaaccagcgcaacttcaatgagctctcccgcatcgtcctggaggtgcgcgagagggtgcgccaggagcagcaggaaggcgggcacgaggcgggcgagggtcgtggccggcagggcccccgggagtcccagccaagccctgcccagcccagggcagaggcgcccagcaagggcccagatgggacacctggtgaggatggtggcgagcctggggatgccgtagctgcggccgagcagcctgcccagtgtgggcaggggcagccgttcgtgctgcccgtgggcgtgagctccaggaatgaggactacccccgaacctgcaggatgtggtaaggatgcggcgggtactggggcctgaaggtgggacagcatgggcttcagcgagggccccagccccacacctagcacaggcggagagggcctgtgacctcacagagggcggcagccggtgctttgggacaggagtgcggcctctgaccccttgggccatgttccccagcacctgagcaagcggccgcgcagctgggtcccgtcttggaggctcctgtccttccaccccttctggggtacctcagagctgcaggggcatgaggcttccagatgcctcacatccctgcaatagtgccgctcccccaggggcttctaaagctacttgtttgcagtcaatcaagtgaaatatcatgtaaactgtccagcagctttgaaagtagagaatgaacaaggccccttccccacccaccctgtggaaagcccgtctggtttggtgtcctcctggacagcgtcttgccggtcacctttggccatctcccggtgcgtggttcagatgtgggtcctgctttcctgccccctccctcctctgtgcctgcctgcctctgctgtgccgggccagtgccttggtggccagtggagtggacaccagctgcgactgcgtgggaggggctggcattgccgctgccactgcagggcttgggcggctgacatgggacgaggcttgcacagctgccagctcctgtctcgctgactttttttatacagttttgtctgggccaccgccttcagtgccacgggccccttgccgttcaggctgctcctcatagatgaacaaggccctgccccgtgtccttaccctttagagctgtttaaattcaaatgaactgaaact

SEQ ID NO: 29446 - DNA, 2387 bp, Artificial sequence
  DNA replication origin
atctccactgtctgctgcccagcggggatgttggggtcgccctgtggagcaggtggcagtcagcagggctcaggccagcagcagcagcagtaccactgtgtgggctccagcccagatccacctctggctgagcgagctggcaccagccctcctactgacttagcaacgtcccttacagaagaagaagtctcagaatcccttagaaagtggcagggccagcaacacctatgagtgcccctgaggacggtggctcatacctgctcaactgcgcccagagaagttcaaagaacatcccagagctgggcagcagcccaagggggcagcccacatctgtctgcctgaaaggcagagctcgggagccgagccctgggaagatgcgtcagccccaaaactccgtgaggagtccaggagccaaaactctggggtccagggaatgccccattatgccagatgtggccctgatccctggaggctcggggaataggcttcgccccttcaggcgctgtctgccaggatccccaataaccattcagggcaggcgggcagcatgtgccaggagccctggcatgggacaatgagcccctgttcactgctgggctcaccacacagcccaccctcaggccactccaaggagaggagctgctgaagctcagacagggtgggagctgtctgcaagcacaagggtctccatgcagctgctggaggggcccctttcccaggctgtccccagttaaatctgagcctctgtgtggggtctgctgtccagacttcctaaaccccacagggctgccagggtggccggggctgagcggtgctgtgggaaggccaccttggaagcacacagactccctgagggtctcgtggaaatgcaattctggttcagtggggctggctggggcccgagaatctgctttcccaagctcccggggctgcaggtgcaagcccactctgaggagcaagggtgccggggatcagtgtctgcccaagttccctgactccacagcccacttgggccaggtgcccccagagccccaccaaccaggtcagccgccactcaccgtgatcttggtgcccctggcacgccggccgtggaagctgagcatcacaatctccaggccgtggctgccataggtacctttgaagaggccaggcttgatgaggtcgtcggggcggctgggcggcaggtagatgcggcggtaggtcaggcagttgctgtggggagcggacgggtcagtacaggagacctcgtggggcaggcaggactgagaacgcccaaggtgccagggatgagctttgcagggcggggtagggcgggcagctcagctcaaccagggccaggtgtccaccaggcctgtgggcagcaatgcgcccaggggagccctcacccccaccacccaccagcacgcacgcttccaacaggacttctggggttaaggggggcatcagcgccagggcagagctttaggtgggagggaaaaggaagtgccagtttgctccattacccaggagaaaggagcccaagtcaccatggaggggatccccgcactgggctgagcggggctgagctctagagtgccagtgttggcaggggtgacaggaaatcagataaaaacagacacccgggtgaaggatggggtctggggctgtgccacagcagctacagggaggcctgcactcccagcacccacagagagaggggctgtgttccaagtacccacagaaagagcgaactatgctccaagcacccagagagagaggggctgtactcccagcccccagcaggagagagggctgaaccccagcacccactgagacaaaggactatgccccagcacccaccgggacagggctggtccccagcacacaccaggagagggctaccccagcaccgagcaggagccgcactcactcgtactgactggtgtagatgaacttcatcaggatgagctcctgcatgtgctcgtggaagatgtcctccagcgtgcgcccccattcctccctcagccacgtccgaaactccttccaaaagaacacaggtcatgaatatccatatgacaggaggctgtgaagaggctgccggctgtgccgctgagaggacacagtgtgtccttctttgtcagtgcacaggcacctgcagggccctcttggtgggggaggatggacttggcgctgggaagagaaaggggagctgccggatttgaccccacgtcagaggtgcctgccaacaaaaagtgaaggttccgggcccttggtctgctgggtcggaggcagcaggggctacagggagcccaggtgaggcgggggccacagccatgaccagaactcagggtgggcctcccttccatgcccaccggtggggcaggaacagcatctacacagactctggc

SEQ ID NO: 29447 - DNA, 1066 bp, Artificial sequence
  DNA replication origin
agtcctgggtacttgatcatggctggagatggaagtctggctttcttttttattaaattcccgtttttcggtgaagttttccttctctttgttaatctttttgggtacagtagtgaaagtttctttcgagtctagcccccgccttttctcctgatctccaggcgtgttggatgccccccacccctcactgtgcgcctgggcacttgctgggtgccgtggcctggtctcctcaagaggccctggccccggcctgcgggcaaagtggagtcagggcacctgctctgcgcaggcccggggtatgcgcgcgtctcaggcttggggaagcgtcccgttctcattccgggtctctctccttcccaggacacaaccctctgtagggcccagccggaggccgtccgtgactctatccccaggccctgattcctccttttctcttcctggctttgtgagtcacgcttcgcttggccccttctcctctcagcagccactctgcttccctcctccacctcccacccctcactcaggattccgcaggtgcctcgtgcaactgcctgtgtgcagcatggggctgtgttctctggttgccatctttggcgtttggcggcggtagtcctggctcctgtgtagacctggtctccgtgtgtgcctctccagcctgcaggtgccagacatgggccttcctccccagccagtggtcagtggcctcaggaaggggggagaaggccctgcccctcgcctctcagcctgtcccttctcttcagggccttgggtcctcgtcactgggctaccttcattgctctctgatgtgttcagtctttttttctttttcttgttttctttctcctggaattaggagagagtgttcagtcttcgtggctggtctcagcaggagggcaggtttgatatgagctctggggccagggccaggagcagatgtctgcttgtagttttagtttctgtgtttctcggtcacctgccaatttatgttgaaaagtagctgctcattcaacacagtgaagttgtctgacttttcttggtatttgcaggtgtccctgtggggtgagga

SEQ ID NO: 29448 - DNA, 1616 bp, Artificial sequence
  DNA replication origin
ccgcgctggagcgtgcgcacaggcggcagcagtggccgtcactgggcggcatggcggtgtgtgctcgcctttgcggcgtgggcccgtcgcgcggatgtcggcgccgccagcagcgccggggcccggccgagacggcggcggccgacagcgagccggacacagaccccgaggaggagcgcatcgaggctagcgccggggtcgggggcggcttgtgcgcgggcccctcgccgccgcccccgcgctgctcgctgctggagctgccgcccgagctgctggtggagatcttcgcgtcgctgccgggcacggacctacccagcttggcccaggtctgcacgaagttccggcgcatcctccacaccgacaccatctggaggaggcgttgccgtgagggtgagcgcgcgggggtggcggggccgggaggggcggggggtccctgccaggtggaggcctcggagctgggagtggcgggggcggtggccccggccgggggccaccagttgggcgcggggcccggcgatgtggtgttttgggtgtgggtggggagcggccgcggtgacaccacgttgagggggccagggaggtatttgaggcggttagggagggtccgaggggtccaagagaggcagacggggtagggaggggttgagggcgtcagggaggcatcgaagaggccctgacgcggggcacgggacaccacggggccgaggccgtgccgggagctggggctgggatccctcgaggtctgcgcggggcctaagctgacgcctgggggccgcctcctctgcccctgtcttgaaggcgagccgagggtgccccgctggccctgaccagagacgaggtgaacttgaagaaatgggagcaggccgggcgcggtttcacgcctgtaatctcagcacttagggaggccgaggcgggcgggtcacctgaggtcaggagttcgagaccagcctggtgaagatggtaaaaccccgtctctacttacaaaaatacaaaaattagccgggcgtggtagcgggcgcctgtaatcccagctactcgggagggtgaggcagaagaatggcttgaacccgggaggcggaggttgcactgagccaacatctgggccattgcactccaccctaggcgacagagtgcgacttggtctcaaacaacagcaacaaaaaaaattacgggagtaggggaagcccagtgtcgggggctcctgatggtgggggcgtagagagacggatggatcacagcggtgcgggctggacttttgccttcagcaatattggatgtaacagatcacaggaggagatgtttatttaatctggagttcaaggctctctctgtttaaaggttgacagctctttgatgttcaagcagctcatatttaggtaaaaaggacaggttagaaaacatccaagcgatgcagaacagcaaaaggaacaaagtaaataccatcagagaccccagcagtcaaaaataaaccactcttaacattttaaaaaacctctgagtcgtgtgtaccttcttccctaaaggatataatgcaatatatattctcttagagacagtgtagtgtaaacaatgctacatagtatttcactccctgcatgtagcacagactcgtccct

SEQ ID NO: 29449 - DNA, 1094 bp, Artificial sequence
  DNA replication origin
tcgcgcccgtgcgtcccgcttccggcgcccgaaactgtgccgcgccggccggtgagtagaaagatgcgccttacagcctccaaatacagaggcagcagccagaaccccaaagggcgcctagaagcccttttgtccattgaaacaacgcgcgttccatcgtctccgccttatggtaaccaaaaggcccgagctgcggagctctgcagggaccttcggggatcccgagctccctgcggaagccccggggagggcttggaggggcggcggccggcgcggcccaagagatccggggatgcgcgcccggtctggaaagggaggccctgccatgcggcgccgcccaaagggcgcctgttcctgcagctgctgggagccgcgcacgcctgctccagctgggctccgccgaggccgctgagcggggtcgtctcccaggtccgcgggtggtgaccgcgaaggcgtcctctcacctgagcagccgcgcacgtcgccgtgggctcgcctcggaccccatctcttggaggcccaggcgggagtatcaatcgaggccaggagctcgagaccggcctgggcaatacagcgagaccctgtctacaaaacaaaattttagaaagagaagctgagacgggaggatcgcttgatcccaggaggccgaggctgtagtgacccgtgatggtgccactgcacttcagcctgggcaacacagcgtgaccctgtctccaaaacaaacaaaaaacaaaaatagccacaaatggctgggcgcggtggctcacgtctgtaatcccagcactttgggaggcggagaagggtgcatcacctgaggtcaggagtttgagacccgcctgaccaacatggtgaaaccctgtctcttcaaacaaacaaacaaacaaaccacacaggccaggcgcagtggctcacgcctgtaattctagcactttgggaggccgaggcgggtagatcggttaagcccaggagtcggagaccagcctacccacatagtgagacgcccccatctctacaaataatttaaaaaattaggccgggcgcggtggctcacgcctgtaatcccagcactttgggaggccgaggcgggcagatca

SEQ ID NO: 29450 - DNA, 1030 bp, Artificial sequence
  DNA replication origin
ggccagagccggccggggccgccgccatgacgggcgtggcggaacccagcagcggcacgcagcgtgggggcggagcaggtgtgtgcgcgtgcgcgatgggcgaaacgcgcgctctgcgcatgctcccggtcgtgccccagccccgcccagcaccgctgggcgcctgaggcccctgaggtgacggttgtgggctgggccgcaccccgggtctgtgggcgctcgggagcctgctgcccggccctgaggagatggcagcgcggggcgggggaggctgagccacaggcggggtgtcccggggcactcttgagggaggggtcagaggaagggacatggggcaaatccgaccatcctttcccctccagagagacttggtggtgctgcccgagacgccggcacccggggctgaggcgcgcagggcaggccgcgccgtctccgggaggcagggtcgccgctcgcccgtggagccctggccccctctgcgtgcaggggcgcgcgtggtccgtgggtggcttccggggagtggccgctggtgacctccgcccgcggtcactcgacgcccagccttggcgcgtttgcgcaactgcttttgtcccgagccttcattctgggcgcagtcccctctcccagtccccctgccgcggcgcctggaactctcctggtggctgtaagattttcctaccgttaggtcgtctgtggcgactgccaggcctgccccacatcgctagccgccctgtctacccctcagcctcccagccactaaactcgctggacaaccttacgctagtgacagtttttgagtctcagactcatctgtgaaagggcagtcatatttgaggactccaaatgggctgcagtgcgtaaaccaccatgcgatatttggttgctattgcccacctcagcctgtggccaatgtgtctctgtaggaacagcactagattctttggggtttttttgagacagggtcttgctctgttgcccagcctggaatgcagtggcacgatcatagctcgcggcggcctcggtcgcctgg

SEQ ID NO: 29451 - DNA, 1355 bp, Artificial sequence
  DNA replication origin
gtcgccgcgagggcggcgggtgcggcggggccggggtccgagctgtggagggcggcagggcctgggacgccgtgaggggtcggggccgagccgggaggccgagcggggccggtggctgccggccggcggggccgagggatgcggggcccggggccccgtgagggacccaggccgggaccgagccgggagggccaggggctggtctgggccggggcggcctgcggacctctcggaggcctgggaggaggcagccggcggagggcgggcgggggccggtgcgctcggggccccgggcctgctgaatcaccccgcgccctccgcggcggggtgcctgccgtaccccggccaccgccgcccccgcaagcgcgctgcgggcgagggtcgcgcttctggggcccaacagcccccggggccgcgctgggccgttcggctctgaagcggggctgcgccgggacccagcgcgtcaccttcagggctggttttcccgtcgagggagcccgcccgggtgcgagtgcctcttacagacctcagtgcctcggtcgagaggaggggaatgtgctgggccccggcctcgccgcgcccgggacggcccacagcggtgttgccagttcctgtctgtagcccaggagctggggtgggagacttctcttgggtttgcgattacgttctcaccttggcaccaggaataccgaatacatcccttttctgccggttcagactggaaacccagcttaggtgtgctggcatttggttaaacgtgcaggtgtcaccatcacaatatttactccacgcagatgatgcgaagtgattatttcccgcttgagcaagagaacgccgcagatccaggtatctgttgttgcctaagttccagacaccggtttggaagggaagcaccgtgttcatcgcggtggactgcgaatgcctgccgccatcctcgtcaggagcccacacagtggtgctgtttgtctgcttttgcctagtttcccggagtctagaaagagtttagcattcatttgagtttggatatagttttgcaggtctcattgaccattattttttttcttatgcctgagaaacttaagcaaattaaaatggaccttagcttgccaagcatatcttttcagacagcctcttgaggcagtccgttggttagcaagacttacacgtgccttttttgttagtagttttcttgttagtcaccttaatgaactctttactgtagtgtctaggcttattgagccctgagagcagcattaaagacagattttcttttcttttttattttgagacagggtctcactctgtcacctgggctggagtgcagtggtgcaatcacagcccactgcagcctcgac

SEQ ID NO: 29452 - DNA, 1662 bp, Artificial sequence
  DNA replication origin
tcagttctgaaacacttagacaaaagttcacatcgctaagtggatggccaggacgcccttccggttcaatttggagaccggagatctttaacctaacctaacattccttaaggcatcggtgccctcccactcaaagtcagcctgggttttgtttctaagggtcgccaataaataggtttcacgggcatttaaggctctgggagtctttttctgtctgttacaggtagcccggctcttaaaaacgatcacacacaacgttcacaagcatgtgcacattcatacacacgtgtgcacatatacatgcccacatgcgacacacgcgtacatcatacagcatgcacgtgtccataaatgagctcacacggacagccatgtcccgcgcccaggcccccagcgacacaggccccaagcagggcctccacctgtgtggagggagcggctcagacggggaagccccagcgccttgcaatgttcacctcaccggcggcttctggcgtggccacggctccttccttttctggtaataaataccagatttggggaaaccaaggcgccgcaatgtgtgttatctgtcacccaagggccccattaaggggacaaaggccttatcgcgtttgcagccggctaagtgaaaggagggcacctgggactgtgagctctgaccgcggacgtctcccgcaccgctcccgcggatcctcggacccagggcccctgcagccgctcctgcccaaggggcgcgaggcggaggtgtggaggctttggggcacgcagaggggactgagggtgtgggctcagggccgcggtgcggtcttggggcttaaagtgcagacttagggtgaggagtgcgggcttaggatgggggcttgggatgtacggcggaggcttgggatgtacggcggaggcttgggatgtacggtggaggcttggagaggtggggcacacatttggggtgcgacatagaggcttaggatggggcttgggatacgggctgggggctcgtggtgcaggttggagacctgggtgggagctctcagtgcaggctggaggcgtgggtcggggggtcgcggtgcaggctggaggcttggagtgcagagttggggatgcagacttggggtacagggcagagctcggggcgggcacgcaccttgtggcaggctgggcaagtgggcagcgcgccgcccggcccgggcgcgcccttgccgccgtggcccccgccgccgttcaggctgctctggatctgcgtgagctcctggcgcagcacctgcttctggtggaagctgaaggccgggtggttggaggccatggtgaacagcagcaggaactcatcgcccgtgcggccctcgttaagctgcagcccgtagttgtggatgatggagtcgatgtgcgtgagcgtgcggtagagcacgcccgccgcctcgcgctgctccgagcccagcagcgccagcgacaccagcagcttgctgcgcaccacctcgtccgtcaggttggtgaggctgcccaggtcggccgggttgttggccttgatctccgagtcgcgcagcgagtggtagtccttgcgggccaggtcctccaggcacgagccgaggaagcgaagctcgagcgggatgcacaggtccagcaggccgcacaggaactccacgcgctgcggcgacggcagctccg

SEQ ID NO: 29453 - DNA, 1554 bp, Artificial sequence
  DNA replication origin
cggcggcggcggcggctgctcctcgtcgtcgtcgtcgtcgtcgcccgggaggcggccgcccccatctccccccgcgccgcagggtctgtcactgcgggccgccccccgacggagccgccccggccatgccgtcgccgccgcccgcgcctccgcccaggccggccgttaccccgggccgcgggcgcggcgtcgccgcctggggagcgctgggggccgcggccgcgaaacggacgctggagggggagggacgcgcggcgggaggcgcggagggatccggccgggacttgccggccttgctgctcccgcgcggcggacggatccgggcccgagcgcggcggcggcggcgacggcgacggcgacggcgacggcgacggcggaggaggcgccggccgaggagcggagggatcgtcgcgctcgcggctgacgggcggccgggatcagcagaagtgggcggggtggccgcctctcgcgacagcccgggcctgccgggcccgtcccccccccactgattggctcaggcggcccgttctcggcccgtgattgtgccgggtccccaatcccattcgcccgttccgcggccacgcctccctgggggctgtcgatcatgttggggccaccgcctcccgtccctcggcggccgtcaagacgcgattggtccgcggaatcggagaggcggaaaacccgggctggatttctggttgcttttgttcccgcaaatttgcgtggagcattgtttttcggcgaaaacggggcgttcggccttcctgctttatttttgagcggtgtaagagggaggtagtgggtatcttcgagaaacggccgccgcggggtccggagccccgggttccaatcccgggtcggccactgcaaagctgtgtgaccttgggcgagtcacttggcctctctgagccccaggcgcctccccgggaaaaagagggtaataataaccgcccccgaggtttgtgcgaaggtgttgagctcacagagggccggcaccggcacttttgaggcggctgacttgccctgggggtgtgatgggaggtgcaagctttctccaaaagcctcgtccaaatggagcctttaaatccgccttctttccgcggctacttcaccagctcgccaaacgcagaaaatgcaaacacaggggagggggcaagggagctgacctggctggaagtaaacagaaacgccaccctcccctggcacttgcattggcaccggattgcaggtgggggaagggccggtgcacccaaccacctttaaatcccaccacttacacacaggcatagaagtagagccgcgggggctggacgctcattcctcccctgcccttcccctagagcgctgctttgaatgtctgttgatctagaacggggtctgttcattcatgggttccaggtcccaagcgcccgggggcagctgagagcaaagctggcgccctccctaccctgtggagcttacactctggttctgggcagtgcacactagagattggttaaatcaatgaatgaactttttcaggatatggtccaaggtgctgaaaacttcctaaca

SEQ ID NO: 29454 - DNA, 1072 bp, Artificial sequence
  DNA replication origin
tgtggaaaaccagaatctcggggccaggacccagagaatgctggagggcccgggaggtcagcgtctgccctctccttatgagggaggccccctccttcaggcagcctgcctgcttcagagtggggagtccaggttgtcagttctgtagggtcgatggacctggtctcatttgcctctgaggcccccaagcccttcctgaggcctggtcctgtagggcagggatttcatatttgttgtgaactggattgagctgagccacaccgatgtctggggggatatgacattgtttcggtttccctggctgccctacaagtaaccacaacacgcgtgagtgagggaggggtggggagatgggggtaggggaggggtggggggggggtgggagatggggatgggggaggggtgggagatgggggtgggagagggtcggggggtgggggagggtgggggttgggggttgaaaacaatagcaacttaccctctcacagttctggaggccaggagtccaaagtcaaggtgtgggcatggctctgttccctctggaggctctaggggagggtcctccctgtctcttgcagcctctggtaggcccaggcactccttggctccaatctctgccattcttgcacatagtctcctttcccccgaagtctctatgtgttcttttctgtatcttgtaaggacagtctcattgcatgtagggctcaccttaattcagtgtgattttatcttgactcttaccttaattatatctgcaaagactcttttcccaaataaggtcacattctgagatttggggtagagataaactttggggggacatgattcaacctactaagccattaaatcacaaagagcacgcaagaaggaccaaaaaggcagcgggaagtggggaggaccttgatccaaggacttccacagctcaggcctcccttgttccagccagcaagggctttccatgagcacctttgacttccactgctagccaggatgacgggttcctggctgtcttctacagatgaggaaactgaggctcagaggcctctgaatgcatagccaagttcacacagtc

SEQ ID NO: 29455 - DNA, 790 bp, Artificial sequence
  DNA replication origin
acacacaccccccaacttcaggctgtccttagattctcctccatagaggggtctccagaaaccaggggcccgggaggagttcagagggtcctgttagttcttgccctaggatatctcagcctggagcggcagggtgggagtagggagaggcaagaaggaggcaggacttggccaccttaatttctagaagtaaaattaagtttctgaaatatgaaagcctgattaatgatttgcatgtggaagtatttagggggaaatgtatgtattctgaaacccatcgaaaaatagaatggatgggtagatggagtaatgggtggatgggtggatgagtagatgaatagatggatgggtgaatgaatgcgtgggtgggtaggtggatgggtgaatggatggatgagtagatggatggatgggtgaatgatgggcaggtgaataggtgaatggatggatggatggatggatgaattgatgggtgggtgggtggaggaatgggtggatggatgggtagatggatgaatggatggataactggatggatgggtgaatggatggatgggtgaatggatgaattgatgagtgggtgggtggaggaatgggtggatggctggctggctggctggatggatggataggtggatggatggacggatggatgaatgggtgagtgaatggtctaatggttggatgggtgggtgaataaatgcacagatatgtgatcaagcaaatatggaatattttttcttgttgtatgatgaagcctatgtcacagataaggaaacaagggccagaa

SEQ ID NO: 29456 - DNA, 1758 bp, Artificial sequence
  DNA replication origin
aacatctggattagaggaaacctacggtcccttggaccttgaaattccagggttgatcctgctccccagggcacctccctcctcagtcccctctgttcatggtcctgtagcctttccattgccatggaaactggaatcgtctttgcctctttttcttcttttgcccaccccatttacgcattctttcaactaacaaaaccccatgtgctgggcccaggggacatggatgcaaacagcccctgtctcctcttctggggcgagagtaacaatggtctgacttccctaagcggtttgaggattaagtgagacggacaatgccaggaaacgtgccaagcaaaatgcgagcgtgcggtggacgtcgtcagctcttagaattctaagctctgcagaggaggggggcgccgggcaatagaagaggcctgccgttggaagcagggtctgcagggtagaggcgccctgggcagcagggcgcagcaggggcggggttggaagcagcatgtgtgtagtcacagaaaagccagggaggcaagtatcccaaagccccagaaccagtcttggggcttggtcctcaccccaggggcgcaatgcccctggagggttttaagaagagtgagtggcatggatggggagtgagaagggggcaggagtggggacgaaaagactagcaggcaggcagtttcagcagcccgggaactaggccgtgggggctggacccagtgagggagaaagagcctgggggcggagccagggttttggaggaggagccagacctcccggggtggggccatgactgggggaggagccatatctcctgggggtggaacgaggtctcctgggggtggagccaggcttcctagggtggagctaggcctgggggcggagccaggctcctgcagagaacccacgtcccctggggttggggccataactgaggggagaatccagatttccctgaggtggaactaggtctcctggggatggggccaagcctggagcagcagccagacctcaaggggtggggccaggcctcctggggtggtgctttgcttggggatgaggccatgactgtgggaggaaccagatctccttggggtggaaccccgtctcctaggggtggggctaggaccggagtaggtgccaggatcttggggctggagctaggcctggaggagaagccagacctcaaggggcagggctaggcctttgggtggggccaggactcctggaggtggggccatgcttgagggaggagccagttgtcccttgggcagggccaagtaggggtggggccaggcctttgggagctaagggaggtccagagggtggggccaatcctggggtgggtctacgcttgggaagggccgagcccagccctggttggagaaggaaatcagaagggacgcctccttgctggccttctggctgagcctcagagcctggttttcacagggcgccttcatctttcgtcaacatctgtccaaatagtacctttaaaaatcattgccaaagcgtttgctcctaaggattggaaacgaccatcggcaggggacgggttaaaccgattaaggtgactgacaccgcgcagtgatgcgcagccagtgtaacggccctgtggaggacatctaggtgcatcgtctggtagaaggtacgagggcagacagcatggtctgcatgctctatgccaccatttgggctcaaaagcaaaacaacatacaatcatgtggttatctactcatccagaatttctggaaagacccc

SEQ ID NO: 29457 - DNA, 1436 bp, Artificial sequence
  DNA replication origin
gggctgctcctggggcgaaaaatcccagcacttccagcctaccgtgtgccccggactctggcgtgaccctcgctcctagattcatgggctctctggcgacatctctgcacacctgttggccacacgtggtcctctattcacacatgagcagatactcagtgcaggcgttcacgtgccaggccagggttcaggggagcgaggcacacatccctgcctgcaggaggcttacccccttcatccagaaggttccacaaagccaagtagaatgggaaagtgtggggggggggatgtgaaggaggtggacaaaggccagacagcagtgagctctgagggatgggtaagaattgggtgtggggggtggttcctcaaaagtatatggagaatcatcctatgacctagcaattctgcttctaggtgtctactcaagagaattcaaacaggcgctcagacagatacctgcgcacccgcgttcacagcagcattacccacaacagccagaggctggacactaccaagggtctgttatggttgaagagataaacacagtgtgtatacagtggggtgttattcagccacggaaaggaaagaagctctgagtcacaccgcaacatgccctggaaactgtgatccaatcataaaatatgataacatattgtgattccatttatgtgaaatgtctgcaataggcaaatccataaacacataaagttcatgagtgatcgccaggggcttggggcaggggtcaggaggggaagggggagtggctgctaacggggacggggtgttttggggtgatgttttggggtgatgggaatgctctggtgccagatggacggtgctgctggttgcaacaactctgtgaacgtaccaaatgccactgtaccgttcaggttaaaataggcagggcatggtggcgcgtgcctgtagtcccagctactcgggaggccaaggcaggaggatcactcgagcccaggaggtcgggagctgcagtgagctgtgatcacactgcactccagcctgggcaacagagtgagatgtcatctctaaaattaaaaaataaaaccaaataagtaaaataaaatggttaaaatgacacattttgttatgtgaattttgcctaaatagagttagcagggagcaggggggattccaggctgagggatcagcatcactagggcccaggggacagaggcgctgctcagcgtggtacccaaggcagcagcaaggccttgtacagaaagcgaggggatgggtgcaagagggagcctcctggccagtccccgagcttgcctggaccatgacctgagagcaggagggggtgcaagagggagcttcctggacaatccccgagctcgcctgcaccgtgacctgagatctggcacgccctaggcactggctgcttcatctcctgggatctctgtcatctggaggtaggt

SEQ ID NO: 29458 - DNA, 1030 bp, Artificial sequence
  DNA replication origin
aattaaaaaataaaaccaaataagtaaaataaaatggttaaaatgacacattttgttatgtgaattttgcctaaatagagttagcagggagcaggggggattccaggctgagggatcagcatcactagggcccaggggacagaggcgctgctcagcgtggtacccaaggcagcagcaaggccttgtacagaaagcgaggggatgggtgcaagagggagcctcctggccagtccccgagcttgcctggaccatgacctgagagcaggagggggtgcaagagggagcttcctggacaatccccgagctcgcctgcaccgtgacctgagatctggcacgccctaggcactggctgcttcatctcctgggatctctgtcatctggaggtaggtagatgactgatcccacttcacagatgaggggagtgaggcctgaggctcagggagaagggtggggtgggcagggatgggaaacccaggtctgtctgactcccaagcccctcagcactggcggggagtcccaaacccctcctgtggcgaaggctgctgggtttggtgtcagcaagttagactcaggaagaaagctccactgagggctggcttcctgcaaaccggggctggctctgtgcggattctagagtcaaggcagcgagggaattggcagaggatgggggagagagggcagctggcccgggagagagagggaaattgcgagagggaggcgctcactatccccacatccctgtgcacatggacatgctgggggtcggtcctggcacgggcacagctcagcacactgtgacggggtccacgttggtggctgtggcctcaggcccagggtgtgtgttgtcacatgccctctgaggccaggacaggatggggaagagacgtctagaggctgtgggtggtagaacctgctgggcccaagttcatctgtgtcccctcgcctggcctccttgtgctgaacgcgtgcatctgttattggctgatgcctaacatacccccagcctcgggggcttaagacaacacacgtt

SEQ ID NO: 29459 - DNA, 1505 bp, Artificial sequence
  DNA replication origin
tgtttatttcaacaggcagagggctgggtgtctccatgcaggaatccatgaccctccctggggggctggcttccaataacattacttcccacttcccgagcgcttactgagtgctgggcgcctagcttttgaattcccacggtaaccctatgggaactctgccatctccattttacagatgagaaaactgagctcagggacattaggtgactgcccaaagccatactgctggtgggccccggagccaaggtttcgacccgaatctcttgaggacaaggtgcagttcctttggcccacacatttacaacagagaaatttccatggacatgaaacagcccagagatattatttcatacccatttagatgaacaaagtaaaataaatggaaagaaaatcagaagtttgaggacaccagtgctggccaggaaatagagaaccacaaacccaggcacactgaagggtgagaggtcagttgctccaggtgtttggaaagcaatttggcagcttccaataaagtccaagacgtagctggtccaatgatgccaccgcagacatttagagaacttctgtagaggggcacagggagacagcgctagaaagctcaatgaatcactgtaactgcacaaaacaaaacaaagccgaccgccctaaatgttcctcattgacagtgggtgtatgaggaggtgactgtcctcctggctgctggtactctggggagggagctttggtgcccaaggcaagagactgaggttgaactctgggactcccaggaggggctgatttttctgagagccccgtgagccaagagtggggaccatcctgattctctcggacaggggaagatctgagcagggctcctggctgattggaggctccgaatcgcacctcttctcctgtcctaatctcaggctccaggcctggcttgcagtttctggctcaccgcgctgcggtcaccggcccacactcccaggagcgaggaccctgggcagcctccacacccccatcagcccactgcaccggtctgctgccatttcccgcacgcatttcaggagggctggggacgccggcttctgcctgaggatttatggtccaggaaatgcattttaaatggatcccaggatgctcggatccaagaatcagactctctcttgtgcgtgggaagaggggcggagggtgagagtatgtctggagagagacctagaaacgcccgaatggcggtcccactttgctccccaaaagcgcgaccgttccccgagtgggggggcgctacctgttggccagggcgcagggcgcacggaattcgggtgactttgctccaagatacacgcgtgtgtcccgactctcactcaatttataggggagagggactcgccaaatccctgttttctggggtaagcccccctccccccactcttggacccaagctgcccggaaggaagaaggaagcattgtttgtcaccggagaaaaccacctgtggtttgcaaagggcctcagtcgagtcagg

SEQ ID NO: 29460 - DNA, 928 bp, Artificial sequence
  DNA replication origin
gccccgcgcccggcccgcggcccccaatatggtgcagccgccagcgccgccgcccgtgccgccgccgccgcccgcgggccccgccgccgccctcgggcgcccgcagcgcggcagccgcaggtggggggccgcggcccgggcctgagctgccccccgcccggcctcggcgcggcgccctccccgcggggctgccggcgaggggccctctcgccgctgaggtggagccgcgggccccgccgccgccgctcctgccccctccctccctcctcccctccccctcccctccggtcctgtctccagcgggagcgcgagacgctggtcaggctccgcggcgcagctcgaaaaggaataatcgcccccgattgactgaaattcctccggagccggcgccgcggccgcccgcgcccgagaccgcgctccggggccgcgtcctcctctcctccggaaaacgctcgcgacccagggccgccggcggccgcgactctgctgtgtcgatcgcctgagtccgttttcaccgtttgcgggatctggaaccgagttacatgcatgtccagtgggggcaggtttaattttgacgacggagggtcctactgtggaggctgggaggacggcaaggcgcacggccatggcgtctgcaccggccccaagggccaaggcgaatacaccggctcgtggagccacggcttcgaggtgctgggcgtctacacctggcccagcggcaacacgtaccagggcacctgggcgcagggcaagcgccacggcatcggcctggagagcaaggggaagtgggtgtacaagggcgagtggacgcacggattcaaggggcgctacggggtgcgggagtgcgcgggcaacggggccaaatacgaagggacctggagcaacgggctgcaggacggctacgggaccgagacctactcggacggag

SEQ ID NO: 29461 - DNA, 1455 bp, Artificial sequence
  DNA replication origin
ctggagcaacgggctgcaggacggctacgggaccgagacctactcggacggaggtaggtgccgcgggccgggccgggccggggcgggagggacgtgcttccgatcgcgccccttctgtggatctctggggaagttgagctgcgtcctccggttgggccgtgggcaccaggggcctttcccgggcttccctggaagccacggcggctcctggctacaggttgccccgctgcctggtggggacagtgcccctgtgccagctgaagggtgttgggggctttccaggggcagagccaggcggggcccagcagagcctccgtgcgtcggacacagcaggccggagacctgcgggaagggccaggctgggcccgcggccctggggaacccagcaagggcagagggggctgggagaagggcccctccccttgttggctttgccccccaccctggaggccgcccttcgatcaggccccagcttcgcttctggtgttcctgcggcgcccgagggccttcctcagccccgaatctgcccaagccgagagaaagggagtgatggggagcgctaggggcgggggatgccaacccgaaccaaaacagccaggcagtacacttctaggtggttggacgcggactagcgctgtcgaagcaggctgctggagggaggagggaggcccatctgctcagtgagagcccaggaatctcgtctttcagtggctgcatcgttttcaccattagttgagggaatcgatctgtgccttcattctaagatgccaccgcattcggggcagagccggggccggaagccagggagctgcctgctgctgctgctgctgctgctgctgctgctgctgctgctgtaagatggtttctgtgcagggaaccttggccggctctgcagctgcccgcctgcctggactctccgatatccactcctcagtgcacctgacacgcatggagccggtcctttcctggaagccagaccccaaacaaactggcttccccgaccagtccactcccatgtgggagcttatcctcagaggcactgggtcctctgcctccctcgggcggctcgcctgtttcaggcatggatgcctgggaagggagtgagacgcagcaatgacttgtgcttctgccgagaataaaaatcctgagcgtacgtgtgctctagtcctccccgcccgctcgctgcctccgagtctcatgaagaaagctcggaacacctgctccacggccacatccaggagtggcagggggctggagagtaattattattttggcttatgcaactgaaaagcagggttcgttattacccgaagaggaggaggagtctggggcagttaattatataatgctcctgcctgtcaaagccgtgcccagccccggtctcaggcggccttttctgtgccgttgttgttttcatggagcaggttggagagcttccctgaccctggggcgctg

SEQ ID NO: 29462 - DNA, 1148 bp, Artificial sequence
  DNA replication origin
tggcagcctctgagctgttctccattccttcagtttcgtcgtttccaaaatgctctgtaaacggaaaagtacagttcgtcattttggggctggctttcgtcactcagcctcatttgctggagattcttaggtgttgcctatatcaatagttcgttccaggctgggctccgtggctcacgcctgtaatcccagcactttgagaggcctaggcgggtgggtcacctgaggtcaggagttcgagaccagcctggccaacatggtgaaaccccgtctttactaaaaatgtaaaattagccgggtgcggtggtgcgtacctgtaatcacagctactcggaggctgaggcaggagaatcacttgagcctgggaggcggaggttgcagtgagccgagattgcgccgttgcactccagcctgggtgacagagtgagactctgtctcaaaaaacaaacaaacaacaaaccaaaaaaccaaataaaatagtcctttctttcttattgctgggcggtgtcccacggtgtggatgggccgtttgtttaaccatctgtcccttgaagggcatctggggtgtctccagcgtgggatgtcgtgaatttaaaaagctgctgccaactctcaggtccaggttttcctgtgcacagatgtcttcgctttcccccagtggatgccaggagagctggtgctgggccgtgtggaagttgtatggctgagttcacgtggtcactctggtgctggcagggcagggaaatggggggccagagaggaagctgggggtcatgggagggatgccacctctagggaggggtgcctgtgtccaaggagtggagatagtggctgggtctggtgggggctgtggaggtaggggggctgcatggtagggcagaggccaggagtctgggactgggtggtcctgtctttgagggaatttggagaaggagcaggtgcaggtgcaggagctgagagtcacctgtgaaacatgctcagcagagaagctgtgcgcagccggggcaggggtgcgtccatggtggggatggtgtgtctgggtggaaggggcggggcatctcccactcccggtggcattgaatagtgcgaggggagtggctgggcgcggtggctcatgcctgtaatcccagcactttgggagactgagg

SEQ ID NO: 29463 - DNA, 1137 bp, Artificial sequence
  DNA replication origin
aaggggcggggcatctcccactcccggtggcattgaatagtgcgaggggagtggctgggcgcggtggctcatgcctgtaatcccagcactttgggagactgaggtgggcggatcacttgagttcaggagtttgagaccagcctgggcatcataacgaagccccgtctctacagaaaatacaaaaattagctggggcatggcagcctgcgcctgcagtcccagccactccggaggctgaggtgggagaatcacttcagcccgggaggtgcaggttgcagtgagttgagattgggccactgcactctagcctgggcgacataatgagacgctgtctcaaaaaaataaataaataaataataaaacttggaaataaggcaaaaaatattatttaaagaaaacagaaagtgggaggggagaaatgcacaggatggagcctaggggagccccaggactcgagaagtgggcagaggaagaggaggcaggaggagggagggaggccgggcagcagctgggggaggagggcgtggacaggccgggaaaaggagcaaaggcaggatgaggacacaacactggcctgtgcctggccttgtggcaaacacctcatcccttaggccattggccatcgtccctgctgtcctacagccccgagaggccaggtacgtccatgtgtcgtgcccattttacagacggtggagctcaggcctgggagacagactgacagtgttcggcactaactccaccccagcctttttccacctggccacactgtttactcgttcccgccagcagcatgggggctctggtgtttctgcgtcctcatccgcacctgtcatcgcctgtctttttggttgcagccacttctgggatggatttcctggaggctggtgctgagtctctctaggtgcttgtcggcccattggtacatctttggagcaatgcctgttcagatccttgcccatttaaaaattgggttatttcaggccgggcgcagtgctcacacctgtaattccagcactttgggaggccgaggtgggcagatcacctgaggccaggagtttgagaccagcctggccaacatggcaaaactgcatctctactaaaaatgggaaaatgagctgggcgtgatggcaggcgcct

SEQ ID NO: 29464 - DNA, 1914 bp, Artificial sequence
  DNA replication origin
cgctggctcacgccgaagccggagcgtttgtcgttcttccactcgcccacgtaggtctcggtggtggtggcgtcgatgtcgtcctcgatgaccgccagctcggcctcagcctcgcccaggctgatggtggagtggatgtcgctggccgtggagctgacggtgctcatgcccgcctcgctgcgaaaggagctctgcttgctgcgttggctggccaggctgctcttggactccgacttgcgcagcttcagcccactcagcagcgagcgccgaaacagccccttcttcttgctcttgaggatctcggagtcactgtgggccacgagcacgaagcccccgcgggacacggccgggctgccggccaccgccggagaggcgtcgggatgcagcgccgtgccgttggtgtgctcgctgcgcagggagttgatggacgtcctcaggggtgagcggatgaccgcggccatgccatacgggacgctctgccggacgccgtagccctggcgcatgccaccgacccactggccctggtaggtccctggggagaaaatgagagaggggtgagtgcccagcgacagaggagggggcacagcctggccacggacagggttgaagcagccacagtcctgtctgagcttcctgttgttttgtgttttttgagacaggttctcgctgtgttgcccaggctggagtgcagtgagaccatcacagctcacgacagccaggaacccctgggctcaggcgatcctcctgcctcagcctcctgcgcagctgggactacaggcgtgcaccaccatgctccactactttgtaaattatttgtagagatggcagtctcattatgttggccaggctggtttctaactcatgggctcaagtgatcctgcctcagcctccagaagtgctgtgattacagtcatgagccacaccactcctggtgtgctatcttgatgaaacctggtgaggtttgcgtggaggcagacagaccatggtaccttcctacaacttctatcaccagtggctgtttttgaagacacctccatcctgcttctcatggctagatcttgttctctcttggaaatcggggagggagaagggaggcatcagagtctgtggtgcagagtgaggaccacagaacccagagtgaatacggagcccctgccaagggcacaaggaaacgcgtcctgggttaggaggctaatgagtggcagctacagggacacaggtgtgggctacacactaagccctgaatgggctgctctgggagacagtgagctccccattgctggaggtatccaggaagaccacacagtggacacaccatggaagagattcaagggcatagggaagggacagtggcccatgaccttcagacataaaatcagcagacctgatatccccagaagaagggagggtggggactgcagcagctgcctgtgcacctgggttctcagcagcactgtttccatggctggaaagggaaaggcaacccacaagtccatcacctggtaaatggacagacgccatgcggtccgtccatacgatggaacatcattcagccttgaaaaggtagaacattctcacacaggctgcaatgtggatgaacgctgaagacattacacagagtgaactgagctgggcacaaaaggccacatatcggatgattccatgtacacggggtccttagagtagtcacgctcagagatgcagaaagcgcggtgggtgcaggggctggggagggttgtggggtcagtgttgaatagggacagagttttgcagtaggatgatgggaaagccttggaggtaaacagtgatgacagctacctaacaccgtgaaggtaattaataccactgaattgtatacttaaaagtagctaacgtggtacattctgtatttctcttaccacaataaaataaaaa

SEQ ID NO: 29465 - DNA, 1172 bp, Artificial sequence
  DNA replication origin
accaccgagacctacgtgggcgagtggaagaacgacaaacgctccggcttcggcgtgagccagcgctcggacgggctcaagtacgagggcgagtgggccagcaaccggcgccatggctacggctgcatgaccttcccggacggcaccaaggaggagggcaagtacaagcagaacatcctcgtcggcggcaagcgcaagaacctcatccccctgcgggccagcaagatccgcgagaaggtggaccgcgccgttgaggccgctgagcgggccgccaccatcgccaagcagaaggctgagatcgcggcttccaggtaggagggcgagggggcggggggcccttcttggtgcccagaaggtgtttgtgagcccagtctgttcagtcctgctgtcgctcaaggccttgggctaggcccagtttgaggcctacactggtgtttctcaaactatgcccccatggaaccctagggttccctggaggttctcagaggtgactgtggtcaggattggtgcagaggaatggttgatttgtgggggtgtagaggcctacagcctccttaaactgagcagtgtctctttgttctatatgctgatgtttagtgtaaaatattggtgaataaagaaggtggtctgttccgttagtacaatgcattggagtgctgctgtgctagctagtaggggtgacaccaccaggtgggggtggcaggtccagcactgcagggctgtgggaggtggctaggagctgcctcagctacccagacctgcgatctagattcttccgggaccctgggagatggcagcagttgggaggccaattccgagtgcctggcaaggggctcatgcaggcctggtgctttgggggcagccgctgttctgaatcggctgcatgacttacggaatttggggtccagtggggcctctaggccctaaggaatgggtccagaggtgactgtgggtgggatcgacgtggcttttgggtacctttaggggtgggtgcaggatggggcctttagggctggaggaaggtgcccagggtctggctcctgtggaggtgagtgtgtgagccaggggctggtccccgccaagctgtggctggcaggagccacctgctgcaggttggaggaagttcccctgtggaaagccacgggccccacaggtaggcatttgggttctaa

SEQ ID NO: 29466 - DNA, 815 bp, Artificial sequence
  DNA replication origin
ctgggtgacacagcgagactctgtctcaaaaaaataaaatataaataaataatttaaaaattatttaataaataaatagaataagaaagctgtgtttgctgatatggaacaatctccaagatacagtgttaagttaaaaaaaaaaacaaaaacaggccaggcgcagtggctcacgcctgtaatcccaacactttcggaggccgaggcaggtggatcacgaggtcaggagatcgagaccatcctggctaacacggtgaaaccccgtctctactaaaaatacaaaaaattagccaggcgtggtggcgggcgcctgtagtcccagctactcgggagtgtgaggcaggagaatggcgtgaacccgggaggtggagcttgcagtgagccgagatcgcgccactgactccagcctggacgacagagcgagactccgtctcaaaaaaaaacaaaaacaaaaaaaagcaggggcagaactgtgtgtggtgggccaacacttgtgtccaggtttctagcatgtgagagtgtttgaaaactggagcctgtcctgtgacggagtcttgtgcagacatgaaaaacaagagatatcctagtgagctcccaaacagggacacccatgacagagtaaaagcagaaacaagtcacaggaaaaaatatgtagagcataaccccatttgtgcggcaaaaataaggtgtgtatgtcgatcactgcatgggagaggaagcgaaagagaaccactcagaatgaagagtcattttctgtgggaagctggacacatgtggaagggtttgaaggaggagttttactttcattctgtaca

SEQ ID NO: 29467 - DNA, 2418 bp, Artificial sequence
  DNA replication origin
tcgcatgcagggccaggcagggcaagaacgatcgcgaccttttcctccagggaaggttgcaagaaaggcgggatctgtaacgtgactaggtggaggcactacggagccatggtgcaggggtggggggccccaggtgagctcagatgccctccctgcctgtgccaccgtggcctgaccctccacaggtgggagccataggcgtcaggagccattaccccttggagaactgggtgccaggccgagacctggtgtctcatttatgacaaaccgctgcagtgcgtttgggagtctcctcctccatgacgtgcttgtctggattggttttattttagtgcaggcaccacgtcgtctttttatatacgtgtgaacgtatatatgtaaacacacgtatgatgttggtgagttcatgttggtggtatttttactaagcaaagatgtgggaaccaaatgggcccatccggggagtttcccatttggtccctcgtgctgtgtgtggtggggggcattgtggtcgaggtctgaacagccggggaagtgaaagaccccgtcctctccgggagcttacgggagtgggagagacattgacgaaatattacccatcgcaggagtcaggtgcacacagtgatgatagttccgggaggtcaggtgcgcgcggtgatgacagttccggaaggtcaggtgcacgcggtgatgacagttccgggaggtcaggtgcacgcggtgatgacagttccgggaggtcaggtgcgcgcggtgatgacagttccagaaggtcacgtgcgcgcggtcgtgacagttccagaaggtcaggtgcgcacggtgatgacagttccgggaggtcaggtgcgcgcggtcgtgacagttccgggaggtcaggtgcgcgcggtggtgacagttccgggaggtcaggtgcgcgcggtcgtgacagtgccgggaggtcaggtgcgcgcggtggtgacagtgccgggaggtcaggtgcgcgcggtggtgacagtgccgggaggtcaggtgcgcgcggtggtgacagtgccgggaggtcaggtgcgcgcggtcgtgacagtgccgggaggtcaggtgcgcctggtgatgacagttccgggaggtcaggtgcgcgcggtgatgacagtgccgggaggtcaggtgcgcgcggtcgtgacagtgccgggaggtcaggtgcgcgcggtggtgacagttccgggaggtcaggtgcatgcggtgattgttccggaaggtcaagtgcatgtggtcatagttccagaaggtgtccccggggcaggatatgttttcctattttccttggcttccggggagcttggagcctgctttcctttgggtcctgggctgattttcgggcaggtgctgggatgcagtgtcctgggtgctgcagcatggctgagcctcggattctctgtccagggctagctgtgttcaggccgcgcatctttagttttggggcatcgcaaatcctcctggaatctgatgaaagctgtggaccctctgcttgtggcggggggtcatgcagaaaactttgagtacagtttcaggagatgcacggaccacccaagggcctggaatcggagcccccacaagacagggggtgtgctctctgggccagcgtttggagcactctctggctcttggagccctggtggggcattcccagcagcttgcttcatttcctggacacgtgttcttggctgtggtttatattactctctgtatgtaaatgtcataggttttttttcttctagtaaaattgttcctagttagcacagtggaatcttgaaacaagaaagccatctttcatgaacagtgtgtggtttccaggcttagcccatggagttggagtgacaggtatggcagagatggggggtcaggctgcgtagaaggtgtttgcgccccctaggtgcaggtgttaatcctcaccaccagggcgatggtgctaggatgtggggcctttgggaggtgatggggctgaggactgagcctcatagtggggattagtgccctgatgaaagaggcctcagagagcaccctcgcttcttctaccatgtgagcacccagcaggaaggtgctgtccaggacccagaaagtgggtcctctgcagacaccaaatctgctggcaccttgatcttggacttccagcctccggaactgggggaaagcaatgtctgctattgatgagccgcccaagctgcggtgctttgttgcagccccaacaggctaagtcaggaaccgtgaacaggagacctcccagggagtctgctcggaggggggatttgtcgtgggggaattggtcattgtgcctcagtttccccattgttggggaagtggtgcccatggccactggcaggcccccccgggggccagcacaccaggtaggaagaaatgcaagccccaggctgctgagatgcacag

SEQ ID NO: 29468 - DNA, 1225 bp, Artificial sequence
  DNA replication origin
gtctcgcgttccagtcaggggagcgcccagccccgcagcccccaggctgggctcctcatcctgtcctggtggccagagtggcaggcgttgcgagcaagttcagggctgtggtgtcaggtgcggacctccagcgcgcagagcctcatccgaataccgctcaccggtcagagctcgggttgagggggcgcgctcctaaccccattctctggggcctcctggtgcagaggaagcttcctccaagatgaggtaggagatgggaggcagctggccacggcctctccgccacccaccccacaccctccacgcccccgccactgtcactgggccgtatcacccatgatccccccctcgaagggaggacgaggttcctaaatcaggcagcagcttccagctctttccgaggggcacagcgggagctgccatttgtgacgctgtccaacccagcagccactgggtgtgtttaatggtaagttagttcacatcagaggcaggtcaagagccaggaccgcagacacacccagctaatggctgccacgctggacccagcagatagttccatcatcccagaaggttctagaacaacactgggggagggcgggcagcagacagcacaggctgggcaggtgggaattcaccgtcagggacagccggcaagcaacacgcggtgccccaaggactgtgggaatgggagagacctgccaagacacatgtcctgtgtcccggggagccaggccaggccttggcacaaacaagcaccttcggcgggagaggaagacaccgggcaggggagcagctggggctgagcccatctaagcctacccgctctggaggacacatctgctgccaggactgcccagccatccacgcaccccctccccacgatgccagtatcaggcccggcgagactcaccgttttcccggtgctggaaggaaggggagaactctttggcagtgatcctggcgatccgcgcctcctcctgggctttctgagctgctgtgagggctgcctcggcctttgcccgagagtgggaggtcctgggggagacagggaggagcgtgagggggggcagggggcacaggtgacaggggtctgggttgaggtactctgccaaccccccaacaacgggctgggctaagacaagatgctggcaccccatgtttaccctcagacttctggatcttgttcgttcattcattcattcattcaataaacatcactgagcat

SEQ ID NO: 29469 - DNA, 2739 bp, Artificial sequence
  DNA replication origin
caccccgaagccccggtcctcggggcggtggtcgtcccccaagccccggcaggcgccgcccttgctgtagcgtcttttctggggatgcgtctccatcctcagcaagggtttcatctccatccggtagttgctcagcttctcctcctgcagctccagcagcctggagcctccggggctgtggttgctggcccggtggtgggaagtccacgtgaacacggggggtgactccgtccgccgctcccgcggcttggggttcccgggctgcttgcggcccgaacctcgggtgcggaagtcatccacgagcaggccgccgcgcagggcaccgctgcggacacccctggagcccccggcctgctcctcgccccagctgctgcgggcgcagtccccggcccggccctccaggagcatctggatgtccccgccccgctcctcgtccaccgacacctgcctcgagaagtgggcgaccttgttcctggcggcgggcgcgggcggcggggtggccgcggggctggtggggaagctctgcagggggctgtcgtcgggggtcaggtcggagggagtggtgcccttgcggtacagctcggggctctcctgctgcaggggtgtcccggtggacagcacctcgatgtcgtcacaggaggtctgacgcttcggcctctggtactccagccctgtatggggacacaagacgacgccagacggcgttacccagcacattccacagcgaggccgcggtccccgggccagggcgccagagggaacctcagggcagcagaggcgcttcccactcaccgaaaggctgcaggcaagggaggggagtggggaccgtggctcccaaagccctctgtgggacccccgtggtccccaccccacagacacttggagggagactggctaggcccaggcaccacaggaagggcggacagcagctcccaggctacaagggagacccaaggctcggaaagtgcgtgaggacgctggggtgtggactcaggtcccaccaaccctgactcgcctgtcctgagggtaagaggaagcccctcaccctagctgaccacctgtctggggaggccgagctgtcacagcaaggccgccaacacccctacccgcctgggactgtgtctcagggtgctgggacagtcttgctgagaaacagccagtgccggggccagcgtgagagcccaggagccgacttccctccccacctttcgaggctgctggggcttcaagtcctagggcggggctccccggaaggggaggtcaccacaggacccaggggccagctctgcagccagcagagtccctgtcgtctgccggtggctcagtccccatcagcccccacccggaggcctggatagggaggggcagcattgtaggactagccccgagacttctccggagctccgtgagcccccagcaggaggtgagaaccaagaacattgactgggatctcatttcctgccaacgcagggacacgggagccatgcccgactttattccattaggagaaacccaagaacgcggcgcttcttaccctccggggaacagttacacgttcatctcaagtagcgtcctaggctcagcacagaacagtgggacccccgcccccagcatccccgtcctgcccgagccaaaatggtgcagagctctgtgggaatttggggagtcttccctctgaggacggaggtctcagagctctacccggggcggccacctcatgagaccagctcggacaccaagagccactgcccatcttagagtctctcacgctcggacattctcctggcctgtaccccagtctgaccttttggcaggagaaggtctgggagacgcctgtaccccagtctgaccttttggcaggagaaggtctgggagacatggctaccctcggtgtggcaccagatagtccctccgtttgtaaagagacgttagcaagcagattcggggcacgctgcgacgccaccaggctgggctgctgtgtcctcctccttgctggtctaagaggcagtgctgagcagagcgaggccatggccctggcctggggcttggggcacagctgggtagctctgggtgggtggccagccctcccaagtctgagttcctgtcacacgggggtgtgggtgggccactctgaggtctcaatgactgcttctctgtggtcactccccagaaacagggctgggctggttgggtgtcccccgagcagagcagggaatgggccagagaaggtctgtgtagaactgtgctgacatccacgtacccacctgacgcccagccccaccacctctctccccgtgagggtcctgtgtggagggcagccctggccccatcagaggcccccaatcatgcccacggatcacccacatcgtacctcctccttggccaggatgggacttccaaggggctggcattcctgtgccttagacgctatggacctagcaggctgggatcaaggccccccccatcccccgatggcgccccggcctttcccaccaggtcgtccacccactgctgccgagatcaggcctggctggcccaggagaccccacgctagaggggccccgactcccagcaccaccagcaggagggcaccctcagctagaatgagctgctgagcaggtaacgttcctagaagcctcgtggtgaggatgcagggcgggtcctcgtgaagcccctgcagcttcttcctgtgccttcaagccacctgcgtcctgcagcctccgacgctcagtcctcctg

SEQ ID NO: 29470 - DNA, 2931 bp, Artificial sequence
  DNA replication origin
ggaatgtgctgggtaacgccgtctggcgtcgtcttgtgtccccatacagggctggagtaccagaggccgaagcgtcagacctcctgtgacgacatcgaggtgctgtccaccgggacacccctgcagcaggagagccccgagctgtaccgcaagggcaccactccctccgacctgacccccgacgacagccccctgcagagcttccccaccagccccgcggccaccccgccgcccgcgcccgccgccaggaacaaggtcgcccacttctcgaggcaggtgtcggtggacgaggagcggggcggggacatccagatgctcctggagggccgggccggggactgcgcccgcagcagctggggcgaggagcaggccgggggctccaggggtgtccgcagcggtgccctgcgcggcggcctgctcgtggatgacttccgcacccgaggttcgggccgcaagcagcccgggaaccccaagccgcgggagcggcggacggagtcaccccccgtgttcacgtggacttcccaccaccgggccagcaaccacagccccggaggctccaggctgctggagctgcaggaggagaagctgagcaactaccggatggagatgaaacccttgctgaggatggagacgcatccccagaaaagacgctacagcaagggcggcgcctgccggggcttgggggacgaccaccgccccgaggaccggggcttcggggtgcagagactgcggtccaaggcccagaacaaggagaacttcaggccggcctcctccgcggagcccgccgtgcagaaactggcgagcctgcggctgggcggggccgagccccggttgctgcgttgggacttgaccttctccccgccccagaaatccttgcctgtcgctctagagtccgacgaggagaatggggatgagctcaagtccagtacggtgagtgggcggccaccaggctggtcccagtggaggcaacatccacctctctgctgacctggtgtttcctgagggtttccagcaaggtcactgctcccctgttcctctccaggggtggagtagggtgggggtacagccgggagtggtggccctcaggtcgctgggaccctcccctaggaagccaggtggggcaggtgtcatacctctttccgtgagaggctgcccccaggttgtccagaaagcacacgaaactcctggtttccaggcagcatgggatccctgcgctccccgcaacgtgctcaaccccagctgctccaagagtctgtgcccctggtcagtagccttgggccgtgagatgaccgcttgagtgtcctgtgtcctggataggaacccagaggcgaaacagctgggggcaaggctggccctggggctgggagtcaggtctggggttggggggagctgccagtccaggtttctctcacccatggggggtgttggggttggagccggctcccacgtgaggcccgctgtgtgcaactcaccgtcagcctcacccagcaccccccccccaaattcgttcctccagggcaggcagcttggagggaagaacagcgtccccctgggctagactcggcgcgaggctgggggtcccaggctagactcggtgtgcgaggctgggggtcctggtgcctcacacagggctggcctccccttgaagggaccttcactctgcaaatcccaccctgctcccttgaccagtgctgcaggaatgaagggctttgggaatgaagggctgtgggacggtggctacataggatctgcgcacggccaggccctcaccccagcagggctctgctcgctcgtggctgccaggcagtgcgtggtgctgaacagaagtgctgcaagccagtctgcccctcgggtgtgaggacgcaggggggtgtccgcagggggcgctcagggcgtgtgggccgggcaggggggaccattggtaggtttattgtcgacgctgcggcaggggtcggtgtctgtccctgcccctgacctaggggagctgtggttttctcctcctgccagccccacccccagaggggtcaccgcgtgacacccctttgaaggggcacgtcctgccgggcggcaatgcctgtttctgcctctccttggaaccactgcggacgtctgtctgtcctgttgggttcctaagatgcctccccgttccccaaagcccacagagaacagcccctatgctcctgctgggaccaaaataccagctcacacttacaacttgattttccccatcgcagccggagatgtgtgcgtggctgtgcgcgcgcggttattttaggaacagccaagcagtgggcagggtgggaggtgtagggacgggttctatttttagcctgcttaatgcactgacacttttgggtgcttttaaatgaacctccctgggggtcaatgcacaagctggggacaagtgccaagctggcctctgggatgagttagcgacacgcagggtgctacatgctgccctggtcctgcccggtctccagctggggctaatctggaggtcccgtcagctgcagcatcatgtcccacccaccctggaggatgccagctgagctccttggaagtggccaccctggggtacctggtgctggtgcaaacaaggtttccctccctgtctccctccccgtctccctccccacagctttggagctgtgttttctgccaggtctgtgaggggagatggtgtgtagaggcgcggtcaatcctaagcactgttccaggccctgttggtgggaagcaggaggggcccgtgccagccggcatccatgtcaggggacaggtgtcagggcagtcgggtgccaggctgggctgagtgccttcagtgccaccccctcacaggggtacagctctctgcagtgtctcccctgggccaccagcagggtctggggtgctgtcttctggccatccccctccaccattcccaacatgctgcag

SEQ ID NO: 29471 - DNA, 2296 bp, Artificial sequence
  DNA replication origin
ggttgtcctttactccttccccgggaggttttatcgacagctggacccgtcggactgaagagaccctgaggcctgtggtggtccccaagctgctggcgctcctgggccgtgtgcgggtggcaactcccctcacagtcttcatgggacagtgcggatttcacctcatacgtgcgacagacgctctgcaggagacagcggaaggaccgtctccctcctctaggtcatgctcactttctctgactcttccgaagtttgatctgactgttcttgcctttggtcttggaaacttgacatcaaggtgcctattagattttcagtcgtcgccttccatagctgcaggtgctgtgactgtttctgccttcagccggccgacagcaccgggcgcaacaagcttcaggacatcatgatgccgccctcctgcagtacctttaacctcgcccgggccagggtctgcctccagcccaggaccaagaccccgattccagataaggcggagggaggagggcagggggtagagggaggagggcagagggtggagggaggagggaggaaagagggtggagggaggagggcagaagaagagggcagagggaagagggtagaaggaagagggtggagggaggagagaagaggtggagggaggaaacagggtggagggaggagggagaacgctggagggcagagggaggagggcagagggcggagggaggaggttggagggcggagggaggaggttggagggcggagggaggaggttggagggcggaggggaggaggatgcagggcagagggaggagattggagggcggagggaggaggttggagggcagaggggaggaggttgcagggcagagggaggaggttggagggcggagggaggaggttggagggtggagggaggaggttggagggcggagggaggaagctggagggcggaaggagtcagtcaactcaggcacctggttggcttctctcgcgcccaggccgcgtgtcaggtgaggcagtcggtacgcagaaactgaggaagcgactgtccccaggtgccaaggaggttgctggctcagccttcaaaacaagcaaggaagagtgcagctgcatttgttgaaaaaaagccaggctgtattttcaccatgtgccccctgccttgaaaatgaactacggaatgcacagcgcgtggggggtgggtgctggaaagggacagaacaagggtccgtggcaaccacaaagcacctgcaggccagcgcttcccgatgagcagaggcgggggctggcacctggcgctggctgcagacgggaagtcaacgccaccaaagcagaggacctcagccacccaggttagcaagagggtagcagggcgctcaggaacaggtgaagccatactgtggagagaagctgaatgctcctcccaagcttcagcccacccattaggaacaaatgctctttaagtctgtttcttcatgaaacccaaagtggaagtgcctgagctgtgaatgcggccacagcgttcatgccagcttgttcccaagcctaggagaagcaagcagccccgtgacgggcacaggccacagtgtgggcgtgagctcaccccatgtgtagccgggtgctgggcccaggccgctgggtttctggggtcggcagagtgggccaggcaacaacctcacatgcctacctcactgccactcgtccgcctcgtccactcctggcatttgggataaacatcctgtctcagacacacccttctcgtgcgcccatgccacctgctcaggcctatgccgcccgcccgtcctcccaagcgtgcacacccgtccgccatccttctcccgtctgtgccccatgggacagaggcctccagctgcaccaccactgctcgttaacagctgccatccacaccgaggaagcctcttcgagcccagggagtggaggatggggctctgctgtgcacgtgctccctcgggccctcccagcagtggtagatggggctctgctctgtccttcttggtcatcttcctgggcctgcaacaaagctcagcccagcagccaggcagctccttacagaggctaacgccgggtctggtccctggtgaccccaggctgctgtgagaacttgtgacccccgagatcagaacagccttcgggtcccagagcttcccgcatgatcgtgtgtggaacagaccgggagattccagcagatatgggttcaacgttgaccaccaaccttgacaacccaagggctgcctcccctgaccatgacagccaactcctcctccacagtggctctgccaggcgccgagtccat

SEQ ID NO: 29472 - DNA, 1214 bp, Artificial sequence
  DNA replication origin
tgattgcccagcactcagacaaagtgcccagaccggccgccaaagccggcgcaacgcaacacaagctgcagccctgtgcggggtcggtgcaacacaaacacaagctgcagctctcagggggttggcacaaggcaacacaacctgcagcctgaggggaggaggggtcggcggaacgcaaacacaagctgtagcccttgcggggggcgggcgggctgccggcgcaaaagcaaacacaagctgcagccctcgcgggggggtcagcgtaatgcaaacacaagctgcagccctcgggggggggtcagcgtaatgcaaacacaagctgcagccctcgggggggggtcagcgcaatgcaaacacaagctgcagcccttgagggggtcggtggcggggaggggggtgagctggcacaacccaaacacaagctgcagccctcggagagggggaagttggcgcaatgcaaacacaagctgcagcccttgggggggtcggcgtgggggggttggtcggcacaacacaacacaagctgcagcctccaggggggtcggcggagggggccggcacaacgcaaacacaagctgcagccctcgaggggggcggcacctgcagcctcactcctgtcagcactgccacccacatccagacgcaccagacaggtgtccccaccagggaagaggcagtgcccagagccttcccctttctgatcagcattcccatcaagtgtcaagtgacaatggaagcctgaagtgaggtcacaccgatggcagtgggcggggcccttggggccagttcaagtgccacccaccgaggcctcctgaacacccggctgcaccagggagctcagcacgtgccctgctgtgcaagagctggccgagtgcccctgagatgatcctgagaggcgacacttctcaagccatcgccccaaggtgacctgggttttcctgggcccacctggagccgtaaggatgaagaggccaagggagcggggaggtgctcacaggggctcgccaccaagtcagcttctagccctctcccagcggtgcttccacccgcccagcaccggctccgccaggagggaagtctccccaccacccttgttttcaactcccagataagaaatgggaccatagtgaatatgtcatcagccccgttatagaaaactaaggatcctatattcccactgttcaaaatatttaagatacacaaaaactgcacca

SEQ ID NO: 29473 - DNA, 982 bp, Artificial sequence
  DNA replication origin
cttaatccatttaaccctgagtggacacagcacatgtttcagagagcacagggttgggggtaaggttatagattaacagcatcccaaggcagaagaatttttcttagtacagaacaaaatggagtctcccatgtctacctctttgcacacagacacagtaacaatctgatctctctttcttttccccacatttcccccttttctatttgacaaaaccaccatcatcatcatggcccattctcaatgagctgttgggtactcctcccagacggggtggcggccgggaagatcctcacttcccagacggggcagccgggcagaggcatccaccacctccctcccagacggggcggctggccgggcgggggctgccccccacctcccggatggggtggctgctgggcggagacgctcctcacttcccggagggggcggctgccgggcggaggggctcctcacttctcagaccgggcggccgggcagagacgctcctcacctcccagacagggtggcggctgggcagagacactcctcagttcccagacggggtcgcggccggacagaggcactcctcacatcccagacggggcggcggggcagaggcactccccacatctcagacgatgggcggccggtcagagacgctcgtcacttcccagacaggatggcggccgggaagaggcgctcctcacttcccaggctgggcagccgggcagaggggctcctcacatcccagacgatgggcggccaggcagagacgctcctcacttcccagacgaggtggcggccgggcagaggctgcaatctcagcactttgggaggccaaggcaggtggctgggaggtgggggttgtagcgagccgagatcacgccactgcactccagcaaaaaccagtcaggcgtggcggcgcgtgcctgcaatcccaggcactcagcaggctgaggcaggagaatcaggcagggaggttgcagtgagccgagat

SEQ ID NO: 29474 - DNA, 1139 bp, Artificial sequence
  DNA replication origin
aacaggcgaggcgcggggtggggagacgggcgaggcgcggggtggggagacgggcgaggcgcggcgtggggagacgggcgaggcgcggcgtggggagacgggcgaggcgcggcgtggggagacgggcgaggcgcggcgtggggagacgggcgaggcgcggcgtggggagacgggcgaggcgcggcgtggggagacgggcgaggcgcggcgtggggagacgggcgaggcgcggggtggggagacgggcgaggcgcggcgtggggagacgggcgaggcgcggcgtggggagacgggcgaggcgcggcgtggggagacgggcgaggcgcggcgtggggagacgggcgaggcgcggcgtggggagacgggcgaggcgcggcgtggggagacgggcgaggcgcggcgtggggagacgggcgaggcgcggcgtggggagacgggcgaggcgcggcgtggggagacgggccgaggcgcggcgtggggagacgggcgaggcgcggcgtggggagacgggcgaggcgcggggtggggagacgggtgagttgcggcgtgggaaaataggcgctgctgtctgtggtctcttcagtttcatgaacattgaagctttcacatgggattactcattggttgaatataaacagttctttgtatagaattagaaatagagatagtgttaatcggctcctctgtgaacttggtgccgtgttagggccctgttctgttctccacacccctgtcagcagtgcagtgtgagcgattctgtgttctgagggtctccttcctgcaccatggacgctcactactgtgtagtagtctctgtggaatgaaattctcctcgctcctgttaacgggcttgtttctttggtaacctgagaacagtgctgacaggaatgttctcgcgcccaccccggagcctcctgctcttggggcgtgtgctctgcacgtgtactggcatctgctcgtggagtgtgtgctcctcacatgtgcctgctgctcgtggggcgtgtgcttcacagaggcggctggcacaggctctgtcctcggaactcaagtgttcctgttgcttcactcccatttcacactctgccaacctttacatttctgtgaatctgagaggtatgaagtagtatctcactgtaggg

SEQ ID NO: 29475 - DNA, 1922 bp, Artificial sequence
  DNA replication origin
cacccgtctccccaccccgcgcctcgcccgtctccccacgccgcgcctcgcccgtctccccacgccgcgcctcggcccgtctccccacgccgcgcctcgcccgtctccccacgccgcgcctcgcccgtctccccacgccgcgcctcgcccgtctccccacgccgcgcctcgcccgtctccccacgccgcgcctcgcccgtctccccacgccgcgcctcgcccgtctccccacgccgcgcctcgcccgtctccccacgccgcgcctcgcccgtctccccacgccgcgcctcgcccgtctccccaccccgcgcctcgcccgtctccccacgccgcgcctcgcccgtctccccacgccgcgcctcgcccgtctccccacgccgcgcctcgcccgtctccccacgccgcgcctcgcccgtctccccacgccgcgcctcgcccgtctccccacgccgcgcctcgcccgtctccccacgccgcgcctcgcccgtctccccaccccgcgcctcgcccgtctccccaccccgcgcctcgcctgtttcccggtcccacgccttgcctgtttccccaccccccgccttacctgtttcgagtagcccccatagacgacgatgccgccctggggagtgacggacatctggcagcctgatctgggtgtgggccccgtccctgacggggacagcttgctccatgtgaaggtgtccagattaaaggcatacacgtcgttgtagtagatgtaatccctggttagaagaacagcagctgtcagggtccgtaacattgggaaaagccctgacattaaaaactgaactgatttaaattaaaggtaaatttcctactgtttggggaaaaactcaaaccatttttctcctctgctcttacaccaacacaacaatcaacacagaaacgtggccgctttccctgcaacgagccagagacgccagtcaggtctcctcaaactcaatcttgacgcaatctacctggagacagggcaacattttcacctgtttaattcaagtttgaattgatatgaaaggaccacaagcacgtatgagtttgcatttgaaaaccggaaataatgctggcccacagaggcagaggaatttaatctgaaagccatactgcgttttcttacacagttaacacaatcagagacaattccattaggttattaggtgtgcaaccgtaagggcagcagtgaatggcgcctccaaagggatgatcagaacggaggtgtgagcagcctggcagcaagggtggtaaggccccacagtggactggaggggtgagcgaggggactgggcgctccagggaaactgaagaccacagaagccgaccctctgtgcccgaaatcacagcgcggcaaggaggccccgcagccttgccctgctcagtgcctgccggacccagcacgcagactgggctgaacagggaagtggcagctttgctggaggcatggggagactcggaggcgcacccagaaagtcctgtcctaatgtggaactttgacacaattatcgtgaaagcgtaaggggctgctctccagctactcaaaaaggagagccaaactcattttttaaggaaagcatggaagagcaagcagctctagcccaagtctcaagtgcccggttttctcctgtttgttcctgttttgtgtgaagcaggaaaagtcacagggcgtttacccagcaccagctgccacatctggtcttaagataaacagcctgggcacagtggctcacacctgcaatcccagcactttgggagtctcaggcaggtagatcacttgaggcgaggagttcaaaaacagcctggacaatatggtgaaaccttgtctctactaaaaacacaaaaaattagccaagcatgggggcgggtgcctataatcccagctactcaggaggctgaggcacgagaatagtttg

SEQ ID NO: 29476 - DNA, 1731 bp, Artificial sequence
  DNA replication origin
cacggtgggcctgccctgccggctgagcttgctggctttgaagattcagagtttggttaggtctgcctgccacacatcacagccagcgtttctccaggcacttgccaccttctcttcctgtcccctggagaaggtgcagggggttgggggagattcgtctccctccattggtttctgggccagtgccctctgagggatgatctgtgactccactttaggaccccgcccgataggtgtttcataacagctttctctgagatgtgattcatataccctcaaatcaccctttaaaatgtgtcattcattggtctttagcatgttcacagaattgcgcagccaacaccatgatctaaagttggtgcattttcatcccccagaaagaaaaaccgtctttttagcagacaccccaccgtccccggtccctgctgtctgtgtctgtggatctgcctcttctgggtatttcataaaagcggaatcaaaacacgtggcctctgtgacgggctcttctttccgcgtggtgctgtcaggacgtgtcctgctgttgcgagtatcagcacttcactcccgtggccagatgaggtgctggtgtgtggatgtatgacgtgctggtgtgtggatggatgacgtgctggtgtgtggatggatgacgtgctggtgtgtggatggatgacgtgctggtgtgtggatggatgaggtgctggtgtgtggatggatgagatgctggtgtgtggatgaggtgctggtgtgtggatggatgacgtgctggtgtgtggatggatgagatgctgttgtgtggatgaggtgctggtgtgtggatggatgagatgctggtgtgtggatgaggtgctggtgtgtggatggatgacgtgctggtgtgtggatggatgagatgctggtgtgtggatggatgagatgctgttgtgtggatggatgaggtgctggtgtgtggatggatgaggtgctggtgtgtggatggatgagatgctggtgtgtggatggatgaggtgctggtgtgtggatgagatgctggtgtgtggatggatgaggtgctggtgtgtggatgagatgctggtgtgtggatggatgaggtgctggtgtgtggatggatgaggtgctggtgtgtggatggatgaggtgctggtgtgtggatggatgaggtgctggtgtgtggatggatgaggtgctggtgtgtggatggatgagatgctggtgtgtggatggatgaggtgctggtgtgtggatggatgaggtgctggtgtgtggatggatgaggtgctggtgtgtggatggatgaggtgctggtgtgtgggtggatgaggtgctggtgtgtgggtggatgaggtgctggtgtgtggatggatgaggtgctggtgtgtggatgaggtgctggtgtgtggatggatgaggtgctggtgtgtgggtggatgaggtgctggtgtgtggatggatgaggtgctggtgtgtggatggatgaggtgctggtgtgtggatgaggtgctggtgtgtggatggatgaggtgctggtgtgtgggtggatgaggtgctggtgtgtggatggatgaggtgctggtgtgtggatggatgagatgctggtgtgtggatggatgagatgctggtgtgtggatggatgaggtgctgtgtggatggatgaggtgctggtgtgtggatggatgaggtgctggtgtgtggatgaggtgctggtgtgtggatggaccacgttttggttttctg

SEQ ID NO: 29477 - DNA, 1056 bp, Artificial sequence
  DNA replication origin
agacacacgtggagactcaggagggggcgggccccgtctgggctgcccggacgcggcgccggggcagttcctacggcctccagctctcccgcagggccggcgcggctcccacggccgacccgtaaccccggggggcgcagggagtcggccgaggctgcacggccgcgacgtcgggccgctaagcccggtctgacccgctcacctcctccttccgcgagcgcttagacaccttcttctccatcttggcggccgtcttctccgcgccgcggcccttcttctccttcttgcccttcttgcccatcttgccgggtcccaagccgcgacgggacaccaggaaagaaaacggcccgcgctctccgctcggaaacaggtgctcgtggggcggagctcggcgcacagaaatggagtcacttccggccccgagttcgagccgcttccgggtagaggtgcggctgggccctttacgaggttcggtcttggagctccgtcttcggcagcgggctcgggggcctcggactctgcataaggccccggaaaagatgaccggccccgggctgggcgcggtggctcatgcctgtaaccctggagctttgggaggccttggcgggcggatcgcttgagtccaggagttcgagatcagcctgggcaacaaagcgagacaccaccccccacccccagtcgctacagaagaaaaaaaaaaaaattaaccgggcgtggtgtctcgcgcccagtggtcctagctcctcgggaaggtgaggcgggaagatcgcttgagtcaaggagttccaggcagcaatgcgcccctgcaccccaacctgggcgacagagcgagatcctgtttcaaaaaacaaaaaagatggcagccccggcctgacataccccggccatgctcgccaattctcacgccctgtgcccccacctagcctgtccccgtgtcctaggagacgtgccctctgagttttattttttatttctatttttttgaggcagggtcttgctctgtcgcccaggctggagtgcggtagcgcgatctcggctcgctgtaacctccgcctc

SEQ ID NO: 29478 - DNA, 1088 bp, Artificial sequence
  DNA replication origin
ctgcagtggcctggccggtctctgggcacccgtaactgctgcagcccagaagggagcccctcccaccttcccgcagacctgcgccccacccaaggggcccggccgccgctcactcggggcccccgagctgagatggggtgctggcttcattttttttcacctcttccacaaatactgaccaaggcttttgttcaaccagaccctggaactgggggacccagtgggggacagggcagatgacctgtcttcaggaaccttcccggggtgggggtgcacccatgggtgactgcaagaacgctaacaccagcactgcgggtgcagaccgtgctctggggggggacaggggctgggtcagggcaggcgtctgaccatgaagggtggcctggagggagagtgatccaggctaagtggaaggcagtggaaagccccgggacgggggcggatgggggtgcggggcagagcttcggggactccaggggcccagcctgactggaaaagggagattgggcagggccagggctggtggggctgcagctctgtggggcgtctgcatttctcttcaagggcaggaggagcttttctgactggtgttcggcaggggactgagggatgaagaacaaatcagggtttttaaaggagttgacttgaaaaggttgcaggccgagcgcggtggctcacgcttgtcatcctagcagtttgggaggcctgtaatcccagctactcaggaggctgaggcaggagaattgcttgaacctgggaggcaaaggttgcagtgagctgagatcataccactgcactccagcctgggtgagagtgagacttcgtctcaaaaaaaaaaaaaaaggttattgcagcaccgaggactatcgcaatgggggatctctgctcccaccacagggtctacaaggagctccagggttaggcaaaggctttttgttttttttgagacggagtttcgctcttgttgcccaggctggagtgcaatggtgcgatctctgctaactgcaacctccacctcctgggttcaagcgattctcctgccccagtctcccaagtagctgggattacagatgccccccaccatgcct

SEQ ID NO: 29479 - DNA, 1087 bp, Artificial sequence
  DNA replication origin
gacggacatctggtcctgagtccccaaactgttcatcaggtttctccgggcccactggatggtgagggggtcccggtgcccaggcgggggcggcaggctccactgggcacttgctgagagcttgcggcttgagcagccgctggtcagtgaagccgtgtccggcttcgttggctcccggcttgggacactcagggctgtgccacaggccagctcctccagccacagctgagcactggagtgacgctggaccacttggctccacctctggctggggagaagggaagcccggggcctgagaaggcagagccccccgagctcaggagggatcctgcggggtcttcttgttctgggggtccctggctgctgccatggaggcagcgacagctcaggaaagtgggccgcattggccaggcctcggctgcctcccatagcgaaaaaaattcacgggaacaacagaaacaaggggtgccctagttccctctctgcaggcgggtggggactgggtgagagcccaggggcctccaaacgcaggcggcagagacgtgagcagtgcttggctctgtctcctagacaacgggcatcaggaccaggacaggacatgagcgtgacagggagagcggggaggtgcctaggccgggagtgggaacccagcaccggccagaaggggctgccgggcggtacagaggccaatgcattggaggctgagggtagctgcgacctctggggcaggggacactgctgtgtggagcccagggtgggcgcccacatgggtgcctggccgcggtgtgtctgcctttcttgtctctgtttctagaagactgaaggacagggctttgtctgcatgaaccagaactcagcctccaaaactggacacagaaatagccaagaggccacactgcccagaggccaggcctggtgagctaggggagatgccggcaccccccaaccctggggctgttccctggctcaggatggtgtctcggggctaggattatggtcaggagtccatcggggcctcaagcacctcctgggaggaatcacccaccttgcccagatcccccaccccctcccagtgccaccctacggc

SEQ ID NO: 29480 - DNA, 1213 bp, Artificial sequence
  DNA replication origin
ggcgcgccctgactgccaggccccgcccaggcgcatccgggaggacgggctgggatgacgcgggcgccgggaggggggaggtcgcgaggccggggtctccatggcgcaggaggactggggccttcgaggaccacgcgggcctgggaatagcccgccaggctgggccggacgacgcacgtgctccgagctgggccgagggggcggggctgagggacggggccgggccacggggcggggaggagccgcggacggtgggcggggccggcgggccggggcctaaaaggcggcgcgggcggggttcctgacgcagctgcgggcggcgggcggcgcgcacactgctcgctgggccgcggctcccgggtgtcccaggcccggccggtgcgcagagcatggcgggtgcgggcccgaagcggcgcgcgctagcggcgccggcggccgaggagaaggaagaggcgcgggagaagatgctggccgccaagagcgcggacggctcggcgccggcaggcgagggcgagggcgtgaccctgcagcggaacatcacgctgctcaacggcgtggccatcatcgtggggaccattatcggctcgggcatcttcgtgacgcccacgggcgtgctcaaggaggcaggctcgccggggctggcgctggtggtgtgggccgcgtgcggcgtcttctccatcgtgggcgcgctctgctacgcggagctcggcaccaccatctccaaatcgggcggcgactacgcctacatgctggaggtctacggctcgctgcccgccttcctcaagctctggatcgagctgctcatcatccggccttcatcgcagtacatcgtggccctggtcttcgccacctacctgctcaagccgctcttccccacctgcccggtgcccgaggaggcagccaagctcgtggcctgcctctgcgtgcgtgagtacggggcgcgggccgggggttgggaggtcgtagtctctgggtccctgcatccttgcatcactacgcccctggctcccacatctctacatctttacgttcctggaccatcccggcagttctaggctaaggtcattggtcccagaaaccacgtgcgtttctttcattcattcttttacacttctccccacaggctgggaatatcttcagtgacgggacagcagggtccctgccctgcccttcggtgggcattccattcccccacttaagcggtttaggcaag

SEQ ID NO: 29481 - DNA, 1425 bp, Artificial sequence
  DNA replication origin
gccgcttcgggcccgcacccgccatgctctgcgcaccggccgggcctgggacacccgggagccgcggcccagcgagcagtgtgcgcgccgcccgccgcccgcagctgcgtcaggaaccccgcccgcgccgccttttaggccccggcccgccggccccgcccaccgtccgcggctcctccccgccccgtggcccggccccgtccctcagccccgccccctcggcccagctcggagcacgtgcgtcgtccggcccagcctggcgggctattcccaggcccgcgtggtcctcgaaggccccagtcctcctgcgccatggagaccccggcctcgcgacctcccccctcccggcgcccgcgtcatcccagcccgtcctcccggatgcgcctgggcggggcctggcagtcagggcgcgccccttcacccactggcccgcagcctctcgtcaagcctgggagcgggcagtgcaccagggctggcctgaggccaaggatggagtttggggtaccccccgaagggaacctaggctcctgtcccggatgggccgaggggatggaaccgcccccacaaccagctcctggggcacgggggagggatgagaggatgacctgaggggaagctcctgcagcctccttccagcctgggggctgcatcagtggggctggtgagccgcgaactgggacgagggaagaaccgaaccgaggccacccagtaattcccattgtatcccaaaagaatcttgccaaagacggcgatccggtgcccgtagctttgagaagcagtaataacacaggctttgggaagccagcaatctgcctgagctcaatttaatcaacagaaccgggggttcgctgggagccataagacccccacccccaaatctacctggggaattcaaaggcaggcttcagtgtgaaggggctttaaagcttgttattcctagggaatgcgagaggcatcttagctaaaaagggttgagaggtaatttcagttagaggcgagagcaggatgccaaggctcctaggcctggaaatgggaaggaatataaatactgccccgagattgaccagactggtgagcggccaaagacctgttcaaagggtgtgtgtgggtcagggaggaagctcctcagtatcaccccaccccggggttccttggcgtgtgtgcaaacgagtccttggaagctcacagcaggcatgtggggaggcctttgttctgggtgagcgttcagcctcccagggcaaacacgcaaacaccggttgcagagctgggtgttcacagcaagacagtctgctgggcagatgcctctggaatccacagaattctgaacaatagccgtggtggaggggggtcagaatccctgtcgtgctgggacctctagctgcagccaggaatgtccaggccccaccccagggagggggcggctga

SEQ ID NO: 29482 - DNA, 1206 bp, Artificial sequence
  DNA replication origin
gaagaggctggaaagaaagtggctaaactggaaggccagcttgtcactcaggctgcagcagaagggacagagaaaagtggacagacttggaataggcggcagtttgagggtcctccagcagagcctgctgctgccctgggtgcaaggagtgaggggagaggaggtcccaagggggctcccgagattgcctgtggcgtcgggtggatggaggaaccatttatcaagacggggttggtgggcacagagttggggacgcagcagtgcacggacagcccacctttcagcaggagggacaagtgtcaaaaaatgacacttactgctccgttaacggagtaatggagcagacactccgttactgctgggcaccgctgtgtgccaggtgccatctgggggctcagctcaggccgaggaaacaggaggagcaggtgttgagcaggtggtatggggcgggcggggaagggtgccctcaggtccatcagaacagccacaagagccctggggtgggagggggccgatattctggtcggcacagagtgggctgccaggagagggcgggggcggaggggcaggaatgtggattctgtcccaagggggcaaggctgaggggatgtagctgggcacatggtctgctctgaattgagcttggttctctagagggtcgatgggaaggacgtgctggggatggggaggaagcggaggaggaggaggcggtggcagctgggaacaggcaatgcttctcacacaggcgtatctttattaaacaagaaaataagataaaagcaaagggaggaagccttgaaccttaaaagctgggccagaaattctacaatacaatcagaagccacaatctggtcacagtgagagcccttcccgcagagccgcagacaccggccgctgcccctggggcgggagggaagcctcctgtttgttttttgtcccgttgctttgagggctggaatcaatgtcttttcctctcggcgtgtttgtggtttcatctcagtgtgtccaggctcggatggcttcccgggagtatctccgtgtctcaggattagcaccagtttttaaaaataactgacaaaggccatttttcaggagacaaagatgttggtgggtgcagagggccccctgtgtgttgatacggaaaatgaaggtcagccactccctgcttctcttggtgtcttgttggacacgatgtcaacatggggc

SEQ ID NO: 29483 - DNA, 907 bp, Artificial sequence
  DNA replication origin
ggggctcagtaggtgctgccgctgctgctgccaaagctagaagagcccccacagggcacagagccgttccctggatcccctggacctggtgggctgtttccacctccacaaggcagccaattccccggtagctctgactgttgcgaaggcagggaggaggggggaccccagcagcctgaggagcttgcggcttgtccaggcatggagggtggggaccctctgtgggcagtttttgccaaaacttctggctatggtgagagggtcaaaggcgaagccttgaggtctccattctggaattgtctgcccggggtcaccaggaccacactggggctgtgcctgcgtgctgggagctgagtgcatagtgacaggtcggcactggtaggggcctgtgcagatgggatggtgctgggggtgggggtgggggtccaggcttccaggcagcgcctgatgtggttttggttacagacactgcctgtgtttccctctaagctgctgaaaagctcagaaatgtgcagcaggggctggagctcagcctgggttctgactgcatgcgggaggtgggcgccaggatgactgggacttcaggctgcgtggacccacttcctgggtttaaaaacgggctcttcacctgccagctgtgtgctcgggcaaggccttctctgcctctctgagctttggttttcctgtgtgtgcaagacagatgaatcacaggccctgccccgtggagtgattggaagattcagtgtgataatttatgtggagggctgtcgcttctttgaaccccttccgccgaggtgtagggtgatgtccccttgccctgagcctgggcaggtgctcctgacgggagtggtaaacaggatgccgcaggagcagtgctttgtgactctggaagccagggcagaaaagg

SEQ ID NO: 29484 - DNA, 1011 bp, Artificial sequence
  DNA replication origin
cgcccgggccgggcgatcgccccccgggccccgctccccgtccccggccgcgccccggaagaggggctcccgcttcctcgcttccgcacccccggccccaccgcgcccggcgtccgttgagccgcggctgccgcagcccggcccgggggcctcgcgctcccgacctctgtcccgggcctcgccccgcgggaaggacccggagccacggcggggagactggaaaggcctagaaccgcgcccgggctcctctggggcccgaagtctcccaagggggtcgctcctgccagccaggcgggagcgacaggcatcgtttttgtgcctcctccgtggctgtggaccggagccccatagcccaggacttgcacacgcaaggggcgctctcggggaccgcagacctcggcgacgaccccagcccgtcccccgaggggccccgatgaacgaggacctcggggtgccccctccccagcacgtttgtgcgatttctgtgatctagtccttaaggaaggtggccgttttctttttcccccctaggatgcagaaagtagatgacattccatccacactgtgtgagcaaattggagagattgccttgatagaggactgatgtttttcactgatgagatggtaggggttgtcttgctattggagaaatacatcatccctgaagaactgtgagcaagtggagcgagtgtgggctttgaagggtagcgagcttgcaccctgaccggggagggcccgggtcacacagttgttgatgtggaacaggtaattgccctgtttggagttgcctgttctgcccaggaatgtactccagggcctgatggcgatgctggaactcgcactacagtaaataattgataagaggaggcagttgtagggttcacttttagctggaagttcttaggggacagaaaaataacttggagtagtgagtggttctgagtaagctcaggaaacgtcaaataaaaactggatctggtcatttaacacgcagctcgcagatatccagtg

SEQ ID NO: 29485 - DNA, 2140 bp, Artificial sequence
  DNA replication origin
atcagatgtgtcaatcaccctgattccacattcatgaactgagtagttagattagtaacttaattatagcacagtccttattgaaatcaggacatgggcacaacacactttgaaaaccttaatccatggtttttaaatagcatttctgacattcatcattgtgcattggggaatgacgtcagtggtgtgttctcactggactcatcacagacgtattcactggatgcggtgcgggccaggcccggtgccctgctgagaacacagccatgccaattcctgcccttgtgaagctcaccttctagcaggagacactaagcaagagaaacctttcagatgtgtagtaagtcagacagtagagcaggaaaggctgctgtgcacgtcaccgttgccgaggcgtccaggaggcgtgcaggaggcgtgcaggggtggccagctccgtggtaggaccctgagctgagtgtatccctgagaagcatggggaggcccaaatgcaggggccgagtgagcgtggcggggaggagagccccaggggctgcagagggcccgtgagatgggaagccctcggagggcttagagcagatgaggggcatagcctggcacgtgtttttatgtgacgccttgagcgctctttatcgtgatcacagcagaggtgcaggtgacagtgagacggccgtatgtgagcaggtctgaggggcggcctgggtccaggttgggagtgacaggctgggaagacgaggccggatcagggtgaaggagaggagaacccaggaggcctgaggttttggcctgagcatctgggaagtaggtgttgccttaaattgaggtggaaagtgtggaagaagcaggttggtttggggtgggtgacaggggctcagtttggacatgttagaattgagacgaccccttaggggagacacctagtaggtggtgtggtgtgaggcctggagttcatgtgcgaggtctgagctggcagggtgataggcgccattggcgtggagatgtatctgaagccacagactgatgagccgctgggtcagtgctggctgagcaaaggttccagggccgtgccctgggcatgcatcctcaagtcaggaagtggatgtgggaccagcagagagacagaggagtgggggccaggcagggaggacagcgtggggaggagccggaatgagccccatcaggccctgtggtggggagaatgggggcagcatctgggctggagcagttttgggggagtaactgagtgacagcccgatgggtgggatctggaggggatgtgagcactgaaaatggagaccgcaagtacaggcggggcttctgaggaattttatctgaaagggaacagagaaatggggctggggctggaggggcaggagggagggcagcaccgtgggggaagggtgtgcaagggtgatgctgagggaccagggaggggtgctgactgggtgtggggcacatgcccgaggaggcaggagtgggcattcttgggaagtgagagggaggagagcaggatcacccactaagcccgaggcgcagagggtccaggagtaggggagcgttcgcatggctgggcggggctgggcggggctgggcggggcttgcagcatcaggcgcacctgaggttgattggatgtggattctctccccatccctgcccgaatgtgtgggtccccatgccttggtggctgagaagtggatttaaggccaggttaaagatggttctgtaaagtttatcaagatttgatgtagttggccttgcctgtagacacatcacttggttgtagaaacagtttcacaggtaataaataagtaaggcctacggaataaggcctatggaaagctcagcagtccaggagggcggagtggacaggagagtggggctcgtgcagttggagcgtccctgctctgggtagcctgaggtttgctatttgtcatccccaactgtcttggatgtgttggcacacctggacagatgaccacacgtggacaccatgtttaggaagcagaattgggatcatatcatccgcaccgctgtgcagctttccatttgtatgccttccttttgctatcatattctggagatctttccattttggttcatgtaattaaatcagtctcatccatgtgaatgacttggtgg

SEQ ID NO: 29486 - DNA, 2178 bp, Artificial sequence
  DNA replication origin
tttctccttcattgagtcttacatgacacatctctggaagacatactgtaaaagaaatcacactttaaaaaatttccagaactagtcttatacagaagcctatggtttataattgttgtaaaattgtagaaacatgctagttctttaattgtttaatgttcttaaagataaacatctatgactttaaaaagcagattttaaaatctatttttaaattaaaataaactaaaataaaattagctttttatttttaaaaataatttttcgagtcagtatgttcagttaatgaaaacaaagcagaaaatccggggctgtgagctgctgtctgagctgcccagtagccaactccacaggtgtgctgggcacacagagccctgtcacctgccctgtgtcctggatgcgcgcagccacgcgggcctgcatcccctgtcgcccgccctgtgtcctgtgtcctggatgtgcgcagccacgcgggcctgcatcccccgtcacccaccctgtgtcctgtgtcctggatgcacgcagccacgcgggcctgcatcccccatcacccgccctgtgtcctgtgtcctggatgcgcgcagccacgcgggcctgcatcccccgtcacccgccctgtgtcctgtgtcctggatgcgcgcagccacgcgggcctgcatcccccgtcgcccaccctgtgtcctgtgtcctggatatgcgcagccacgcgggcctgcatcccccatcacccgccctgtgtcctgtgtcctggatgcgcgcagccacgcgggcctgcatcccccgtcacccgccctgtgtcctgtgtcctggatgcgcacagccacgcgggcctgcatcccctgacgggcaacactccatgctctgctgcatcctgtttacaccactatctctgtccagcttcgaagtacagacaaaggatgttaacatttacctatataaacgtgagcatgtgcgtgccctggatccctgcagaccatgtgacataacgaatgcaccaaccgaactgtccacactagcattcaaaggacaggcccaaacatctttaaagttaaaacctcgggtcactacaccaaaattacaatgaagcaaaatccaaactgatggcgcacctgcaggaagaaaataagcccctacctacaaaacttaaaagaccatttttcttgtccccaagtcgatgacgactgttggatgaggcccatccaggtgactcgcatttttattacaatgattcaactttagcttcaaataagaggggctttctttttcttttctttgttctcgaagttatttaaagaatctcattcaggtgtagaacccaaaaacctggatccaaaatgccaagcgaggcaagcagtactccactgccttcttgtgttccagagagtgaaaggaaagaataatcagctctcagcactgatagtacagaccagtcagttttaatgagaaagaaccaacaggtggggtgatttcaacacacagagagggggccttagtgacgcccctgctgctgcaaggctgtgcccgcccttgagggttgggctggctctgagcagatgcagccgctctaaacagaagggcatgtgataccgcagggggcagcttctcgcactctctccgggggcctcgtcacaactcagagccccttaaggtgtctgcatctgtgctgcaagattacactcggactccccagctaatccctcacagcaaggagtgagccctgggaaccccgggctattttaacagcatatgatttggaggtaatactctctgtgacttacatacttctaatcttcattcaaaatatttgagtcccggccgggggcggtggctcacacccgtaatcccagcactttgggaggccgaggcgggtggatcatgaggtcaggagtttgagatcagactgacaaacatggtgaaaccccatctctaatttaaaaaaaaaaaaaattagccaggcgtggtggcctgcacctgtaatcccagctactcaggaggctgaggcaggagaatcactagaacctgggaggcagaggttgcagtgagccaagatcatgccattgcactctagcctgggcaacagagcgagactccatctcaaaatatctgagtcccaaaataaataatccatagaagcaccttattattcagaatgctaatcaatttttaactttggagact

SEQ ID NO: 29487 - DNA, 1195 bp, Artificial sequence
  DNA replication origin
gtgctgaccttaaaccatgccacagatttcctggtcagattaaacctaaggggctgaatccttccctgtgtctgtccttctgaagggaggatttttaaaaatgttctgccttggggcctgggcaaggggcagagatttgcttgtggcccctggtggctggcaagcagaggctgcggaggcccatgctggcaaatgggaactgtcccactgcaaggtccccggactcccaaacccagactgggcgcaggccagggtgacaccatcagatgccatccaatgtgaaccggggccgcgggaaacagcctcgatcccacacagatgctgctcaatgtgggctcccagcccaggccagccaggcctcctggcagcaccggtacagagccccgggtaaaggagcacgaatggagtgaaagccgctgaggcgctagaagagcacctgagtacctgagtccctgcggcagctgcctggtagctcctggagcgcgagacctcggccccgctcctcctgactcccaagtgccagggacagtggcctgcaagcgaacagggagacaggcaggggtagagctgacctcagacgagaacgggtgaccccaagcagggaagcgggaagcagccacccaggggaagaactccagagaacattccagagcggggagcagcatcggcctgggccaggaggggccacgtgctccaggaaggtaagggaaccagcgtggccagagcagggaacatagggcagacgagggacaggagagggtggagaaccaagcagggcccagtcacctgggcagaaagcaggcgcccacgcccagcgtggtccgagctgaactggcacaggcagaggggactggcagagggacgggcagagggcacgagctgagggggcacgggcagagggcacaggcagggaggtacaggcagagggcatggacagagggacagaggagacgagctgaaggggcacaggcagagggcacaagcagagggatgggcagaaggagcacgggcagagggcacaggcagaggggacgggcagagggcacgagctaagggagcacaggcagagggacaggcagagggacaggcagagggacgggcagaggggacaggcagaggagacgagcagagggcatgagctgagggggcacggccagagggcacaagctgagggggcacaggcagagggacgggc

SEQ ID NO: 29488 - DNA, 1616 bp, Artificial sequence
  DNA replication origin
gggaggggagactcttgcagcctcactttggttcaacttcagggtcagaagagattgggcagctgctgagcttccaagcaggaatgtgagttttcccgtttatgatcatctgtggagctttcttccatcacacggggaggctttgaaaaggcagcctttcacataccgtacttggtcaacctgaggacaacccggagatgccgttacacagagaaggaatccgtggttcagagaagactagtgacttgtgaagggtcagctaggaagctgagagcccacgcttgggagggagggaggcggagaggtgtggaggggctggcgggcgtcactgcctgggcaggcaggtgggaagtcccactccatcgtcacaggagtgtgctttgcaggcaacctcaggccactccaggtgtctgggcaccgtgtctcctccatgtggagtgtgggcctgtccacgggtccttgctgtggcctcactgacagtgcagaacgtggcgcattcccacacctgaatgcgctgctctgggcggctgcattgtaactgccctgagaatgctggcgtcaagggcatgctgtgacttacactgtgcagaggcaaggactggcattgtgtgcacgggggcgacgccaggccggctgctgatgctagagcccctcacctctgcgtctttcttggtgggagtggctggccagtgggagagcatggctggcagtgaggtgtgagggaccccggggagggttccgctctgcaggtggctggggcaggtaccaactgtgtgcaaggatatcggtattgctggggtcccgggtccagggtgagcagagtgtgtgaccgtgttggcgctcaggtcccgaggccctgcagccccacaggcacgtggccgcttctcgggggtggtgggatcgtgtctgttccgcgtcagttctttcttgggcagcagtcggaggctccagcgctcttggtgactgcctcacaagttacgagggatttgcccagccctgcgtggagcatctttcccgactgtgcctgagcagagcgctctgctgtcctgaatgtgagcttatttgagccttggccatctgaggacctgtcttctgtttttcagaggactaccccaatggcacctggctgggcgacgagaacaaccccgagatgcgggtacgctgcgccatcatcccctccgacatgctgcacatcagcaccaactgccgcacggccgagaagatggcgctcacgctgctggactacctcttccaccgcgaggtgcaggctgtgtccaacctctcggggcagggcaagcacgggaagaagcagctggacccgctcaccatctacggcatccggtgtaagtcgggccccgccttgggggactggggtgtgcggggagctgggtcaggacccacatttcaatgctgaggacgctggcatcagtagcaccggcacggggctgcgtttctccaggcggtttgaaatctcagcccgaggatcagtgctcgaggggatggatgagctgttgaccctgatgtgcttattacgcacggcatgcccgcaccaaaatacctcatataccccatcatatatatacctactgtgtacccttagaaggtgaaaaactcct

SEQ ID NO: 29489 - DNA, 1847 bp, Artificial sequence
  DNA replication origin
ttgatgggcgctcaggtcctccttgccagcgtccatggtccatttgctccacagagcccgtctgcttcagaagccgtcctcctggcttctaacgaagatgtaaagtgaagcagcagcaaacgcaagagacacgaggcccctggcgggagggtgtgggagggtgcagtggcctccggcaatctgggctctggagagtcacctcaggggagcgtgaaatgtaaatctgatctcgaaacagggcgagcgaggcagagcattcagcgtccaggatctcagcatgccgggggcgtccgggatctcagcgtgcggggggcggggcgtccgggatctcggcgtgcgggatctcagcgtgcggggggcgtccgggcgtgcgggatctcagcgtgcggggggcggggcgtccgggatctcagcgtgcggggggcggggcgtccgggatctcagcgtgcggggggcggggcgtgcgggatctcagcgtgcagggccagctgttccagcaggaaagagccttgctcctctgggaagcacagtgtggcccgtgagcctctgtcaggagcagtgggggagtggaagggctccgctgttccgtagctgctgtgaaaatggggtctgagtaagactggggtgtcgtgctgactgcaggtttttctggaagctgctgagaggtgggtccaggtcccacccacatgcgtgtgagcaggtcatggcatcttcccatgtgccatgtcttgtcccaggcgtgtgccccagctgtcagacaccagcgggcgcccatcctggaccctgagggtagtatcagataactcctgggagaccacacgtggggcctcctcacagcttctcagcggtggagtaaagcaggtcaagaggatcagagggtcatggggcaggggtcaccctcagccttcttctgaagggccacacggcagatatttcaggctttgcaggccctggggtctctgttcaactgcttagctctgaaagcagccacagacgaggagtcagcgcatggtcgtggatgtgctccaacaggacactgccttcagaggcgggcagcaggcccaccaccccctccaccctctgctttagggcatggcgtggccaggagcacacatctgcgcaccagaccacgtgatgtgcttccagcttgaaacccgggggttgcttcgtgctggtgcttgctgtgtggatcacagtgtggagtgcgttgagatatatagacgaatgagaaatggccctgatggcagagcgtgcggtcaggtagatagaaacgtctgcaacctgagaggtggcattgtggggtgtcgcaggagtgtcaggctgggctacaggttggaggcgcagcctggacagagaggagtgggtgctctttggagaggatggtggtgtgtgggatgagcgtgctgtgctgtgtggggcagtggcattcggggctgggccctgttcccaggtgaggagtccctgctcctcgggggagaagacaggggccttggatgtgaagctggaggccggctggctctgccttggagacggtgccttggattgtcaggctaaggattcgggctttcagggcattggctgcaattcttttattaatcgagcacagggaatgttccagtgaggtgacaggggcatggcagggcgatactcagagcagagtccatggcggtggggtggctgtgtctgtattcagggagtccatgtagggcggtggaaggcactgtatggggcagaatggggcaggctgcgattccttgcgtgttgtggctatgagttgaccttctctgctgagcttctccttgcttgggaagtgctgccaacctcgatgggggtctggaggccggaga

SEQ ID NO: 29490 - DNA, 2861 bp, Artificial sequence
  DNA replication origin
caatcattcaggggtgtgtgtgcggagggggtgggtgggtgtatggattacagatgggtttaccagaacatacacaaaatacctcctagcttttccagtgatttcacattgtttagcctataaacatatataagctttgttcgtgcacatcttaggtaacattagctacatctgtttaaaaaaaaaaagggcaaaaaagggcaaaaaaaaagtattaaaatacacacgtactagaaacagtactaaataatttcatgattcatgatctaagcagcatgattaataatcaagccttgaaaagcttcccatgtgactgaaaatcttccaaatatagtgaaagaactgacccagatttgaacatctcaatagatataataccccctaggaacagagtttggtactaactgttcaaaccatactgcacattagattcaatctgcagaatccaaattcaacactgtgaaggctttatcctgaagcaacactgaggaccttccatttctatcacacctaagctactactcaaggcctacatagtaaggacagaagccatgcccactgaccctccataaatattcctatgagctaggcaaaggaagcactgtcatttcagtctcgacaggaagagggtgagaggccaataagtagatagattagaaaacaactcaggataatcaggaaattcacttgaccccttgacggtgctggtgctggtgctggtgctgttgatggctgtgatagcactgggagtggtgggggtggcggaggtaagggcaacggagagggtgacagggacaatggtggtagaggtcatgctgtgatagatgtgttgttggtagtggtggtgaggatgagggacataatagtggtggaggtggtggtggtagtgtttgttaaggtggttgtgttggtgatgatggagatagtagaggtggtggtggtagtggttgttagggtggctgtgttggtggtgatgatggagatgacagtggtgaaggtggttgtgttggtgatgatgatggagatgacagtggtagaggtggtggtggtggtgaaggtgactgtgttggtgatggtgatgatagtgaaggaggtgggggtggtagtcgttagggtggttgtgttggtgatgatgatgatgatggagatgatggtggaggtggtggtggtagtgtttgttaaggtggttgtggttgtgctggtgatgatgatggagatgacagtagaggtggtggtgaaggtggttgtgttggtgatgatgatgatggagatgacagtggtagaggtggtggtggtggtaaaggtggttgtgttggtgatggtgatgatagtgaaggaggtgggagtggctgttagggtggttgtgttggtgatgatgatggagatgacagtggtagaggtggtggtggtggtgaaggggactgtgttggtgatggtgatgatagtgaaggaggtgggggtggtagtggttgttaaggtggttgtgttggtgatgatggagatagtagaggtggtggtggtagtggttgttagggtggctgtgttggtgatgatgatggagatgacagtagaggtggtggtgaaggtggttgtgttggtgatgatgatgatggagatgacagtggtagaggtggtggtggtggtggtgaaggtgactgtgttggtgatggtgatgatagtgaaggaggtgggggtggtagtcgttagggtggttgtgttggtgatgatgatgatgatggagatgatggtggaggtggtggtggtagtgtttgttaaggtggttgtggttgtgctggtgatgatgatggagatgacagtagaggtggtggtgaaggtggttgtgttggtgatgatgatgatggagatgacagtggtagaggtggtggtggtggtaaaggtggttgtgttggtgatggtgatgatagtgaaggaggtgggagtgggagtggctgttagggtggttgtgttggtgatgatgatggagatgacagtggtagaggtggtggtggtggtgaaggggactgtgttggtgacggtgatgatagtgaaggaggtgggggtggtagtggttgttagggtggttgtgttggtgatgataatgatggagatgatagtggtggaggtggtggtggtagtgtttgttaaggtggttatggttgtgttggtgatgatgatgatggagatgacagtggtggaggtgggggtggtagtggttgttagggtggttgggttggtgataatgatggagatgacaggggtgatggtgatggtagtgtttgttagggtgactgttggtgataatgatggagatggtagtggtagaagtggttgtggtggtatgatgatggagatgatagtggtgaaggtggtgatggtagtggttaaggtggttgtgttggtgatgatgatggagatgatagtgaagaaggtggtggtggtagtgattgttagggtggttgtgttggtgataatgatggagatgacagtggtgaaggcggtagtggtagtggttgttaaggtggttatgttagtgatgatgatggagatggtaatggtaaaggtggtggtggtagtggttagggtggttgggttggtgatgatgatggagatgatagtggtcgaggtggtggtgatagcagttgttagggtggttgtgatgatggtggcaattatgataatggtgaggatgatggagatgacagtggcggaggtggtagaggtggttgtgttggcagtggtagtaggtggaggtgatgatgatggtggagctctgggggatctgcaggcaatgttcaggaatcatgagagttgagttctggatgtatccctgactttaactccttgaacggtcctagaaaagc

SEQ ID NO: 29491 - DNA, 1446 bp, Artificial sequence
  DNA replication origin
cacagctgctcaccacggcccttgggtcatgacaggccagcacgtggggggcctgcaggcctgtagatgctcactgaagatggaggttcctagatttgtcatgtggcacaaaatatttttttgcatttttttctgtcattaaaaatcatttaaaagccattctcagttcacagctgtacaaaagcagccagcaggtttgctctgggcgccgtactttgctaacctcaatgtagagtgaattatacttcgtatctttaaaaggcttgtcttctagcattgcaggtgaactttgcttagaaacataactatttttaaaagcacatgtaggtgaagtctagtctttaaaagcacttgcaggtgaaagccctggtccggcgctgtctctgcagtgtgtttgcgggggccaagtttgctctgtgcagtgctgctgttgtccagggcaggtcccacggaggggatgctgcggccaggctccgtggggtggggcaccctgcgacgggctgctcctcttcccagggccaccggtgagactctcagtgcacagagtgcggttctgtgtggaggtgtgggatgcatctcctggccctcccgtagtggggtgcaaccccaagtgaagaccccgtggctcatgtcaagtgccctcagggctggggctgcccacccgcctgcctgggccgtcttgacaccggagctgcctgcctggatgttggagcgcccagtggattgagtgggaagtgggcctgggtgcttacaggcgatggggtcaccagagcccacccaggggcctcgcctgtcccccattctcattccatactctgggaggcggtacaaggtcgggagggccagcggggctctctgccaccaggactcacttccgcccatcttggaactgggcctcactttcctgcgagcttctgctgggttctcagtgcccaccagcagctcctttgctctccctgagcccttgaggtcactctgccttgggaatggggagggtttgggtctcagcctcacgctcacggtcctggcttggattttaggcctcagtggcactctgggagcgcttgtgctcttcatggttgccactgggattttccaggaggctctgtggcatttgctgttgctctctttttctgtggaagctctgccttgcttttttttttttcccttttttctgctctgtaggtgcttgagggcggagttgcagatccagcagagactcgatggcactctctcactggatctgatgcgacttgagagcgatggggagacaggatgtgccgcagagtcctcggtgtggccctgaggccgtgtccctgccgctcaggggacagcacgtgtgggctggggtctgcggtctgtggagccatgtgggttgtgggttgtgggttgtgggccacgccgctgacgggcccccgtgtgtctccctccaggtgctgcagggtg

SEQ ID NO: 29492 - DNA, 1415 bp, Artificial sequence
  DNA replication origin
gcggttctgcagtccctcagccgcgacagccgtgtgatgatgtcagtgctcacctgacgctcacgtcttcacagcggggcagctgcgggcccagagtttaaggacccgtgtcctgtagaaggtctggcccctcctctggcctgagcattcctgctgtgcccatgggcacggtggcccctgcagaggcacgccctgtactctgcccatgggcgcggtggcccccgcagaggcgcgccctgtactctgcgtggtgtttggttccacattgtcgccgacctcactggagatgcgctggaagcacggtgagggccatgggcgcagaacgcacaggcagtgaggagcgggtgggtgggatggtgaaggcaaactcgttcggcagcgcttattttatgtggtgtgaaccttggcctgtccgtgaagaacagtcaggcgtggctgcctcagcccctgccgaggacgcgtggcagccccccgtgccgttccagataggagcgctgcaggagggcagtgaggtccgcgcccaggaaactagatgtgggggccatgcctgagggcgtcctgctgcattataagtttctggtcattttccgatttcagaattgaacaaacctgtgtcccatggttggtgtttacacccctagcttcctgtaagctctctctgttaccatgccctcctggcaggccccaggtgaatgatttaattaggatccatcgtaacagccaaggaagacggcgtgcttaaggggccgctttccctgcagaaaaccccagcgtggttggacttggtggtgagcgggtttgcccatctgaggccagacaactgcagggtgcgttagcttgtcaccaagggcccagctctctgccttaccatctcagcttgtcctcaggctagctctgccccactgggaagtgaccgaaggccttcatggtgactctgcaggcgtgactgcacccaacagagacaggtttctggttgagcctccttatccacatgaagcccccaccccagtcatgcttgggaatggtcttgcatcttgcatgggtcagagcagggtcacgcgcttgagctcgttctaggaaaacctgtggctcagctgtgagggcctggctctgagaagatgggttcccttaggagggaaggcaggtagctggcctgtgggggtggccaatcctcaaagtggagagtggggcctgttccctggagcagtgggttgggagggtaggggggtgccatttgcaggggaagacacttgtcttaatgcgcggtggcctgtgggtgtcacaggctccctgaaccatctgtagcagaggcagcacctccaccagcctctgcccagaacacaggtctggccactgtccttggagggcaagtgagtcccagccagcccagacctgtgccccactgtccccaccca

SEQ ID NO: 29493 - DNA, 974 bp, Artificial sequence
  DNA replication origin
ctggcctcggttcatccatcacactcacggctgctggatgctgatggtctcagatccaaccccccggggaagatgggccgggcaatccatcatccatccgagccttcgagccggatgcggcgaaggtctagtctgactccagggaccagagatggaggggagcttgccacagcccccatgccattctgctgaggggcacccctgccccgtgccaggctgacgtccacaccgtcctgctgttcccaccagctgagctgaccgcctgccgccaagcactcagagagctgactctcacccatcttcccacagcccggctgctgggggagccaggcaggcacccgcctatgtgggagagcagaggcgggtgagtgtggggtgggtggggactggctgctgggggagccaggcgggcacccgcccatgtgggggagcagagggaggcgagcgtggggcgggtggggcccggctgctgggggagccaggcgggcacccacccatgtgggggaccaaagggaggcgagtgcagggcaggtgggtgagtgggtgtggctggggtgcctgtggggtttcttttgattgctttggctgatgaacagggaggcatccccagtagtggagtggaggtggggaggcggtgtacaggttcaaggcaaagggaagggaagtggggctgccgggcagtatgaagaggctgcctggaagcctgtggtttcacagcaaaaatgcaaccaggtgtgcgctgcttctcctgctctcaggtacagggcaggcgaaggttcatgtatctctgcttggggctttgtctaggtgagtcctacgaggtgagtcctcggaggtgcgaaggggttgagggtgtgtccacgcagaggggagcgcgggtctgggctcctggcccggctgaagaaggggccagggcagccagccacaggggagacggcagaacaggggtcagcacagtgtgctctgcaatccac

SEQ ID NO: 29494 - DNA, 840 bp, Artificial sequence
  DNA replication origin
gaatccctcagggcgccccaggccaggctgatcacagcagagcggccttagcaaagcttccagcttcccccagcctttgccgcacgtctgcaatggggacttttcaaagctgatctcggtgcagtgggcgtagctgattccggccccgggctgcggagccaggaaggaaagcctgcgtctgctttttgctggagtttagcacagatggcaatcctgtgccgccatgaattaagtgggtttcaacccagtgctgctctctccagccagggccaggctcctagaggggctcacagggctcccaagctggactccctgccccagctccttcctcttccccggctcccagcagagcggggctgtcatttcaccaagcagccatgggggtgggggccagagccttgtgggctcatgggtgtggggggagtgaggtgggtccctgcccgtgggggaatgtgggggcccagcggtgctggaacaggagtgattctgcccccaagcaggaaacacaaatcaatatgtgaatgtttggggttgttgcaactggggagggggcgatactggcaattagggggtgtaaatcagagggaagagggagggagggagaaagaagggagagaggaaggagggagggagggaggaaggaggagaagaaggtgcccaagcccccattccccaggagaggtagtgcccaggactatggtgccctttgcagggccgacctcccatctccatggcgtcactctctttccttctcggggacttggggtgaccatgagccgtactatcgaagtacttactgtggaaggtggaagagctgaggagggcgcccgacaggatccc

SEQ ID NO: 29495 - DNA, 984 bp, Artificial sequence
  DNA replication origin
cccaggactatggtgccctttgcagggccgacctcccatctccatggcgtcactctctttccttctcggggacttggggtgaccatgagccgtactatcgaagtacttactgtggaaggtggaagagctgaggagggcgcccgacaggatcccccaggacaccctggcccattcggcaccattcgaatgcatgagatcgcaggccctgtgccggtgcccggggcatgaggggcctgcccgtcctgcagggtgctgctcagatgcctcgaccctgggaggcccctcctggccattcttgcaggcctgccccagcctgtgccttctgctggggcagggcctcaggcagcagtggacagtggccaggagggcgccgctcaggttgggagaggcccgtgggggatcagcctccccggatcccggggtggggcctagttacacacagagataatgcagactcaggcagtgcgcaggcaaggccggagtgccgagtatggtacaggaaacgcagtgtgcgcagctgcgctgcaccgtggtccacacagccaggctctttggtgtgtttcctgcacacaaggacattcacaagccctcagcatcgtcagaatcagggagtggacaggtccctgcaaggccccactgcagcctgaccactgtccccacgaggttctgagagcggagtctgatggtgtcacgcccttccccaagccgccgtctctcctccatctctgtcagcctgtgcaggctcctggcccctccgtgctgtgggcactcggactgctttgcctctggattcctggtgatgagatcctgggtgggcggggacagcagggggcgaggctgcgcttctgcaggtgtcctggcggcgggtgtaaaatctcaccctgggcggtctctggtgacgtgaacgctgacggtttaattgatgccgtgtctgcagcctcccctgcaacgctgtcctttctctctattatgattaatccgtgt

SEQ ID NO: 29496 - DNA, 1078 bp, Artificial sequence
  DNA replication origin
cctgggacatagacgcggaggcagagattacagggaagcagccacaagtcagggcacgcctggcttgcagacgctgcagaagcaggaaggaccctcaggagagcacagcactgtagcccttggctttgtccccacagggcccatgttgggctccggcctccacaccacattttaaggcccttggtttgtgatgtcatggcagcccaggcgcctggtaatggctgagggctgaggtgccctcccatgccctgcacacaggtctcgctgaccccagagtcaactcctccatgcgatctgtatgtcatttggaggtggatgcagggtagagaagagaagactttcttgaggatttttgtgcccttctctttgaagaaataaggacatttgcacgtctgtggggatgtggggatggaggtgcacgtctgtggggatgtggggatgggggtccacgtctgtggggatgtggggatggaggtgcacatctctggggatcccaggacagaggtgcacgtctgtggggatgcggggaggggggtccatgtctgtggggatgtggggatggaggtgcacagaggacgccttccagtgagccctgcaccgtcacactgtggccctggccatccctgtgggacagcgtgtctgggtctggctgctggtgcagcccatctcgattctggactgagattcagtggtcacacccgacgtctcctgggtgcaggcagaagacagggctctggggttgctgcccagaattcaattgctctttccaccctgaagaatcaggctgtcaagttgcacaaacctggtgaaggggacttctgggggtgaggatctttgggggttgagttgctgatgtcctaggatcttctccccacctctgtttccccagagaactctcggctcaagggtccccacttcagtgtgacttccctgaaagcaggtggtggtgacgctgtagggtgttggcctcctttcctggcctcaccctctttcagggccttgcccactgtatggggggccacgcatgtgtttgctgaggctaggtcatcatgggcaccaatagcttcttgccctcact

SEQ ID NO: 29497 - DNA, 801 bp, Artificial sequence
  DNA replication origin
ttggggcgtttattccaaagaaatgaagacgtatcttcatgccaaaaaccgtgcagctgcatttgtaacaggcagaacgtggagacaacccaagcgtccttcagtggacacacgaatggccacaccacggaacgctactcagccgtgaaaacaaacagaccagctgcacacagcaacttggaccatctccagagaattctgccgagtgggaaaagccgacctcaaaaagcctgtacatgccatgacgctgtttatggaactggcgtcatcaaaccagagactgagaacaggttggtggtttgccagggctggggactgtgggtcgggggagtaggggccgcaggggggcagctggaggcagcctgtgatgaggggaatggttagtgctttggtggtggtggcagttacacgaatctacacgtgtgataaaatgtccttgcctgaagtgcatgcgtgcacacacacacacacacacacacacacacacacacaccagggcatgcagagctacgagaatctgaaccggccctgtgggtcatgccaggctgatggcttggcgtgctgctgtgttggcacgcctgatgctctgaagggtgtggctgggtgggagtgagagtcagggatgcgtgagggccagggatatgtgagagctggggacgtgtgagaactgggggcatgtgagggccggggatgtgtgagggccggggacacgtgagagctggggtcgtgtgagagctggggacgtgtgagagccggggacgtgtgagagctgggggcatgtgagggctggggatgcgtgag

SEQ ID NO: 29498 - DNA, 1819 bp, Artificial sequence
  DNA replication origin
aataaaagtgatagccaacaaagaggcaatctgagtatcaaaaatataacaattgcagctggacccaatggcgggcacctgtagtcccagctattctggaggatcacttgaacccaggaggacaaggctgtagtaagctatgattgcaccactgcactccagcctgggggacagagtgagacgccatctctaaaatatatatttatacacacacacacatatatacacagagttaagcatatatatacatatatatacacatatatatacacacagagctaagaatatatacctaaagtatatttatgtacacacacataaaactgtggcagactaaagcatacaaatatgtgtacaaatcctccagctcctgaccaaactgactgtgtttgccttttggaggttgccggctcacacagggtaaatgcttgaccttcttattttattgaccaactatccaagtggctgccgtggccgtagtgagtgacagagtgccatctgagtggctgccgtggccatagcaagtgacagagtgtgatctgagtggccgccgtggccatagcgagtgacgggaatgtgatcagagtggctgccgtggccgtagcgagtgacggagtgtgatccgagtggccgccatggctgtagtgagtgacgggatgtgatctgagtgactgctgtggccatagtgggtgatggagtgtgatccgagtggctgccgtggccacaccaagtgacagagtgtgatccaaggggccatcgtggccgtagcaagtgatggggtgtgatcagagtggctgccgtggctgtagcgagtgacaggttgcgatcacagtggctgccgtggccctattgagtgacgggatgcaatccgagtggttgccgtggccataccgagtgacggggtgtgatctgagtggccactgtggccacagtgagtgacagagtgtgatccgaggggctgccgaggccgcagcaagtgacagggtgcgatcagagtggccgccgtggccgtagtgagtgacagagtgtgatccgagtggccgccgtggccgtagcgagtgacggagtgtctacactgtttatttggcttctgtggaagtttggcaaaaggaagaggaatcactttgatgagaggacagggacgcaccatctctgtacgcgttaccacgagcctctgttctagtggccagtgagtaaaaaagaagcgtattttgacaaataaattcctaatcataaacagtaaacttcagcaaacccaggacctagtgggcgagtatttgcacagttatatcagaactctgcagtgcggcctgcaacctcctggccaatttaggattaggaaggcagggcttaaaagtcactgaacaacagacaaaatgatatatgattccttaggtcattggaataaattatagataagcttaaatatgtatggaattttgcctactcaactctcacagtggcccagggccggatttcagcctgtgagccggggttgtgacgtgacagccagacttcaagggcccatctggccaaggctgagctctcttcaaggtcaattttgtttctttgcgaacgtttcattctggaagttcactgagccagcccctccgatggccagaatcgatactgaaatgttcggctcatgacacagcgctggcgacagcggcttagtttctctctttaactctatgtttttatgtttggttggtttttgtttcgagttttaataatagggtgaactcctcggagggtttggacaaggaccaaagtcagtgtaaggagagcaccaagtacagcgcccccaccccccaacctc

SEQ ID NO: 29499 - DNA, 1214 bp, Artificial sequence
  DNA replication origin
ccggggccacagacagcgatgtccacacatggagaggagagtggccacgaagcatcggaactccaggccgtgattcaaagccgatggagaggctgggagtgccgtcctgccgctgcccagcttcccacgggcggagcatcgctgccctgtcttcagcagccccggagatgcgcgggccgggcaggagccattagaggctggcaaggcagcatcccacccagagcgggcaggtgggcgcgggcaggtgggcgccccaagccacccaccaggaggggaattccccaccaggaggtcacagagctgaccccaaagcacagccgtgtcccagggcagcatctaggcaacagccaaacccgtccctgaccccatccctggacagagtgtccaccaaagacatgcagtggacgccgtgtggccaggtcagcccctgccttctgcgagcggcccctccctgcactggcacgtggggtccaggagcgccccagcctgcctcgcctcacaggatgcccaagcccaaggggcattcggtattgttttcagaaatggggaaacataagaccttctctgcctgactatgagagacccggtgaaggggtggtttaggagaaggcctgggcccccgggaaggcagcgccgagaggttctaacaacaggccacgggaagggaaagccgagaggttctaacaaacaggccccgggaagggaaagccgagaggttctaacaaacaggccccgggaagggaaagccgagaggttctaacaaacaggccggcccctctgcatccagacaggtgtcacaagggcttaggcgacacaccagccttggtattgttttgacttcttttgtttcgtttttcatttttttcaacagtccctggctgagaaaagcagtcacttttgaaatttattcaacggggtgtgattctgcgccttactcgacacggaatggcccagacagccggttctgccgcacgtttgttttgaaaatgccaactggttccaaagcaattgatttccaggagacgatctgaacatgatgcaaatttgtgtttacctttgtgcaatttcacccgccagaaatgccaggcgaacgccgcgctgcccgccgtggaaccgagccacgcaggaacaggagaagcacacgcccctcgcacccccgtccccggctgcccgggcacctcgtcctcatcgggacgccacttccgcctgtctct

SEQ ID NO: 29500 - DNA, 2123 bp, Artificial sequence
  DNA replication origin
tcactttccttgccctttatataaaggtacaagtgatatcttaattatttttgtgttaattattcactcaattcagctatccaaaaaatacttagtgcctactccaagctgggtattagaactttgtaaactcagcatgtagcaagagtatagcaacacaaggccctttaaagttggatggacggatggttggggagggagtaggtgttggatggatgggtgggtggatgaatgggtagatggatgtgtggattgatgggtggctggatgaatggatgtgtgggtgggtagatggatggatggatgggttgatggatgcatgactgggtgggtgggtggatgtatgagtggcataagtggatgaatagatgggtagataggtgggcagttgtgtggatgggtagacggatggatggatggatagatagaaggatggatgggttgatggatgcatgactgggtgggtgggtggatgtatgagtggcataagtggatgaatagatgggtagataggtgggcagttgtgtggatgggtagatggatggatggatggatggatagatagaaggatggatgggttgatggatgcatgactgggtgggtgggtggatgtatgagtggcataagtggatgaatagatgggtagataggtgggcagttgtgtggatgggtagatggagtgatggatggatggatagatagaaggatggacagagaaggatggatgaatggatggatggatggatggatggatggatggatggatggattggtaagtgggcagatgagtgggtgagtggatgaatagtagggtagatggatgggcagatatgtgcattggtagatggatggatggatggatggatggatggatggatggatggatagttgggtagatgggtgggcagatatatgggtgggtggatgtatgatggatgggtgagtgaatggatgggtggatagatgcatgagaggatgggtaagtggatgaatggatcggtggatagatgcctgaaagggtgggtaagttgatgagtggatgggtggctggatgcagggatggtagatgtacagacggatgagtggatggataggtaggtaagtggatgaatggatgggtagatgaatggatggatggatggatggatgagtgggtggatggatgaatggctgggtgggtggctggatgagcggggtaagtggatgaatgattgggtagatgggtgggtagatatatggatgggtagatggatgaatggatggatggatgaatggataagtgggtggatggatgaatggatgggttggtgggtgggtggatgaacggggtcagtggatgaatagttgggtagacggatgggtagatgggtgaatggatgggtagatagatgaatgtatggatggatggatggacgagtgggtggatggatgaatggatgggtgggtgagtggatgggtgggataagtggatgaatagttgggtagatgggtgggcagatatgtggatgggtagatgaatgaatggatgggtggatggatgcagggatgatagatgtacagatggatgggtggatgtataagtgggtaagtggatgaatggatgggtggacggatgcaggaatggtagatgtacagatggatgggtggatgtataagtgggtaagtggatgaatggatgcacggatggatggatagatgggtggccagatgcatgaatgagtagatggatgtttggatgagcagatgaatgtgtgggtggatggacagacagggtgggtatgtggcctgaacctcgctgttgatgagggcactgttgatactctgagttttttccctttttatgtttgacgtggattctggttcatgacagcacagtgccttccctggccagatgatttcactgtgctttatggctctgccagtggggatcacagggctggccatcagggcagggggtgagaaagcaggatgaggtcagaataaagcccttaaatcttcacagggaagcagctgggccttgggtttctgggtggtgggtctgcagtatcccctgtgactgaatagtgcatgagtccattggaggcaggaccagcacaggacacttcccgtggggttggatcaca

SEQ ID NO: 29501 - DNA, 1047 bp, Artificial sequence
  DNA replication origin
cacataagtgtgtgtgtgcatatactatattcacgtgtgactgtgcaaatgtgagtgtgtctgtaggtctgggcacgtgtatgcgtgtgtgtgcgagtactatattcacatgtgtgagtgtgcgaatgtgtctgtgggtctgggcacacgagtgtgtatgcgtgtgtatgcatgtactatattcacgtgtgtgagtgtgcgaatgtgtctgtgggtctgggcacatgagtgtgtgcatatactatattcacatgtgtgagtgtgcaaatgtgagtgtgtctgtaggtctgggcacatgtgtatgcatgtgtgtgcgagtactatattcacgtgtgtgtgagtgcgaatgtgagtgggtgtgggtctggtcacatgtatgtatgcatgtgtgcatgtattatagtcatgtgagtgtgcaaatgtgtgagtgtgggtctgggcacacaagtgtgtatgcatgtgtttctattgtattcatgtgagtataagtgcaaatgtgtgtgtgttctctgcacacacaagtgtataggtatgtttgtgtgtgcatgcattgtattcatgtgagtgtatgtgaatgtgtgactgtgagagtttgagtgtgcctgtgtgtctggctatactagtgcgtgcctgtgttcgtgtgcatcagtctgggtgtgcccgtgtgtgaatgtgagtgtctatgcgtgggtgtcccaatatgtgtgtgcctgtgtatccatgtctgggtgtgcctgtgagtgtgagtgtgcacatgggtgtctggatatgtgagtgcttgtgactacctgtgtgagtacccatgtctaggtgtgcccgtgggtgtgagtgtctgtgcgtgggtgtctggatacgtatgtgcctgtatgagtgtgtatccatgtctgggtgtgcccacgggtgtgagtgtgaatatgtaagtcttgcgtgtgcatgagtgtgttcacatgagtgtgagggtctgtgcataacagcctattgtgtgagtgtgtgcatgtggattgcatttatgtgagtccgtgtctgtgcacgcacgtgtccccgcac

SEQ ID NO: 29502 - DNA, 1073 bp, Artificial sequence
  DNA replication origin
acagacatcaaggtcttgtctactttgtgcaggaagatgacatgcggtaataaggaaaagaaaatgggaggtcctctgtctcatggaatttggggtcacaagtgtctctacaacaccttactgggtctcaactcccagcttctcaggagcaagagacaaagaatacaggtcagcagagcagagcccgaggggctggtccacagtccaagtcacacatgatgaggacagtattgagagtcatcacatgatgatggcagtgatggtggtaatgatgatggtggtgatggtgatgatggtggtgataaaggtgataatggtggtgatgatggtgttgataatggtggtggtgacagtggtgatgatcatgatggtgatgatggtggtgatagtggtgatgacaatgatggtaatgatggtgatggtggtggtggtggtgatgacaatgatgataatgatggtgatgacggtggtggtgatgatgatgatggtggtggtgatggtggtgatgatggaggtgatggtgatgatggtgatagtgatgatggtgatgatgatgaggatgatggtgatggtagtgatggtggtggtgatggtggtggtggtgatggtggtgatggtggtggtggtgatggtggtgatggtggtggtgatgatggtgatggtggtgatggtggtggtggtgatggtggtggtgatggtgttgatggtggtggtggtgatggtggtggtggtgatggtggtgatggtggtggggatggtggtgatggtggtggggatggtggtgatggtggtggtggtgatggtggtggggatggtggtgatggtggtggtggggatggtggtggtggtgatggtggtgatggtggtagtggtgatggtggtggtggagatggtggtggtggggttggtggtgatggtgatgatggtggtgacggtggtgatgataaggatgatgatattgattatgagagttgtcttagtccatctgggttgctttaacaaaataccgtaaattggaggccaagcatggtggctcacacgtgtaatcccagcacttcggaaggctgaggctg

SEQ ID NO: 29503 - DNA, 1379 bp, Artificial sequence
  DNA replication origin
tggggagacagggagaagctgagggagggactggaggccggtgtgggcctcccaggccaggagccaggagacagagagaaggggtgggggcagcctgaggccaggcacggctgagtggcggttgacgggtcctcccggcctccttccatcctccttcctcccccttccccgcttcctctctcttcctgtgctagacactgttcccggccctggggagacagtgggaacaagactagtcaggtgcccgcccttatgtatccccacgacgggcaaggggctttcaaacacagaggcagcaagctctggccgcagggatccctgcagtggctgcaaagtgtggaggccccggcgtggaggagggacgggtggaaacgcgcaggccccggcgcggaggaggcacgggtggaaacgcgcaggccccggcgcggaggaggcacgggtggaaacgcgcaggccccggcgcggaggaggcacgggtggaaacgcgcaggccccggcgcggaggaggcacgggtggaaacgcgcagggcattttttgggaatccttcccgggtggaacacagggggctggaatttaaacgtgcagcctgtggtgcgtgatttcccacacgccctttgctttggaacccacacttcttaactcagaggtgaagtacgcagggtgcaaataagacggtgaaaccactaaaggcaggaagggaggaggaaatggagctggaggtgggggttggggggcgggcagggcctgtttcgggccctcctgagccttgtctgccaggggacattcgaggtctgggcgagcatctggagcatcacccagcaccatcggtgtctggagggtgacatctgctttccagaaggagggccgcactggtctcttgagctgccgtaagaaagggccacagactagggtgctgcaaagcttcaggaactcctctctcccaactccggaggtcacagcccaacatcaaggtgagggcagggccggctccttctggaggcgctgggaagggtctgctcccttcccactccagctgtgggaggccctgacgatcctgggggtcctcagtgggcagctgcaccacgccagcctctgcctcccgctgcacgtggcctctcccctacgcctctcttctcccagcctcctaaggacccaccctaacgacctcacctcaccctcctcacatctgcagaggcccattttcacaagctcacatcctgcgtgctgggggtgaagccttaacatgccttttggggggacacaattcaacccaaaacaactgtccaaaaagactcaggactttaacaaggtggaagacgtttagcaccctccacccccagcacagacgcctgcgaaaaatctctggctcggtttcatg

SEQ ID NO: 29504 - DNA, 1527 bp, Artificial sequence
  DNA replication origin
aaactctccagaagatgagtaagagctggctttggtgtctttttggtcctttatctacttttatgtgttttccaaatttctcataatgagaatattttgcaaaaaaacaggagttgccaggtttggacactcaggatgagctttcaaaataagttacggaaaatattctcctccccaggggtgcgtctctgctttaatcagcttgtctgagagtagagagtaaaccaccattgccgtgccctctcctctgctctgacagggctgctatagggcttatctcgggaatcccgcagtagtcctgcggggcaggtgccattgtaaggcaaggccccaggacacacaccccagggcccagacccagcgcccatgccaggcgccgtgtgtgctgtctcacgggacccacagggcgacctgcgcagtggggccctcatcccgttgctcggagcctgcgaagccggcaggcagcaccaaggagcgaggcagggtccccctgctccacagcccacaccctcccagtgagccaaacagtgtcctccaaagccacgtcttcctgcaacctcagaagatgggtttatttggaaagagggtctttacaggcgtgatcagttcagcttagacgaggtcatactggatcgggggccctaaatgcaacggtgggtgtccccataagaaaaggaggagccacatgaagacatggaaggaacaacgccctgtaacgatggatgcggagcctggctgggtgcacctgtgagccaagttcccctaaggatggaggcagagcctggcggggtgcacctgtgagccaaggtcccataataatggaggcggagcctggcggggtacacctgcgtgccggggaacgccgaggacggctggcacccctgggccggctccttgatgccagccctctgctttcagggctgtgggggatgcgtttctgttgttttaagcctccggtgtgtggcatttgttacagcggtgacgggaaacaacgtctccatcattgttggggacgtcaacacagagatgaacatatggaaaatacgcatcaaggcaggcacccttgggagggagaaggggagacggggacacagggagatggggcagtggggagactcgagggagggagaaggggggggccaggccgggggccaggagacagggagaaggggagacggggagatggggagatggggagatggggagatggggagacggggacacagggagacagggagatggggagacagggagaagctgagggagggactggaggccggtgtgggcctcccaggccaggagccaggagacagagagaaggggtgggggcagcctgaggccaggcacggctgagtggcggttgacgggtcctcccggcctccttccatcctccttcctcccccttccccgcttcctctctcttcctgtgctagacactgttcccggccctggggagacagtgggaacaagactagtcaggtgcccgcccttatgtatccccacgacgggcaaggggctttcaaacac

SEQ ID NO: 29505 - DNA, 1270 bp, Artificial sequence
  DNA replication origin
ggatggaagggtggatgaatagatggatggatgcaaggatggatggataaaggaattgggtgaatagatgaataggtggatgcattgatggaaggatggatgggtgcatggatggatggttggatgcatgggtggatgagtggacaggtgaactgatggctggctggatgcatatatatatatatatatatatatatatatatatatatataaatgtatgtgtggatggatggatggatggatgagtcaatgagtgaatggatggatgtacgtatgggtgagtgcacggatcatcggtggatgggtgaatggatgagtgcatggatggatgaatggatggatggataggtagatggctgaatgggtgggtgggtggatggatggatggatggatgggtgcatgggtggatgggtggatgtgtggatggacagataggtgggtaggtggatggatgggtggatacatgcatttatgcatgcatggatgggtgggtgggggtttgggagggtgaatgcatacatggatgggtgaatggatggatggatgaatgactggatgggtgagtggatggttggatggatgggtggatgagtgggttagtggatgggtgaatgggtggatggatggatgggtggatgggtgaatgcatgggtggatggatggatggatggatggatggatggatggatggataggtggatagatggatggatgggtggaaggatgggtgggtggatacattgatgagtgggtggatgcatgtattcgtggatggatggatcagtgaattgatggatgggcaggtgcatggctggatgggtggatggatgcatggatggatggatggatggatgtgtgggtgtctaggcagatggatgtataagtgaaaggatgggttagtagatgcatgaatgcatggattagtagatgggtgggtaaatgggtttatggatggatagatgaattgatgggtggatgggtaagtggatgagtgggtggatgggtagctaaacagaggtatggctgggtaagcataaaacagtcacctaagtttgacaactggtgcatattatatgcccagtggcatggctcagaaagtttatgatttaggaaagcagaaaaacttatggtccccaggagatgtggaacttggtgccaatgacaagaagagaccctctgaagtagtgcacaaccctgggacaccaatatatcactgctaaaaggaagaccatgaactgatcagaagacccatcggaagactaggccttg

SEQ ID NO: 29506 - DNA, 930 bp, Artificial sequence
  DNA replication origin
cctggaggaggagggagctgaagcagccggtgactcactcacacgagacagtgggcggcggccagggcagagcgggactccccattgctggctaaaatccagacagcgccttggcctgaggtgtccctgacaggatgagggcggagtggcagctgccgaaacctgaactcctctgccctgcccccgtcccttgaacccacgcatctagtaggtcagcgccagaggaaatcctcgaagaaaatgggcgtctcccttgctgagcacagaaccgcagtcagccctgtgtgcccgctccctggatgaggacaggaaggacatgggggagaggccacggtcaccctcaggagcccccagacccactggaaagcagcgcagtgagcatctgagcagtaccgcctgtgcctggcgcgagggtgcgaggcggggggccgtgtggccaggcagcctagggttgcgccaaagcccagcaggtgtgggacgagcaggactggactgggaggggctcgggggagcggggacctgtgctgagcttgaggtgtggctgggctgggaggccggacaaaggtgtgtctcctctggccatgcaggggtcaggcggtggtgctggggagggggatgtgggaggaagatggggctgggatgaggggggaggaggatgtgggaggaagatggggctgggatgaggggccagggctgagctcagcaggtattggaaggtgccatggctctgtgaacatgcacaggtggggaggctggggtgggggcagagcaggggacagtcctggagccagcagacaggaggaggcatctctacagcaccccaggcttggagacagggctggctcacctcaaagggggccatgggagagaggaaggtgggcatcagggctggcctgccccggccccaggaatacgtgggagttgagctgc

SEQ ID NO: 29507 - DNA, 1816 bp, Artificial sequence
  DNA replication origin
ggatggtgggtggttgggtagatggatgaattgtggataaatgggtgggtggatggatatatgaatgagtgagtggatggacagatggatggatgggtgtatgggtagatgagtgggtggatggatgaattgtggataaatgggtaggtgaatggatagatgagtggttgggtagttgaatgggtggacagacggatggatttatgagtgggtgaatgaatgaactggggataaataggtgggtagatggatagataaatgggtggatggatgaatagatgagtgggtagatggatgaattttgggtaaatgggtaggtggatggatagacgagtgggtgggtagatggatgggtgggtggatgaattgcgggttgttagatggatggataaatggatgtgtggatgagtagatggatggatgagaagtaatgaatggatatgtggatagacgaatgggtgggtggatggatgggtgggtgggtgggaggatgtatgcatgctgggtggttagatgggtggatgaatgagtgggttgatgtagatggatggatgggtgggtaggtggatggatggtgactggatggatgaatggtggataaatggtgtggatggttgtatgctgggtggtgagatagatgaatgaacaggggggtgtatggatagatgagtggatagatgaatgaacaggggggtgtatggatagatgagtggatagatgaatgaacaggtgggtgtatggagagatgagtggatagatgaatgaacaggttggtgtatggatggacgagtggatagatgaatgaacaggtgggtatatgggtagacgagtggacagatgaatgaacgggtgggtgtatggatagacgagtggacggatggatgaacgggtgggtgtatggatagacgagtggacggatggatgaacgggtgggtgtgtggatagacgagtggacaggtggatgaacgggtgggtgtgtggatagacgagtgggcagatggatgaacaggtgggtgtgtggatagacgagtggacggatggatgaatgggtgggtgtgtggatagacgagtggacgggtggatgaacgggtgggtgtgtggatagacgagtggacggatggatgaacgggtgggtgtgtggatagacgagtggacggatggatgaacgggtgggtgtgtggatagacgagtggacggatggatgaatgggtgggtgtgtggatagacgagtggatagatggatgaacggtggataaatgggtggatggatagatagactggtgggtaggtggacaggcaggcacatggctggatgagtgagtgggtggatggatagctggatagatagatagatggatgggtgagtgaatggatgcatgaatgaagttgccagttgaaaccacttgctgcaatcctgtgtggtgttatgctagaaaagaatgaccttcagaggaaaacagtcatggttctgtccctcacaaccacattactctgcagtagttcctcaataatatccatccaacaaaggatttttatatagaacttattttacaaagtcgtgcacatgaaaagacgcacaatatcactaatcattgggaaatgcaaatcaaaaccacactgacataccacctcacgcccattaagataattaccataaaacacaaagctaaaccagaaaataacatgtgttggcaaggacgtagggacactggaaccctcctgcaaggttggtgggaatgtaaatggcaccgcatctgtggaagacggtatggaagttcctcaaaaaattaaaactatatctgctttatgattcagc

SEQ ID NO: 29508 - DNA, 1019 bp, Artificial sequence
  DNA replication origin
tggcagcacagtccggtgcctggcacactgtaggctcctgacatcattagtaaaccatggacaggaggctgcttctgaacctcttgtcattggaagcccctgccttgtgacttccttaggcccacaacacacctgttgggaactaccagccttggcgtctccaggcctttttgcagtgcagtcagaccaggtgtctacattcacacccacatgtgtatggctgcatggggtgtggggatgtgtacatgtgtgcatgtgtgtaaggacatgtatgtgagtgtgtgggtttacgtgacagtgtgtgagtgcatgagaatatcggtgtgcatgagagtgtgctggggatgtatgtgtgtatgtgaacatggatgcgtgagtgtgcatctgtgtctgggcatgtgcatgagtggtgagtgtgcatacatgtgtatatgtgtgcatgtgaatgtgcatttatgagtgtgcatatgtgtgtttccgtgtgtatgagcatgcaggcatgagtgtgcaggtatgagagtatgcatgtatggtcatgcgtgtgcatgtgagcatgtgtgtgtatgtgaaggtgtgcatgcgtgtgtgcctgtgagaatgtgtgtgcacgtgagggtgtgtgtgcatgtgtgagggtgtgcgtgtgtgcctgtgagcgtgtgtgcacgtgtgagggtgtgcacacatgtgtgcctgtgagcgtgtgtgtgcatgtgtgtgagggtgtgcgtgtgtgcctgtgaccatgtgtgcacgtgtgagggtgtgcgtgtgtgtctatgagcatgtgtgcacgtgtgtgagggcgtgcatgtgtgcctgtgagcgtgtgtgtgcacatgtgagggtgtgcatgcgtgtgcctgtgagcatgtgtgtgcatgtgtgtgagggtgtgcgtgtgtgcctgtgtgtgtgtgcatgtgagggtgtgcgtgtgtgtgtgcctgagagcatgtgtgtgagggtgtgcatgcgtgtgtgcctgtgagcgtgtgtgtgcatgtgtgtgagggtgt

SEQ ID NO: 29509 - DNA, 981 bp, Artificial sequence
  DNA replication origin
cttgctgagtcacggaagaggggcccatgggtggagaaggctcggacttgctgagtcacggaagaggggcccatgggtggagaaggctcggacttgctgagtcacggaagaggggcccatgggtggagaaggctcggacttgctgagtcacggaagaggggcccatgggtggagaaggctcggacttgctgagtcatggaagaggggcccacgggtgactgagcgacagttacaacttggagacatttccttccagcaaagatgcaaaggtggggcatgaaggcaggagcacggaagtctttgcatgtgtggccggggctgcctgcccagggaaggcattttcattcttcccacggatgcgggcccgcgaggtggggctggtagtaaagatcccgaggagaataaaaacacaccaagaaccggagcacttcacacacttgagcaagggagagtgacggctgcgtggcagggggtgggggggacgtgggggcagttgcagtgtgtgtgtgtgtgtttgtgtgtctgtgtgtgtgtttttgtgcatctgtgtgtgtctgtgtgtgtctacatgtgtatgtgtttgtgtgtctgcatgtgtgtctgtgtgcatctgtgtgtatctgtgtgtgtctgtgtctatgtgtttgtgtgtgtgtgtctgtgtgtgcatgtgtgtctctgtgtgtctgtgtctgtgtgtgtctgtgtgtgtgtgtctatgtgcatgtgtatgtctgtgtctgtgtgtctgtgtctgtgtgtgtgcccaagggaggcaggcgtgaagctaaggaagtcttgctctgtgttacaaatgtcactccctttcctaagagaccaaagagttaagaaatttttcaggtttgttgagatgctggactaagctggactaagcctcctgtgaatgccccctttgaaaaaaattctggggatggatggtaaaaaacaacaacaacaatcttacctgaaacgctcgggacc

SEQ ID NO: 29510 - DNA, 1583 bp, Artificial sequence
  DNA replication origin
agggggatggggacatggtggcagggggatgggggacaggatggcagggggacgggggacatggtggcaggggaagggggacatggtggcagggggatggggacatggtggcagggggatggggacatggtggcagggagatgggggacatggtggcagggggatggcgacaggatggcagggggatgggggacaggatggcagggggatggaggacatagtggcagggggatggggatggtggcagggggatgggggacatggtggcaggaggatgggggacgtggcagggggatgggggacatggcagagggatggggagacaggatggcagagggaggggggacatggcaaggggatgaggagacaggatggcagggggatgggggacagactggcagggggacggggggacatggtggcagggggatggggggacatggtggcagggggacgagggggcaggatggcagggggatggggaacatggtggcaggaggtcaggggacagagtggcagggggcctggccatggcaaagcccaggtgcttcacggggtggcacagtgttggggacgggccacccctgcagaggggagcgagtgggcgggcctctttactaagatacaaaccttggtcatcttctgagcatgcaggggacaggtgcaatatttttaagcaagagcagtgccaggtctgagccacggacaccagtcctctctataaagtgagtcagcaagcaaacagccccctcaccaccccttctcctcctaccccagccgacatggctgagccggcacagaggtgcctcccctgcacggcagtccaggccggcacggcagcttaaggagttcacctgcagagcagggggagcctgttgttcaggcacagagcacctcataggtgggagtgagccacgtgtaccaaacgaggtgttgtcatgggccaggtgtcaaaggccaggtgacatgaacaggtataatggaccaggtatcaaaggccagttatcataagccagatgtcatgcgtcaggtgacatgaacaggtgtcatgggccaggcatcacaggtcaggcatcacagactaggtataaagggccaggtataatgaaccaggtgacataggccagacatcacgggtcaggtgtcatgggtcaggcccacaagaagttctcgaagctttgataggactggggagtgctgggctttgcagccagaaagtctcccagggagggtgctgcccagccccacagagctgaggcccagagggaggaaggaacaacagtgcagggcggcgcagcttaacagccgggagcacagaggaggcaggtgcgtggggaggagtcccgctggaacagaatccgcctgcctgggctgggaatcagcagaggggagggtgggtcagaggggagggtggggcagaggagagggagagggtgatgcacagggaggagtttacaggcagaggtgtcaggcagagccaccctgagggaccgtgagaggacttgggatgaggacctgctaggagagcccgggggcctagcgtggaggagggcctcgcagagagccctgggggttggggtagc

SEQ ID NO: 29511 - DNA, 1542 bp, Artificial sequence
  DNA replication origin
tctgctgccataatcaacatctacttctggccaagagggaggttggctcagcattgaggagcttggtgatgacatcaggagccctgggatcttctcccatctcagcgtcctgaacgtccccctttcaccacgtgaggttccggaatcatgatcttattccgcccaccacagggaggctaagcgtgagtccaggctggtctgcctcccctgttaattcaggtcctggccatcttccggaggggaaactgaggctctgagagggaggcgacctgcctggtcatgtgctggtgagtggcccagcccaggcgagagctggtggtggggcttccctgccctcccctaggcgattctggccaagggaggtgggtgcgccgggaggtgcccatggccttgtgccgggatgtggcgcttgtgctggagcctgtgtgggcaccatccaggtccctgcgtggatcatgccaaggggaggggagcggacgggggggcagggcccttgggacaggagggcagtgctgtgggaggctgctcactgtgacacctttggagatccgcctggagcagctgctgtggctgccttgtgtttaaacgtggacagtgtttgaccttcggttactaaagcagctccatgattgcaccctccgccccaaggggggcgggaggaactgcccttctcgtgcctgccgggctgggccatggcagaagctgggggtgtctgtgtgtgatgtgggtgcacatggtctgtacgctgtgcgtgctgcatgtgcttgtggtgtgtattgtgtggtatgtatcgctcatggtgtgtatttgtgtctcgtgtgttgtgtggtatgtggtgtgtagtgtgtattgtgtgtgatgtgtgtgcaagtgtgtggtgtgtattgtgcatggtgtgtgtgcacttgtgtgtggtgtgtatggtgcctcgtgtgtgtgcatttgtgatgtgtgtaatgtgcctggtgtgtgtgcacttgtgttggtgtgtattgtgctgggcatgtgtgcacttgtgtgtggtgtgtattgtgctggatgtgtacttgtgtggtgtgtgtattgtgcttggtgtgtgtgcacttgggtgcagtgtgtattgtgcctgctgtgtgtgcacttgtgttggtgtgtattgtgctgggtgtgtgtgtgtacttgtgtggtgtgtgtattgtgcttggtgtgtgtgcacttgggtgtggtgtgtgcctggtgtgtatgcacttgtgttggtgtgtattgtgtagagtgtgtgtgtacttgtgtatggtgtgtattgtgccgggtgtgcgtacttgtgtggtgtgtgtattgtgcctggtgtgtgcacttgggtgtggtgtgtgtggtgcctggtgtgtgtgcccttgtgtgtggtgtgtgtgtgtgatatgtgtgtacttgtgtgtggtgtgtggtgctcatgtgcatgtcccatgcagcgtgtgtggtgttcgctgctacctgaaggtcacctgtgcgtgtagagcctcgctcagccctcttggctgtgaagcctccgtctgtctctcatggcct

SEQ ID NO: 29512 - DNA, 761 bp, Artificial sequence
  DNA replication origin
cacctagctgcaggaaaacaagctcagggttcctactgattctacattatggtgagttgtataattacttactatatattgcaatgtaataataatagaaataatgtgcacaataaaagtaatgtgcttgaatcatcccaaaaccatcctcctcaccccttgtccatgaaaaaattatcttccatgaaaccggtccctgaggctaaaaaggttgggaatcactgtaacagggggtgtcgggcaggggtggactgcctttgagagagcacgcgggcactgtctgggggtggactgcctttgagggagcatgctgtctgggggtggactgcctttgagggagcatgcgggcgctgtctgggggtggactgccattgagggagcacgcgggcgctgtctgggggtggactgcctttgagggagcacgcgggcgctgtctgggggtggactgccttcgagggagcatgcgggcgctgtctgggggtggactgccttcgagggagcatgcgggcgctgtctgggggtggactgcctttgagggagcatgcaggcgctgtctgggggtggactgcctttgagggagcatgcgggcgctgtctgggggtggactgcctttgggggagcatgcgggcgctgactggagagatgatgttcttctgcacgttggcaggttttaggttgtatttattggacctcactgaatggcgctcgagttgtacatttcgttgcatgtaaagttcacttgaaaagaaagtcaaggccag

SEQ ID NO: 29513 - DNA, 974 bp, Artificial sequence
  DNA replication origin
gagtttccacttgctcatctgggagatgacatcatggcgcccacctgtcaggagggcagagctggcccctagaggctacggtgctgcggcctcaccactccctggcggtgaactggggggatcttggggcgtctaggacagttggacataacaggtatgtgcaaggtaggaggagtgggtggctctttggacttggggtccttgaggatgcaggtgtccgtccctgggtcaggcttcctctcacgctgtggtgacccctgtgctgccctaggcacctggccagggctcggctcaaaaaccatttttttttcctggcatcaaacaacaacaacaacaacaagctctagaatacgaaagtggggatgaatacatcttcatctacagagcacagcacctgcaggccagcgcttgaggggtggcgtggtccgcgccctgaggacctgtgtgggtacaggatgccagctgggacagggggaaggctttggaaagtgagtgggagagaggagggagggctggaggagggagatagaggagggaggatggggagtgaggaagggaggaaggacagagggaagcttgagggagggagtgtcagggcctggagcccggctgagcccggtccaaggagacattccagacggatggtggcgcgtgactcagatgcctacggcccaagcgtttctgccccatcatctgaatggccccagtcgagagcaaaaagctggggtggacaggggtggcctcgagggcgtcctgcacaggggcacaggcacacacccccactgcaggccatacacaccggctcacacattcacgtgctgccatgggtggcgggcccagcgggagagtagccggaagccaccgggcccatgggtcggcagagggtctgggcatgcaggatccaccttgcccaccctctgtgaggctctgagcagcaacgcccctcccctgggaagtccccctgccctgcacca

SEQ ID NO: 29514 - DNA, 1191 bp, Artificial sequence
  DNA replication origin
gtgtgtggacacccgtccatcctgacaaccatgcaccttgagagcaaggccgcacccctgccacgtgtgggcccacgcctgccccagatgggctctcgagagaggagacctccgagcgaggaccagacctgtggccgagatgtggcatgtgggacgtttaaacactctgggagttttcaaagcaagcttcacctgtgatctcatgggctctttaatcccatttgctagataggggaagctgaggctggaggatgcaaagagcccatcccaaagatgtggcagttagtggtcgagcctgtcccaggtgctgactgctgccaccctctccctagttcagggtgggagtggaagggagagcagctttgggggccccgagcattggggtctgcacaacatacaggggtctgtgagcagccgggcagaggtgcagactcggcgctccctatggggcaggaagcccatctggacggcctctgatgagctcccacctccctgaggacggctcctgggtgcagcaggaggtgagcaggggcttgtgtgtcctctccccgttacgatgcgtgcaagcacagaggacagcgatcacggggcctctccaagaacgtgcgacctggctgatatggcgctagttattttaccagcctgggatttctggaacacaatcagtacccgtggactttgctgagtagaccctcaatttgggtctggatgctgcagagaaaagggcacaaacaggcccggccccggtgccccctgctccctgcccgccgtgtgtgcctgggtgagtcagcggcctctctgagtttccacttgctcatctgggagatgacatcatggcgcccacctgtcaggagggcagagctggcccctagaggctacggtgctgcggcctcaccactccctggcggtgaactggggggatcttggggcgtctaggacagttggacataacaggtatgtgcaaggtaggaggagtgggtggctctttggacttggggtccttgaggatgcaggtgtccgtccctgggtcaggcttcctctcacgctgtggtgacccctgtgctgccctaggcacctggccagggctcggctcaaaaaccatttttttttcctggcatcaaacaacaacaacaacaacaagctctagaatacgaaagtggggatgaatacatcttcatctacagagcacag

SEQ ID NO: 29515 - DNA, 1854 bp, Artificial sequence
  DNA replication origin
ggtgtggcctaaccacgggccttctggtggagccaatgagtgggcctgcccctcccccaatctggtctgcctcctgaagctgttttgggactctgcgaacggtatagaataaactaaaaggaactgcacatggcagtggggtttctgtgctggcatcgcagcacatggcattcctgccagtggacgcgaaaacgtgaattgaaaaaggggcaggggctgaaaggccccagaggctcgaggcttggctcacatttccatggcatcatctggggcctccaggtcctgggatctccctttccatggaaaatggggaagaactaagaaaccctctcgagttaatcaggatttcaatcaagcgggtttcctaaagtttcaagggccaggggtcccctggctgtggacaaagaccccagagggcgtttccttccttctcgtttctactgggtctgttcttgtttctaagaaagacttcaatttccaaacccgtgtgtgtgtgtgagagagtgcatgtctgtgtgtgagtgcgtgtgtgtgaatgcatgtctctgtgtgtgagtgcatgtgtgtataagtgtgtgtctgtgtgcgagtgcatgtctctgtgtgtgagtgcatgagtgcatgtgtgtgagtgcgtgtgtgtgagtgcatgtctgtgtgagtgcgtgtgagtgcatgtctgtgagtgcgtgtgtgagtgcatgtctgtgtgtgtgtctgtgaatgcatgtgtgtgagtgcatgtctgtgtgtgagggcgtgtctgtgtgtgagtgtgtgtgtgagtgcatgtctgtgtgtgcgtgtgtgcgagtgcatgtccgggtgtgtgagtgcgtgtgtgagtgcatgcctgtgtgtgagagcgtgtctgtgtgagtgcatgtgtgtgagtgcatgtctgtgagcgcatgtgtgtgagtgcatgtctgtgtgagtgcatatgtgtgagtgcatgtctgtgtgtgagggcgtgtctgtgtgtgagtgcgtgtctgtgtgagtgcatgtctgtgagtgtgtgtgagtgcatgtctgggtgagggcatgactgtgtgtgagtgcatgtgagtgcatgtctgtgtgagtgcgtgtgtgtgtgtgtctgggtgtgtgtgcatgtgtgagtgcatgtgtgtgagtgcatgtgtgtgaggacgtctgtgagtgcatgtctgtgtgtgagtgcatgtctgtgtgtgtatgagtgcatgtctgagtgtgagtgcatgtgtgtgaatgcatgtcttgtgtgagggcgtgtctgtgtgtgtatgagtgcatgtgtgtgagcgcatgtctgggtgtgtgcgtgtgtgagtgcatgtgtgtgagtgcatgtctgtgtgagggcgtctgtgtgtgagtgcatgtctgtgttagtgcgtgtgtgttagtgcgtgtgtgtgcatgtctgtgtgagtgcatgtgtgtgtgcacgtatgtgtgagtgcatgtgtgtgtgcatgtctgtgtgtgactgtgtatgtgtgaatgcatctgtgtgagtgcatgtctgtgtgagggcgtgtctgtgagtgcgtgtgagtgcatgtctgtgtgtgagcgcatgtgtgtgagcgcatgtgtgagtgcatgtgtgagtgcatgtctgtgttttagtgcgtgtgtgtgtgtgcatgtctgggtgtgtgagtgcacgtgtgtgagtgcatttgtgtgtgagtgcatgtctgtgagtgcatttgtgtgtgagtgcatgtctgtgtgtgagtgcatttgtgtgtgagtgcatgtctgtgagtgcatttgtgtgtgagtgtgtgtctgtgtgtgtgtttgtgtatgagtgcatgtctgtgagtgcatttgtgtgtgtgagtgcgtgtctgt

SEQ ID NO: 29516 - DNA, 1211 bp, Artificial sequence
  DNA replication origin
tttcaattcacgttttcgcgtccactggcaggaatgccatgtgctgcgatgccagcacagaaaccccactgccatgtgcagttccttttagtttattctataccgttcgcagagtcccaaaacagcttcaggaggcagaccagattgggggaggggcaggcccactcattggctccaccagaaggcccgtggttaggccacaccttgctttacataataaaggtgtccttaaaagggtgtgcaacttgaacttgcgtaagtaaagcgtgcttgacctgctcccgggggacctttgtctgaaggactaattctgaaagcattcctttctgcgaagtccccccactgccaccctatttcttagaagtccaccaagttcatgacttgggatcctctgaagtgggggagggcgatccgtccccagatgctgcccgtaacgctgcacccctgcccttggaggaggcccacacgcccctgtctgggacagccggggacgggcacgtactgggccagggggctctgcctggagccatctccgccgtgtggccttgggcaggttccttgtcttcttcaggccttggtttccttggctgtgaatggagatgttggacaaatgaccggtaagggcctctccctctctaggggcctggatggctcctagcgccccaccagcaatgctgccgaactcacgggccagtctggggcagtcccagggctggacaagggacccagagtggagacacgaaggtctgggggcaatgttagctcccacctatgagaaagcgtgccatggggacctccttatggtgccttcgagggccaacttgagccactcaaaccgaacttgcccaggcaggtgccaggtgccagtcgggacatcccccacctcctagacagaagcacagggacaagcgtgtcatgtgtgggcacctggggagctggagcgcaggccagggatggagatagagcagccactggaagccacatgggtagcattatggcagacgttttttaagttgtgctgaatgcagcgtttccgtctcagcagcaaggcctgccattctggggtgggctggctggggagtgtgaagagggggttcagggagcaatgcctcagggccccccatcgccggggtgggtcccatgaaacaaacacctaggaaaagcggcgctaaaaatagctggggggagggtgcgggggcggcggagtctgt

SEQ ID NO: 29517 - DNA, 1719 bp, Artificial sequence
  DNA replication origin
gggcccggacgtgcggggcagcgagcgccggggcccggcgggggccgcagccttgcccggagcggagcgttggcagcgcggggtccggctccgtgggcagtttgggaagcgcccgggcaacgtactggcgagggccgcggagcgaggggctcggggagcgggacctccgggcggggctgcggggagcggggcccgggccgccccattcatcgcggatcggagccgggggtgccccagccgtgccgccgcctcctccgggccgcccgcccgggcgtgctggccccgcggcgctccgagcgcggcataggcttgcgagtcggcggtgtcagcgccccggacgggggtgggagctttggagcccaccctgggggagaccacgccgcacccccgcccagccccgcgcacccccagaggcttttgcagagccgggaagttggctggacgtctagacccgtggggacgcggcgccccgcgtggcggcggccggaagggaaggccaatggggctcgggggactcccgcggccacccagtccttgtccctgcaccctgggccgagggcagagggacaggtccccggcgggggcgggggggcagctcagctgccaagtccgctcctgcagcggaggcggttaactgcttcatccccagccgtgagccatgctgggcatagggagtgtgccacgtgttatcacgtttaatccttacgtcctgagatccgtgttaacccaagtcttagatgcagaaactgatggtcagagtgggctgatgctgggaagtgagcacagcacgcggtagtgtcgtggacagcccctgcccattctgccaagagcaagtctagttcccttctgccggtcgggtggacaaaggtgtcttgaggccctctcagtgcccagcctgtcctaggtgcccccagcacagcccacagccctgcattcctgaaaataaacaaaataaacaggtaaatgcctggacagcgtcgggcgtgagggctgagcagggagctcggaagctggggcggagctgcagttttaggaagggcagccaggcaccctcggaggaggtggcctgggagacgtgtcttccatgccatgcgcctggcaggtcccagaccacaggacagagctcaccgggaggtgatcattctgccctgcaaatagaaaagaggaagaggatatctgaggcaaaaaggaaggccagggccttctcaaagggaacccaggggccccgcagagtctcagcttgggaggcacaggtgaagggtgtgtggctgtaatgccccgaggctggcagctctgggcagtgtgcaaaccaggaagtcccaggatttcagggtcaagggaaattttggggtcatgaacttcaaccccctcatcagcgcttcagtctccaccagaccctgcctccaggttactgactctgcttggatacctccagtgaccgggaactcactccccatcacagcagcctgttccagccattcctgcagtcctaccagctggaatgcactggtccatcatcctgaggcagcaggcagcacatctgctcagctgttacacatggctgcctttggataattttaatagggatggtctccccctgtatgcctaatctcttcaggtcatttctgacttgacattcctggtcaggccccatcctgccaccttcccctgggagaaattcagtgggtttctgccctttcctcgtgtttgctgaacgga

SEQ ID NO: 29518 - DNA, 1054 bp, Artificial sequence
  DNA replication origin
caactgtactggcccatctttccttctacccagggaaatggaagtccttagctctgaagtatacgattgcagccagtccctgaggacagcatctgccacccccaccatgaccactggcaaatgatgagcacggggagggagtggccaaagaaacaggccctgagccacctcaaggctacttcacagagccccatcctcacggaaccacccactgccttccaccacgctctgtccagcccccagcatgtagcaggtcagctccatcagagaacgaggctggctcatggggttcagttgagaggcctgggaccttaaagccacttggagacaggcttgacctggaagcggctggtctctcgaggtaggtggatggagctgtgtctggaaaggaatcactagagggccctggatgtgacgggaccctccgagtcaccggccagcgcctgctgagcccggggagaagggatccggcctgaatagggccccttcgtcaagggggatggccttgcagggtagatgggacaccagtgatgggaggtgggatgcaggatgcgtgagggcagcagggagaggaggggtgttcccacgagggtgggggtgatgtctaggggagaagggcaggcagtcgccggtggagatggggcgggacggtggggtcccgggcaggaggcgggaagagagaacacacatcctgagatgaacccatgaggacccttatcagggagtcagaacagggctggactgtggcctggaatgcaggacccgagcatggccaccgcccacagtgagcaggaggacgggctggtcacactctcccaggtctcctccccaccctgcaggtctagaatgaaccaaagcaagggtgggctggctggccaggagggaaaatggggaaggcgctgggaagatggggagggcgctgggaagaagatggggaaggcagagtccacgggaccgggccgcttgtgcctcaccggcatccctgctccctatggcggcctccatctgggcttttagctggcaccttgcaccactcaggtctttcttgtcctca

SEQ ID NO: 29519 - DNA, 1222 bp, Artificial sequence
  DNA replication origin
ctcagggcagcagccgggagtgtgggaggaagagaccctcaccaggggcagggggccagccggggaggggtcctgggtgttcaggatggaggaccttctcctcataggccgtgtgcaccccatgcacatatgctatatgagcgtgtgcactcacagacactttttgaatggagacgaaaaatgcatgtgttcacacgtgtgcagctctgcgtgaggaaaatgcaaacaaagctcggtaaagcaggccggggcccacacatgcgggcagggcatccaggcagcttgggcagagtgatcagaggtcctcgctcagtggcctgtgagcggaggcctgagtgcgacaggtgtggtggccatcttggccggggggggggggggggggcgcggggcgttccagggctctgggtggggcgggcctggtgcaggtcttccaggccagctctggctgctggaagatggtgaagcagggtgcgcagcagagcccaggaaggggatgccgagtgttccagtggacgatgagagtcagggggttcagagcagatactgggaaaggctggattctagaaggcagagccactgatagatcagatgtgggggtgggggaaggaaggtaacttagcagatcagggaagcccaactgttcacggagaagttcacggtgcaggtcacacagttcacggtgacggctatgatgccattgatggtgcaggtcagacagttcacggtgacgtctatgatgccgttgatggtgcaggtcacacagttcacggtgacgtctatgataccgttgatagtgcaggtcacacagtgacatctatggtgcatggttcacagtaacgtctatgatgctgttgatggtgcaggtcacacagtttacggtgacgtctatgatgctgttgatggtgcaggtcacgtggtcatggagaagttcacggtgcaggtcacacagtgacatctatgatgcacggttcacggtgacgtctatgatgccgttgatggtgcaggtcacgtggtcatggagaagttcacggtgcaggtcacacagttcacggtgacgtctatgatgctgttgatggtgcaggtcacgtgatcatggagaagttcacggtgcaggtcacacagttcacggtgacgtctatgatgctgttgatggtgcaagtcacgtggtcatggagaagttcacagtgcaggtcacacagttcacggtgacgtctatgatgcc

SEQ ID NO: 29520 - DNA, 2114 bp, Artificial sequence
  DNA replication origin
ccgccccatgcccaccccagctccaaggactgggacgcgtccccgagcccctggagggacagctggcagctggccctcgagtgccctggggtgctgcaggcaaatgtccctgctgtcctggggcagaggaaaggggatgggatggccaagttctgcccgcaagctgggcaggcagaggcagggccaccccaggagatgcgaaggacagagggacagggtgtggaggcagtggggtggggccaccctttgttcagcgcggaagaagcacagttatagacagtcctgccttcaaatctcagcttggctgtgtcaattgtgtgaccttggacccgtcacaccacctctctgggctgcaacttcctcacttgcagcaatttcttgattcactgactttctggtcagcctaaggctgcgaatctgtcacatcactgtgtgcccagtgcctgacacagcatccaacacaaatgtaaagacttgtggatggatgggtgggtgggtggatgagtgggtagattagaggggatgggcaggtgggtagatgaatgggtgagtgggtggatagatgggtgggtggatgaatgggtagaagggtggacgggtggctgactgggtggatggatggatggatggatgagtgggtggatagatgggtgagtgatgggtgaacgggtgggtggatgggcaggtggatgggcaggaggatggggggacgggcacgtggatggatgcatgggtgagtgggtggatagatgggtggatgaatggtagaagcatggatggatgggtggatggataggtgggtaatggatggatggatggatgagtgggtggatagatgggtgagtgatggatggatgggtgaatgggcaggtggatggggggatgaatgggtggatgaatgaatgggtgaatgggtgggtggatagatgggtggacaaatggtaaaagggtggatgggtgggtgggtggatggatgggtggatgggtgatggatggatgggtgggtggatagatgggtgagtgatgggtggatgatgggtggatgaatgcatggatgggcaggtggatggggggatgggcgggtggatggatgaatgtgtgagtgggtggatgattgggtggaagggtggatgagtgggtgggtagatggatgggtgggtgagtgatggatgagtgggtggatggatgggtgggtagatggacagatgggtgggtgggtgatacatgagtgggtggatggatggatggataatgatgatggatgagtgaatggatggatggatggatggatggatggatggttggatggatggatgggtggatggacagatgggcagatgggtgggtgggtgatggatgggtggatggatggatggatgatgatgatggatgagtgaatggatggatggatggatggacggacagacggacggatgggtggatgggtgatggatgggtggatggatgatgatggatgagtggatggatggattaatggatggatggatggatggatagatggatcaatgggtgagtgggtgggtatctggatggatgggtaggtgggtggatggatgggtagatgatggatgggtagatagatggatgatgatgatgatggatggatgggtggatggatggatggatggatggatagatggatggatgggtgggttggtggatggatgggtgggtgatggatgggtgggtggatggatggatgggtgggtagatggatggatggataggtgggtggatggatggatggatggatagatggatggatgggtgggtgggtagatggatggatggataggtgggtggatggatggatacatgaacagatggatgggacagtgtggcaaaggctttactgctaagtcccagtggcttcctgcagttcttcaccctccctgggcctcagtctatacatctctgggtaaggacatgcttcctcctgtgacacagtgactcacattagggcctctgggttctctacattgctaggaggggcatgagttacggttgtctattgctgtatcataaagaacagactgaaacaacaaacctttattatctcttagtttccaaaggtcaggatgcaggcacagcct

SEQ ID NO: 29521 - DNA, 739 bp, Artificial sequence
  DNA replication origin
accctcggtgggggcaggctgggtgtcccgtggggtgaaacctggggctgggccaccccgaagaacaggggctgagccccagggtctgtcattccgttgtaggtgaacagtgctggggagccgccctggctgcttctcacggctggcagcttctctctgggtcccggtgtcttgccagcagtgcccagggctccttggctgcccccctgccactcggggccccccgcggggaaaggcagccggctcagcatctccattccgtggggacttggccgggcggtcgggagcacttggggccaaggcaggggggcactctgggggaggcagagccgctggcctgggctgggctggccgttaaagaacatactcctggtggcagccagggggcccccaggaggtgtggggtaaggggctgctgtggggtcccacagctggggcagcctggcgggtgggggccctggggcggccagctcggtgtccggaggccccgggctggtgtccaccccactggctctgtacgcctgccctggaaagtgcctctggggtagggagctagggggccctctcgtgctccccagcccatcctgggctgaaggtggtctttcgggaaggattttggtcaggctcttgtgtaaactgtcagagaagggtctcggggccgagtgagcagctccaggggaagagagggcaccactgaggtcgctgtggcggttcaggccacctggctggccctggtagc

SEQ ID NO: 29522 - DNA, 1234 bp, Artificial sequence
  DNA replication origin
ttgggggtccggcgtggctgctgggagcgggggcggagctttgctctctggagtcacccccgccttgctcttaagggggtgtccggagctgggacctctggggccggaaggctcctcgtccgcgaagacgtcgatgaagctgctgtcgatctccgggttgtccgactggtactccatgccgttgagcgcctctgtgatgaggctgtccagcttggcgtcatcctccatgtccaggtccgaggcagggagcgggaagggggtggcggccaggctgggcaggaagcctgtcctcagggggtcgtctttgccctcggcctgggcgtccccagctaacaggaaggtcttcgcgtggctgagcaagcccgcgtgtgcgtcggcagggactctgggggcagcggggggcgaggggagcccaggggggcctggagaccgctggtggccatccttggccctggccaggagcaggccacagaactgccggtgggccaggaaggccgccaggctgctgtagttgcggtcacactgcctgcaggtcagcagcacgtccagctggtccaggctggcgctgctgagggagaagtggtgtgtggggtacggaggcggcgcacgggggaagccctgcagccctccccgacccacctcggggccctcgtgggggaatggggtctcctccaggcactggaaggcaccctcggctcccagcccatctgcgggaaaagggaaggccttggctggctctggctggtagtgggtggggagggagtgggggggctccggggacgggaaggggctgcccgtctcctgggggtgagtgggtgggtggaagaaggccgagggcccgagggggccggggagctggctttcctctgagctggggttggctgggctgctggacatcggcgacagggaagagcaggtgctgccggccgtgttggtggccggtgacggcagtggggactcgctgggggaggctcccactaccctcggtgggggcaggctgggtgtcccgtggggtgaaacctggggctgggccaccccgaagaacaggggctgagccccagggtctgtcattccgttgtaggtgaacagtgctggggagccgccctggctgcttctcacggctggcagcttctctctgggtcccggtgtcttgccagcagtgcccagggctccttggctgcccccctgccactcggggccccccgcggggaaaggcagccggctcagcatctcc

SEQ ID NO: 29523 - DNA, 1082 bp, Artificial sequence
  DNA replication origin
tcatcctctctgggaccctgggtcagctccacttccttcctcttctcgcctcggccccgccggcctctgaagccggggccccgcggcggaggctgctcgtcctcctcggactccgaggcgaagtcgtactcgcggagcctgcggtcctcagctccgggccggggcctccccgccgccagggagccgcacctgcccgcccgccgccccagccgccggtggcgcctgttcttctgctgcacgatcttcagaatgagctccttgccccaggcgccgccccgagccttcctcttcctggggtccttcctggggggcagccggcggcgccgggagctgcgggtctcctcggggagggcggcggctctcgggacccggggcgcggggtctgcgcggctcccgggggcctgcgttctagggcgccggggacggggtgggggccgctccccgagaccgtcgttcctccggggcctcaggccggaggctctgccgccgccgcccgaccccgacccctctgctgcgccgcccgagtccagatccttccggaacagcttcaactgcttccccctcctctgctgcctgccctggctgggcgcatccgcctcggtgggggccagacccagggaacgcgttttgggcctgcctcgggctgggcagcccctgtccccagggcggggggtttgggggtccggcgtggctgctgggagcgggggcggagctttgctctctggagtcacccccgccttgctcttaagggggtgtccggagctgggacctctggggccggaaggctcctcgtccgcgaagacgtcgatgaagctgctgtcgatctccgggttgtccgactggtactccatgccgttgagcgcctctgtgatgaggctgtccagcttggcgtcatcctccatgtccaggtccgaggcagggagcgggaagggggtggcggccaggctgggcaggaagcctgtcctcagggggtcgtctttgccctcggcctgggcgtccccagctaacaggaaggtcttcgcgtggctgagcaagcccgcgtgtgcgtcggcagggactctgggggcagcggggggcgaggg

SEQ ID NO: 29524 - DNA, 2724 bp, Artificial sequence
  DNA replication origin
acttcggctgtgggctgctgtcaaggccagcgccagggactccctattaggggacggggggcttggggtgggctcggcctcctcctgaaggctcatggctgccctgcttcccttgcatttctctagcaggactgcaccctcggtggggccggtcagcgctgttttgggactggcattgactgaggcgtggttgtccgtgccccctgggctcaccccgttctctggctgaagctggttggctgtgccttggccctgggttttctcggcttggccaagcaagccccaatgtccatctgcctccagccccagctgatgtccggccactgcagggagagttgtcacctgcacaccccctggggagccctgggcggggccacaggccaccttccctccttccacagtgcccccttccagacctgaggggttcactcgtggagggctctgggcagcaggtgtcagctcctgcaagcccaggatgccatctttactcttagccactccaggccctgggagctggagctgacgtatgggggggctcaaagctgggtcctgggacctcctgctagggtgggtgttggatacacaggcgggacttggcacagggaccaaccaagcctccctgccccggggggcagtcagtgaggaggcccccgccggtgcaaactcattaccctcaaagccaggcctccctgccgtggggtggaggtgcccacctgctctgcctgcagaatgtccctgggcagcatggctgggactggcaccaaaaggccaggtggcatccagaggtggagccccgtcaccctgaaatgccaagtcaggggccagatggacagcagggctgccaaaagcttctggagcaggggcccctcggtggggctggtctgctgtgccgggctctgggaggaaccctcctctctgttcacagggaagcagccgcagggagtcttcactttcttgtgagctggcggcctccttattcttaggaaatgaaagttcctggtcggggctgcactttgctaaactcccggcatccagctgtgggccaggctgcttgctgggctcaggcaggcagacatcttgggggggcctgctgtctccttctgcctggcaaagtccagtcttggaggctccggctttctgcactggctgaaaatggaagttggctcccctggggctgaaaggagccccagaaaccaggtcttcctgggcacaggggagaagggctgcatgtcccggatggaaggaggctgggcagggccacgtccccccaggcctcccctgaaccgcttccacggtggccacagccgattccgcaccctcccgatgtgcagtggattctccaacgcgcgtgaggtcagctgccgagaacgtgtcctcgtggggcacggtggcctggcaggtgcgccgttgggagggtggctctgtgcctgtgccgagctccaccctgcccaccgactcagcttctgcaagctctctcggggccccacgtgtgtctttgctcctttgcagctgactttctaattcggtgaccaatttctggatctccagttcatcctcggacaggtgactcataagagcaacgctacatccactccccttcccaggcaaagatggggcggcgccgggaaccactgtccgttcagggggacacgtcttactgagcacctttccccccgagagatcaggaaaatggctaggcagcatcggggatacttcctcaagcagcaaaaaagaggggtacggtggatctgacggcaccgtcttctggggagggtcggcacatgcgaacggcagaccggagtccctgttcgcagacaggctgccatagaggggtgggtcgaatctgtccaccggcaggtctgggaagagggatgaggactccaaggtcggtggcgatgcagccctgcctggctccgtctcagcggtgccaggtgggctccttggcagctgtggctcgagggaaccggcatcctcgccgtcctggcaaaggcaggagctgctggccggcggggcatccctggctgagggcttggggtgcagttcttccaggaaacagccagccaggtctttgggtccgaggaacaactcactgtgggggctgctgtagggctgaggcccctttttggcaactggaacccccaaggggtctctgttaaaaccagcagggtcacagccaaaactggagatctttgaagacagaacactgggtttggggcaggcggtacttgaggggttagccacgggtgccagaaattctccaggctggcgggcaggggggtccttgctgttgtgggagactggggcctgtgtgcccccaggaccacccagcaggctgcccacacctggcgttggcgagcttccgtggggcgccgtgttggcgaggcttcccgacggcttgggggtgccggtgtcatgtctgctgggcggcggctgctctggtatcaggagaccggggcttgctcccatttctcccgcacaggcggctggaggagaacgcaaagcctctgtgaattctgtgctgtccggggctgactcttcggcagtttcaggctccttggcctcctggggaaagtccagcgacgggcgggtttcctctgaggtctcggtgttggtggggacctgcaggggatccttgggggccactgaggggcgatcagcacacttggggcctccctccctggcggccgctcccgtctccaggcttcgagacgggccacgggcctg

SEQ ID NO: 29525 - DNA, 2009 bp, Artificial sequence
  DNA replication origin
tctgagtggctaggagagtccacggtgggctctcggcgccacctccggccttctcttttttctgcctgtttgggatgcagctcatcttccctggcctggtctggtctgggcttggaggccggagtcttcacatctacctcatgctcagtagggcttggagggtgcagctgctggctgtgtggggaccccggtgctctgagaacctcctttgagccctgggcaggcggtggctgggtgacgtggctggggtctccccgtgagtgatttggtctctccttcccagacaccctgtggcttttcttcctgggcggctggcacttttgggctaggggctctagaggctgctgagcaggcaaggccgctgggctcggctccgcgggggctcccgggtgtggccggtgcttcctggccttgtgccggctcaggcccggcccggagcggaaggaggctgcgcagacctcacaggtcacaggcccatgtggagcttggcccttccactggccgttctctgtagatgcaggcttctttttatagccacgggacctctgtttgaggtcttgggggccgagggggtccccctggggagtctggtgggaggcatttctgtggctttggggggagtcagactggaagtcactggctgtgctgcttggggctgtggttcttcccaagcccagtcctgtggaagggcaggtgaccctgggcatcttggtagcaccagagcgcccggtctcaggggtccctgggtcctccggctccttgctgctggtccccatctcaccttccaggcaggcgggggagtccggccctgcaccctgtagcgtgggaggctcagtgggcacagctgtgacagcctggccctccctgtggccgaggcgggcagtattgcttggagaatacgaggagtggcccctgggcatcctgtcagggttggtgtggggcggggctcccctgctctgggggtctggccctgggagtcccctgcctgcctgtgcctcatctccggtgggagtgctggacaggccagtagccctgacggccacgctgggggagacggcccctgccagaggaggagaggtggctcggccaggagactcccacagcttctcttttctggaatcctctggaattcttaaagtgctgtctttgggggtgtccccactgtgagtgcaggttacagcactgacggagccaggaggccaggaggaagggtcttccagggggctgccctccccctggagaaggcaaccagccagggcttccttgggatcgcaggggcttgttgtcaaagacgggggagccaccggggaatcctcagccccagtatctgtcgtggcttggacgccatctgcctcttccagaggtgcccaggcaggagaacaggccagcagctgctgggggccgggagggtccctgcaggacggagatgctggcagctgcccccccagcccaccttgggccctggaaggcgaggtaagtgggtcttcacggggcaggggcccaaggctgcagggcatgtgggcggctgaagtgggtgagggggcgcaggcggccaggtccccgacagagggtgctgggctatcccctgtggccagcagtggcttgttcaggccggggctggacgccctctctggagtccggccctcagatccacttcggctgtgggctgctgtcaaggccagcgccagggactccctattaggggacggggggcttggggtgggctcggcctcctcctgaaggctcatggctgccctgcttcccttgcatttctctagcaggactgcaccctcggtggggccggtcagcgctgttttgggactggcattgactgaggcgtggttgtccgtgccccctgggctcaccccgttctctggctgaagctggttggctgtgccttggccctgggttttctcggcttggccaagcaagccccaatgtccatctgcctccagccccagctgatgtccggccactgcagggagagttgtcacctgcacaccccctgg

SEQ ID NO: 29526 - DNA, 1824 bp, Artificial sequence
  DNA replication origin
aagtgccagccgcccaggaagaaaagccacagggtgtctgggaaggagagaccaaatcactcacggggagaccccagccacgtcacccagccaccgcctgcccagggctcaaaggaggttctcagagcaccggggtccccacacagccagcagctgcaccctccaagccctactgagcatgaggtagatgtgaagactccggcctccaagcccagaccagaccaggccagggaagatgagctgcatcccaaacaggcagaaaaaagagaaggccggaggtggcgccgagagcccaccgtggactctcctagccactcagaggggaagtcaaataagaaaaggggaaagctgagagggagaaggctccgggaggagagcattcttccagtctctgctgatgtgatttcagatgggcgcggctccagaccatcccctgcaatggccagttacgcagcctctccgagccactgcctctctgtggaaggagggcctgaggctgacggggagcagccgcctcgcttggccactctgggacctggggtgatggagggtgcagcggagactgaccaggaggctctgtgtgcaggggagactggggcccagaagccacctggagatcggatgctgtgtccagggaggatggatggtgcagctctgggggaacagccaactgggcagaagggagcctcggcaagggggttctggggaccaagagagaccaaggcgttgggtgtgtgcaaagagtctgggagcgagcctgcggaggacagcagcagggcccacagccgatcagaggaaggtgtctgggaggagaacacgccccccttgggccccctgggttttcccgagacttccagctctccggcggacagcaccaccagcagctgcctccagggcctcccggacaacccagacacccagggtggagtccaggggcctgaaggccccactcctgatgcctctggctccagtgccaaggatcctccaagcttgtttgatgatgaggtctctttctcccagctcttccctccaggcggtcgcttgactagaaagaggaacccgcatgtctacgggaagcgctgtgagaagccggtgctcccgctgccaacccagcccagctttgaggagggcggtgaccccacgctgggcccagcccgcctgcccacggacctcagcgactccagctccctctgcctctgccatgaggacccgtgggaggacgaggatcccgcaggtctgcccgagtccttcctcctggatgggttcctcaatagcagggtgcctggcattgacccctgggcccccggcctcagcctgtgggccctggagcccagcagggaagctggtgcagagaagctgccctcccactgccccgaggacgatcggccggaggccattcctgagctgcacatggtcccagcggcttggcgaggcctggagatgccggcccctgccgatgactcctcctcttctctcggagatgtgagccccgagccccccagcctggagagagaacgctgtgacggtgggcttcccgggaacacccacctgctgccgctccgtgccacggactttgaggtgctcagcaccaagtttgagatgcaagacctgtgctttctgggaccctttgaagaccccgtgggtctccccggccccagcttcttagacttcgagggcacggcgagctcacaggggccacagagccgaaggacagaggaggctgcaggggcagggagggcccaaggcagaggccggccggccaagggcaggcgggcctcctacaagtgcaaagtgtgcttccagcgcttccgcagcctgggcgag

SEQ ID NO: 29527 - DNA, 1581 bp, Artificial sequence
  DNA replication origin
aggcggctcagaagcaacccttctaagtagtgagcactgccttcccccacgtggtttctaaggtcactttggaattccagcaacagcagcaagactaagagggaacctaccaccatcccacggctgcctcaacttacttcccttctccatgtgggggaacgggaggttgtgcaaatctccaaacattggcttctgtggtgtcggtgcccacagggcgcaggggtgtgggctgaggggatgggctgctgtctcttcaagtacttggtaccaagaaaacagctgtgtggtctcaaaagggctgcagtggccccgtctttcacccccagccttccagcaagaaagggaatgctgcccacctgggccctgttcaaagcatcaccacctcagctctgacatcaaggcctgagcagttgcacaagaagtcaagtggccacagagtggaccatctcagggagccggagctggccaaggaggcaggccgagacaggaacgcccagctccggtcccaggctcttgctcctagaaattactcggaagcatctttctttaaagggattttgaagccagttagtctctgcccgaagagctggctgaggaggtcactctgggcctcggccgtccggtgggtgtgtggctcggcaggttcagcaccgtggacagctgtgcccctcttggggggcctgagcaggggtctcccctgggggaaggccttgcccagtctgtccttcctctgtgtgtggcccggctctgccttccgctgctctgatggtggcggcctgggtttgttctggctgttgggcttgggcttggtcgggagcacgcggctgggagttgcctgcttccgaggggtccgggggggcttgtcaggggctgagggggctctcccgaagctccccacactttcactcctggctggccctgggacctggccctttttcctcttcgtactgctctctcccttctccttgggacctaggctcccgtggggcccctgctcaccagcttcccttggccccttggtgcagctcttggcttgggctcgagcggggagcctctctggtgcagggctccggctggggaagctgggcttggctggggtggtggctgtctcgctctggagctgcccgctggctggctggggctggctgccacctcctgtcttggtgccggggcgagggcttccactgccctgggagctggggccgggtttggctttgggggtggcgggcttcatcccattctctgtgccacgggccagctccccgggtgccaggctccccaccgccttccttgggtgcactgggaacttgagtgctttgctgggggtggatgctgccgacctgtcctttgatgagctctggcagcccgcaggcttggtggcgctgcccttgtggaaggcgcctcggggccccccctcagacaccatgtggcttgaggacacctccttctctttctgaagtaggtggtcttcctggaaatggtcaggggcacacctgccacgggcacccggggccctgcgtttccctgagaacacgagaggagccctctttccctccgcatcttggcctctggctcccggcc

SEQ ID NO: 29528 - DNA, 1236 bp, Artificial sequence
  DNA replication origin
cagggcccctccgcacttggtttgcgacactccggaggcgttttgaatggcctacaacaccttccagagaggcggtctgggcctgatttggtctctttcaaatatcaaaataaaaacttttgacgtacacattgcacccaagtaaaaactaaacaatagagcaaaacaaaccatggatcttcaagatacttatggagagaagggtgagaaggaagccctctcaccctttgacccaccttcacaggcacgacgctgtgagaggacacgtgcgtcccaggcctgggttgggtcggtgcatgagggtgccctggccagggcagcggctctgcagccccagccctgagcatccccgtctggcagcacagacctcaggcttgcagcccggcaggggaggcagggagagcgccgccatgcaggtgcccgtgccctcgacaagccatggtggggcctccctgaccccgtctgtcccacccaatacccccattaaaaaaaaaaatcaaggaagcctgtattcacattacaacacaaaaatagcaccagaaacttcagagtaacattgcaaataggcggagcccagagctccgtacagcagggaggctctagagggcggccatggaggctgggagggaacgaggagggcccgcgggagctggcacaggggcggtttcttcccagttccatacgggaacccggttcctggggtcaaggtgtgctagagatgggcttttctcccgcagagcaaatggaggctggcatgaccctgtggtcagagggaggaggcatgaccctgtggtcagagggaggaggcctgttgtgctcttgggggaccaggcggctcagaagcaacccttctaagtagtgagcactgccttcccccacgtggtttctaaggtcactttggaattccagcaacagcagcaagactaagagggaacctaccaccatcccacggctgcctcaacttacttcccttctccatgtgggggaacgggaggttgtgcaaatctccaaacattggcttctgtggtgtcggtgcccacagggcgcaggggtgtgggctgaggggatgggctgctgtctcttcaagtacttggtaccaagaaaacagctgtgtggtctcaaaagggctgcagtggccccgtctttcacccccagccttccagcaagaaagggaatgctgcccacctgggccctgttcaaagcatcaccacctcagctctgacatcaaggcctgag

SEQ ID NO: 29529 - DNA, 1094 bp, Artificial sequence
  DNA replication origin
cagagccctgtgcggggtgcaaggtcctttccatgcccttccccccaacccccgtctacgggcctcctgcggagcctcctccctggatatgaagccacccgccaggtatagtccctgtgccagaccagcacctgttcagaaggccccgcctgggggctgcgtctgctggcttccctgagccaggctccttgcacagtgggggggtaatgtgagcaaagggggtgggcagatggccacacccccactcaccagcccctcctgcaggcaggcctggcccaggctgccttgtggcctctgccaccatcagggctgggaagaccccaaaaccagtgtccgagcagagagccacccaggcagaggacggcgggcgtgaggggaggggcccaaaaggagggaaggggccgtgtgcgggcctgggaacagtgttcctggcaaagggaaccctgcaggcaggcgcctggcgggtggggaggcggtgggggtgggtgggccacagccgcaggccgcaggtgaatctgtcctctatccagggaagaggggcaccgtgtgcttggacggaagtggtgagaccccggttaaggtgtctcatttaggagctccgcttcccgtggaagaggggaggaaagcaaggctggtgaggcagggagggctggaggcctcctctgagcagcctcctcatctgcccagtcaggggtctactctgacccaccctcactggagagggtcacttgtctcctggacactgggatctttgaggggcgctgtagggcacaggaggctgggtggggagggtctcctggttccactcttcctgcggccctggccccttccctgcggctccctcaatggagccactctgctccctgaggaccccatcccggagccaggaagttttggaaacagagcgggagactgaggcagtgctgctgacggcctcatgatctccgtgtgttaacaagcaggaaggtgtggctgccccgctgggaatcatttgtaagatcccgcccaggttctgctggggtctagagctccccatgcccccagcccctgcagctggcatgacggtgtccgacatccaccccgagagcagggct

SEQ ID NO: 29530 - DNA, 1690 bp, Artificial sequence
  DNA replication origin
cgggcgcgcggactgcccgacgggcgggtgccggctcctccgctcccgcgcactcgccgccgccgccgcggccgctcggcttttctcaatggaacccgcgggcggcgagcggcggagcaggcggccactgcgagggcgctcctggcgggctggaggcacggggcggggccgggcctgagcgtcgtcggccgccgcacctcccgccccgcccccggcgctccggccccgccccgtgcctcctgccgggccctgcacctctccggctccgcccccagcgccgcggccacgcccccgccagcccggctcttcgttgctctggctccgcccccagagccgcgaccgcgcccccgcccgcctcgctctttacggcgctggctccgaccccagcgctgcggccccgcccctgtccgtctgggccttcaaggcactgtccccgccccgctcgatgccccgccccttcctggttcggccccgcccgcgccccggggagacctctagcctcccccactcctctttggcccggaggtcatgtccccaggccgcgctgggagtctgagacctattcggttctgttctgctgccccgcggcaccgcatcctgcgccccgcctctcggcgccagctccgcctccaaacctgacccgacctggttgggtcctgagacgccgaggctccgcccccgcactgtaactccgcccccagcccttggtccctccctagacccctgggctctgccgcacgctccacgtgcgcggtgggggcagtgacaaccggctcaggaagcccgaggccttgacgcccacgtttctcttgggccagacttggggtgtggagcggattcgggccagggagggggcttccgtcccagactgcggtggggtccgccaactgagagcaggatctcgggtcttcccctgtgagctcagaccaggctggaaatcgaggagggggcgcgggagccggcagccctgggcgttgccacttggggcctctttcctcaccgagcctctccagggcgccccgcaggagacccacgaaggagttgcccacagcgcccgggccacagccccctctcggagcagtcagaggtcagcgaggtttgtgggcgcggtgctgtcagctcaggcctggaaatggagaactgttgccctctggggtgtgttcaagagccccacttcacggaggctcggggacttgctcaaggtcacgcattggggggctgtcccccactcccagctgagttgtatcatctccttttaatgttctcggtctacacttgctacctgctcccccatcccccgtactcataagaaacgggcgtcagtgggcccaggggcagacaggaaggacccctcccacctgatgatgagatcatcgcacagcaggactgtcacaccacccgccagcctgctgggagctcctaagaccccatctcgtgccaacttctgtgacctattccctggctccaaggaaggggagaagtgggggcttaccctcagagcctggtacaggagagtggcgggtgggtaggagaggcaggggtacaacactggatatgcgccgtccctccccactgccatggacagacaggaacactgagaccaggaggccaagagagctgcccaggggcatacgggtcctccagcccttcctgctctctgccagggtccagtgggcacagccttcccaca

SEQ ID NO: 29531 - DNA, 1727 bp, Artificial sequence
  DNA replication origin
ggggcgcgggccggggcggccgcggagaccgggggccgggggcatgagcggccccgcggccccgccgcgcccccgccgcccgccgccgcccgcccggggctagaggcggccgccgggagggcgcgcggcgccggagacatgtccaggcggaaacagagcaacccccggcagatcaagcgtgagtcaaactttgcccgcggtcccctccgcgcgcccgacccccgccggagcccagccgccagcgccgcccccgcccgtccccgctctgccctgggcgccggcgaccttcaccccgcgccgcgccccccgcgctgtgccaagcgcgccgtaatctaatctccgccggcggcctgggcccccgcgtctcggcttgggcaccggggggttcagcccaggagggggccgcccggaggccgggaggagggtgtttgggggcgcggcccgggcagctcggcccctcgcggcctgcccctcccccgcatctgcgagatggtgcggcgatagggcggccccgatctgggctcagataaagtttaaaatattacattctgcaagtcccgtcctgataagatcgttctgtcgggacgggctgaaattgtgatcttatctcgcgcggttgactctcccaggctttgtatctagaagcgaagagagagacctgggaggcagaggggacacccggggccgcggagatgcctggccaagtggcaggcaccggcccgcgcccacccccaccggtgccgtcgcagagccgcaggacaggggagggggtagcgcgcagctgccgcagcctaggcacttggctccagccccccagacacccccaccccgtgccctagcgctgaagtcctgaacccaggccccgccagcctggtgacacctcctggaccctgcaagtgtcccagccaaggcggcatgggcaacaaatggtgccctcggatgcccgcgggcaccccctggcatcccaatgggctgctctgagtcagagaagggcctcccaggacgcagccccgggccggggtcgcccctgcacgccactaagtttctcgctggtccggctccctgcccggtcagaggctgctgccccgccgccacattgccagtgcccccgcgatgagaactaagctgtcggggccactgtctggcctgggcctctgggctgtgccaggagggagcaagagcacaggaagctaccctccccaccctatgccaataataactttgcgcctcacagttagggcccagacgcaggtcttcctccccggggcgcctccccggagcctgacgggcaggtcgtctgagccctgccaggaggccacgacggaaacccgcccgctgcccagccgtaggcgcccgggcactacctcctttgtccacacgaccactgccaccaggaccccttgtgcggggcctgtgggagcttccctactcaggaggtctcccgaggcgggggtcacaggcatgaaccggttcccgtaacccaactccctcagcgcaaacgggacctgttttccgaaagtcgccttctatcgtgtcaactcaagtattaaaagccacccacaggtcccgatccgcgcttgtgctctggtttctttttccttccttccctgagcgcctatgttcggttctggggtgtgtgtgtgtgtgtgtgtgtgtgtgtgtgtgtgtgtgtggtgtttcactgtgatgagaaatgcagatagctcggacagggagatcgcaggttg

SEQ ID NO: 29532 - DNA, 1527 bp, Artificial sequence
  DNA replication origin
acctgcggccgggccgcgagtgcagagcggagggggccgagcgcttcgggccgcccaccccccacccgcgcccccatcaaagccctggcgcagctgcccgcgcctctgtgcgccttttgttccgtgcggagatagatgtgccgcgctgataaggcgcgcaaccgatggtggctgagataggcgcttccatttattaacttcaaacgtgggagcgggggcagggcgaggcgggagcgcggccttggccggccagatggcggaggcgataggccgggctgccgacggggagcgcggggccggggcagctcgggacccccggcgcccccagcccgctgggttttcctcccgcccgagtcgatgtgagctccgataagagcctggccggtcggcccgatggcgatcgccaagagcgataagaggccttatctttggccaccaggcccggccgggttggagaacagcgcgggggcgccgcgactggggcgagtgggggcttggaacggcccgggttggggccggggagccggcgtccctgcgctggtctgtctgggggagttttctccccaaacacacttaattgccaagaagttgatcctcccctgtggccggtggtacagtccgtcaaaatgaaagaaaactggctttgccccggccaggagggggaagggggaggacaccccgccccgagtcctcgtagatggtgcgagaccgctagaggtgggtttgtcacctccagagggagagagggtgttttccccttgaatcatgctggtgttgctggtagttcctagcaagaaccaagtgtacactgcttggagttttcttgaaaaaaaaaaaatcaaggtggtttccatggcccagactgctttgggggaggccagtgtaccctggtgtggaggcgctgcagacctgcctgggctgagcactgtttgctgagcactactgcatacaggccctgggtcccagtggcaaacgagaggggcagagggggcagccaaggggagcagggggcacgtcaggtggtcagggacacttcttggaagggggtgacctttggcacagtagggctggcctcagttttccactgctgtcgggggagcaagggctgagaggcgcctggggctggggggccagcctgtgccagcaggtgcgagtgaggtcgggagtgatggagttggtcaggtccttggtctcccactctgaaaaatggaatcaggaataggtccccagggctgtgggagtccccaggtcaggctggagatattgagggtccaccgaggcactttgcagtggaagggcccatggatcccacaggccagatagaaccctaggccatctgggtagggccttccggaaggagccggggagggagggtccctgagcccctcctattccagcccaggcagctgctgcagctcagaacaaggtgtttttcacacactctcagagtttgattaaacaaattattggtaaccacaggatgactaattcactccaagcttcaaagtcacccacctgctctcccca

SEQ ID NO: 29533 - DNA, 1248 bp, Artificial sequence
  DNA replication origin
tgccttcgccaaagggaagccccagcccaagagggcaagagtatgccaaggccacacagcctggggagtcgggatgcgctggagggaagggccagccagctagagggtgggtgtcaggggctgccctgacctggaacctggggccagcgcagtgagctatgtgagcagcagggttgaggggcccttccaaggcagggcccctgtgtgtttcacatgctgggctgtcctgggagacagcttgggaagagggattgctccatctcagataagctggaaaccacagatctcacccaagtgattgaccatgaaggggaagagggggaggaagagggggaggaggaggggaagggggagggggagagggaggaggaaggggaggaggaggaagagggggaggaggaaggggaagaggggaagggggaaggggaggagggggaggaggaaggcccttgccagagggcactgccagccccatgggtgggcgttaggctgctggggaggagggagaggagggggaggagaaagaggaggagggggaggaggaagaagaggaggggggaatgaagagaaggaggaggaaggggaggaaggagaagggtaggagggggagagggttagtagcagctgtctcggataacaggtattttccttccattcttacaacagtgctcagggggcaggtactatcattacgctcactttgcagatgggaaaacggaggctcacatgggtaggccttgcccatagttccacggccagtaagtggcagagctgtggtgtgagcagaccatgtctattttgagctgagcgtccctctggtcatttatctgacagagttccgggaggcccactctgtggggacgggactgacccagtcctgctctcagagagcttgtgggcctgagcggggagtgggtgacaggatgggctggcaaggccatcaggcaggtgtggacagggcctctgaaggagctgcatgggggccgcctgcacacaggcaaattccaggggccaaaaggagccacagaggagccacccaagtctcgacttgcacacaggccctaacgaggggctcagccctgacgggcgccggctctcccctggtccataaggccacatgcgctgcctgcagcttgcaggtggctgatccctcacccatggggtcatctgcctcctaatgacacaagcaaggacagcgcatccagagtggcgggactcaccaggcagggcgcagatgacccctttgca

SEQ ID NO: 29534 - DNA, 772 bp, Artificial sequence
  DNA replication origin
ggggcttccctttggcgaaggcagcgaggaggggctgagatgatgctcctgcctgtgcctgtccacctccccacccggctctgggagggtctggaccaagccaagccagaggggttttgggtccaggcagccaagcgagaggcccagggtttatcgagggtccccagcctactgttggcagggcccggagagcagtgggctgctctcagcctgggaaggtgggtcaggaggagtggggttcttcacaggaaggcacactggcagttcctggggagctgcctgccatctttctgggcccaggcagtgtcatggtggcggccctccctgcctcggttggttcaatgggcatacccatttttcagatgaggatgaaaaggtcctaaggggccaggactcaagtcctgccctggtgcgaggaagaaacaggggagatggtctggtcctgccctctgcccaacaccagccttcatgtttagcacgtggcactgacttaaggaccccagagtgaggatggagggtgtggctctcagccaggtggcctcagccaatgcccaccttagagactccgctttagagtgggaataacagggtccctcctatccgagctgtgttgggtagtctaacagggctggtatacagtaggtgcttaaatagcagctgtttggagcagacccctggtcccgcgtcaggaagaggacctgacttattcatgccgggtgacatggtgctcctactcccgtgggcctcggcctcccagctgttcatggggcca

SEQ ID NO: 29535 - DNA, 990 bp, Artificial sequence
  DNA replication origin
gtgcgaaatgggtggagaacccaaagctaagtggtgtctggagaagggcagaacggggatgcccgtaaggcacttagcagacaggagccctcagcacgccgggctcacttcagctccaggtggggaactgagggaaccaggggagtcagggcctgagctctcggaagctgcccaccagcccccaacacccatttcacagccggggaagctgaggctcccaagaccacagccagcagcccaggggaagctggggaagcagacggaggcacaggaggctgaggggaggggcctgcttatctgctcacgcggctctgcccaagatcagccaccacattcctgcctcagcaggaccactgccttcccccaaaacacaaggcagctggggagggaggaggagatggggaggccgccggccgatgcagtagggctggtggcctgggggtgctgagtgggcagtgcccagagaaacctgggcccacccccagggtccacggccccagctcccacgtcacataacctcacacatgtcacgcctccagggcctccgtttctctcctgtaaaatgggttggccagtgccaacgatgatcttagcagtgggtcagatctccgggcaagaagaggacagccggggctggggtgtgaggccagcccagtccagggcgtggcacactcaggcagagtccctcctcccttcaaaacctaacgcctgaaggaggggagggccagcgggactctgcttaacgtccaaccctcagggcttttggcaaaatatcaataatgcaaccggcagctccagaggcagcaaagtccctcacagacgtgtccctaggacagcccttcccagcctgcaccccacacaacagccgggaaggaggtgttctcatcaagctcctccttcaagagagaaacagaggccccagatacagccactggccaaagggtcacagcaaggccaggccaggacgtgaggttgcgctgttgtccgaag

SEQ ID NO: 29536 - DNA, 1161 bp, Artificial sequence
  DNA replication origin
ataacggcgatagcacctcctccaccgcacagcacgcatcgcccttttttatcaagttctcttttcttctttttcgttgtagggtggtagagtagaaaacaccccacccccacctcccaaagccatggaactagggggtgggggcctccccatctcaggtcccagccacaaagggcacgggtcagcttagggcccgctgtgcccaacacgcccagcagccagcccagagcccgtgactggaggagggaggggatccaaggcagctgcgaggcccggggtccggaggtcccagcatgacaggagcagctgcgcatgtgccctgcaaggcaggtctcgcggtctacaccatcagctccttgaaaggactctgagagggcgactggcaccccattttataggaaaaggcagcaaagcccagagaagtgaagtgtcactggggcgggtgctgagctccttcctcgagaagccctgggtgggcaccgctgggaggggtggggagacctcaggggggttggccatggcctgcagggcaggcttagcggtgtcggccctatttgacagatgaggaaactgagacctgagactctgggatgtgtgtgagaaccagggccatggggacagatgctgtaccccctgcttgtttgctgcggctcctggtctgggtgactgtggcaactatgggggactgacaaggggtagactcttggatcacagggacaaatgttctggagccactctggccgctgtgtgatgggacgaggccctaggtgacatcactgaggtcatcggcacactgtagccgttggcggaaaaccgtgcaggaagaatgccagtaggattcagggagggtgggctgcgggcagagagggctttggagaggtggccccaccccagggaccctcgccccggctcgtgtccccccattaataccaccgccgttttggggttcactgagccctgccgcacaagggccccagatgctttacccacttctgccctaattcctcaaaggccaaggaggctggaactgtgatcatgcccatgatacaagtgaggaaactgagaggctgccggccagggggcaggatttaaacgctggtcactggagctgacatttacccccctcccccacatacacaccccactgcactggaaatagct

SEQ ID NO: 29537 - DNA, 780 bp, Artificial sequence
  DNA replication origin
agtgggaaagatactggtccaaggtcgtacagccaagaggccggcacagctgggacctggccccaagtcccaacccctctccaaggccggcctcttttctcctgtgggggcctgttgagagcgacttcttatttttggctgccttgtttcagggagggctatttgggggctttctttgcaaaatgatgatgatgatgactttcagagcaccccgagtgctcagctctccctctagatctggtggctctgtgcgccgcaggcagtgggctcgcgggtgcgtcgggacggtgggctcgcgggtgcttgaggggcggtgggctcgcgggtgcttgaggggcggtgggctcgcgggtgcgtcagggcctgtgggctcgcgggtgggtcaggggcagtgggctcgcgggtgcgtgaggggcggtgggctcgcaggtgcgtcagcggccggtgggctcgcgggtgggtcggggcggtgggctcgcgggggcgtgaggggcggtgggctcgcgggtgtgtgaggggcggtggggggctcgcgggtgtgcgggttgagagtgtgttctcacttttgttcctggcattagggtggggtgagataaggggaaggggggccgctcagctcgagcaagcagatagataacggcgatagcacctcctccaccgcacagcacgcatcgcccttttttatcaagttctcttttcttctttttcgttgtagggtggtagagtagaaaacaccccacccccacctcccaaagccatggaactagggggtgggggcct

SEQ ID NO: 29538 - DNA, 881 bp, Artificial sequence
  DNA replication origin
gggtgggaggctggctggccccagggccgtccctgccgggttgtgaaactcgctgttcccatctgggagtggctgctggctgcactcctctcgggaactcctgggtcctggtccccaactgaggccacgtgggtctgggctctgacggttggcaggtcatccagaggccagcctgtccatccgcctgtgcccagacagcgaggcccctaaaaggcgggcccttccagagccggtggtggtggtggcagaggtctcccgtcctggggcagggtccaggatgggaactactcccccaggtcaagggcagcccctggaggaggccctgcccccacacagcagctcagccaatccctgggcctcacccctgctcatttgcataccccatttccattggctgccaacaggctggttaggacagtggtgccctggccatgggggtggggctctggggggcggggccctgggggtatcagattctgggtgactggtcccagccccaagtctagggtcagaaagctgcatggggctggtggggggcttcagttacagtgcaggctctcccctttcctcgaaggctccctgacatccattcagggatgactctgagtgggaaagatactggtccaaggtcgtacagccaagaggccggcacagctgggacctggccccaagtcccaacccctctccaaggccggcctcttttctcctgtgggggcctgttgagagcgacttcttatttttggctgccttgtttcagggagggctatttgggggctttctttgcaaaatgatgatgatgatgactttcagagcaccccgagtgctcagctctccctctagatctggtggctctgtgcgccgcaggcagtgggctcgcgggt

SEQ ID NO: 29539 - DNA, 2558 bp, Artificial sequence
  DNA replication origin
tgccaagcttctgaagtgccggccgggccagggacgtggcaccatcttaatgaatgacagtcccaacccctttgcccaccctcagcctccccatctgtaaaaccggaaggcggtctagtaggtctgcctcccaggatggtttctgggctcttcagcaagccccttgccggcctgggcctcagtttccccttccacaccatgaggctgaggtggcaggttctctgggggtcctcctgtctgtggctgtggcatagcctggaaacctggggtcttccagatttcccattgtcagaaattcatgtgccaggagaccatgtctacagggggcttaggacaccttagggggcatgcacctgtgttctgcatccacccacactgcacagtgggtcttgctggcaagaccaggatgaggcaggctccgccggcctgagacctggctggaggccctgtcagctcccacggcacctgaaaatcagccacaggtgtgggtgtttgtcaaaaatgtgtaagtggaaaatagtggcggggcgaggagagaaagagtctgggctgagatctaaggagaggaagtagggaggggccgtccgaccagaaccagacatcaccttggccagggccccaccccctaacgtggggtgcagtgcctctcacgtggtgagggtcagaggtgcgtgcccagcccagaggatctccccacgcagccctcccagtctgcagaggggtctccacacatgcaggcagctctgtcctctcccaggacagcttggggcatacagtaggtgctccataaatactccccagctgatttctggatctgctccctgtgcctggctgtgtccccagaggcaaagcaagcagaaggaaaaaggaaacggagaaaaagccagggcctccagagccagcattgtcctgggcaaaggcccctcccgtgtaggagcatcgcctgtggagagccacggtccttgtccctgtgctggggctgtgactcactcctgcggggtccttgctgtcagggccaccccacctgtcctggggacagggctgctggacgggttggggcgggcagcctctggatgcccacgggtgtcccctgtactctccaaacctgtactgagtgcctgctgtgtgctgggcatggtccagggaccccaggtgacctcatggaaccccagcctaacgagggagagtgaacacaggggtctgacgtgctctgtggcagaaccactggggaggctgttgttgggggactggtggtgtggagggccgggtggtgacactcagtgacaggtgaggatgtggcacggtgtggagggccgggtggtgacgctgagtgacaggtgaggatgtggcacggtgtggagggccgggtggtgacgctgagtgacaggtgaggatgtggcacggtgtggagggccgggtggtgacgctgagtgacaggtgaggatgtggcacggtgtggagggccgggtggtgacgctgagtgacaggtgaggatgtggcacggtgtggagggccgggtggtgacgctgagtgacacgtgaggatgtggcacggtgtggagggccgggtggtgacgctgagtgacaggtgaggatgtggcacggtgtggagggccgggtggtgacgctgagtgacaggtgaggatgtggcatagggaaacacatcctcgccgagcgcacagtgggagctccgagcaggggatgaggtcgtccaggaaggggcgggagacgcagcgtgacgcactgacccagggcccagctcagatgccagtacctcacccggtggggtccagcctccgcgacaggcattcccttccccgtgtgcccttgccaactacatactgggctgcccagaggctgccttctgaaggagcgagggggccgggaggaggaaagcccagctcccctgcagccatgatagatagaccagacttttcctctccacttactccgccctgaccgcgatgggcactgagaattcagacaagagccggactccctgagctcccaaccagctgaccctccagggctgcagccatgtgtgacctccaccctcgcgaaggccagcggccgcagggtctggcttgggctatagcatctaggctctgagatgactgtgtccgtggcggctcccgctcacagttcaggaccccgagatgaccgtgcccacagtggctcccacgcatagtgggggggccaagaccccaagatgaccatggctgcggtggctcctgctcacagtgggggatgccaggaccccgagacgaccatgcccacagtggctcccacgcatagtggaggggccaagaccccaagatgaccatggctgcggtggctcctgctcacagtgggggacgccaggaccccgagatgatcgtggctgtagcggctcccactcacagaggtggggtcagggccccaagatgaccgtggccgcggtggctcccacacacagtggaggggtcagggctcccggctctaaagccacatggcctgggcatgaattcctgcccaccacttactcacactgggatctgccacagacacctgagcctgtga

SEQ ID NO: 29540 - DNA, 1065 bp, Artificial sequence
  DNA replication origin
catcagtggctgtacagctgggctgaggcctgagggtcggtgggtgagctcacaagcccaggagactccaggctttcattcacagcatccaaccacagcccaagggtgggtggttcctgccatcctcttccaagtgggccatcccggagattcccgggggccaggagcaggattcaccccagacctggggaccctagtgtccagaccctcagatgcctttcagaaaggaagaagtcacgccctctggctcagttcagccttttcctcgttccagggtctcaggcagcaaagcaactgctcccaccgcacagctgcagaaacggaggctgcccggtcccacgggggacggcagcgccgcagggcctgcgcccagacctcctgcccagctggcccctcgtcctggtggggtccagggctgcggcgtcctggaagcttgtggggcgctagagctctgagctctgtgatgcaggcctgccctgggcctgctgccccgcctgaaaccaggagttaacacatcagcctccaacccacagaggcggagcctaggatgctggagtggggctggggcaagggtgggagccaccatcagggagagcctgtgccgggagggcgtggagttatggggacccactgctgctgggttcccagcaccgaatgcacttgtgtcctgagctgtacacgggaaagggttaatatggtaaatgtgatgtacactttaccacaataaaaaatagaaaattcaggccgggcgcagtggctcacgcttgtaatcccagcactttgggaggctgaggcgggcagatcacgaggtcaggagatggaggccatcctggccaacagggtgaaaccccgtctctactaaaaatacaaaaattagctgggcgtggtggcaggcgcctatagtcccagctactcaggaggctgaggcaggagaatatcttgaatccgggaggcagatgttgcagtgggcccagatcacaccactgtactccagcctggcgacacagcgagactcagtctcaaaaaaaaaaaaaaaaaagaaaattcaaacaaaaaagcaggaaa

SEQ ID NO: 29541 - DNA, 1206 bp, Artificial sequence
  DNA replication origin
ggtcagccacaggaagaagtggtggggctgagggggtgtgggtgcagaaccccctcccaatgctggtgccccatgaccctgagtctcatccctctcctcgtggtgcccccacacccacccaggcctcagaccccacaggggcaggtagcagggcaccttgccatgggcaccttcggccaaccaggtgggactcagcctggctcacccaccccagggtgagcaggctgagacccgaaggcccctcgcgggaaccaaccaagcctccatccctctgcacagcctccctgctgggggagcccaggatgacctagccacacccccctccaagccagccacaccccaccagcctgtttccaggccctgacccttcccgtgtccatcagcatttgctgggtacctactgtgtgccgggcaccgttccagatgctgggggtgcggccgtgagcatacgtgaagggagggagagagggccgccaagtggcagggcggccatcgtgggaactggggagggctgagggagggaggggagagggccgagcaggtgcctgctggaagttctggcagagagggcagccagggcagggccattttcggaaaccaggtgggagctgggtaggggtttggcttttgctccgagatccccgggggcccatgggaggcatttcagcagaggaggtgaggggttgggggctgcttagtgaacatgaccacaaggccaagtgtggctggggaggcagggagacagttcttcacacagcaagtgtgttgtggaatccaggctgttggcaccgagggagggactcgacttgaacatacatacgatgggggccaacctgagccagggagggcttcccagaggggcagggaaaggcagggaatttgagggcccgagatggtcagaagctaagccggtggcctgagggcttcccacttctggcccgggaccgcttttggctgcaagaccctggccccccaagggcagtgcttacgctagacacacagtgtgatagcgatggagagaagatttggacgtgcgcacgcccgtgcgccgggtcccttctccacaccatcgcagaccggggccacgcagaccttccccgcagccctgaaagtgagttctggtctctgccagcccggcttccctgccttccatgaggaaattggaacatggacatagagggaaccacaggagaggagaggagggag

SEQ ID NO: 29542 - DNA, 1256 bp, Artificial sequence
  DNA replication origin
agtgggcgctgggcgcagatgtgaggttgtcaccacagctgctgtcactgtttctactctgcagggacgtgccccatcttcctccttcggcggggggtgtgagtgggtgaaggccagggctgggggaggaagtactgcgggggtggcagcgggggggagggagggacggggaggggagcggagaggggcacaggtcggggcagaggatgggatggggagatgggagaggggtggggctggggaggcagaagagaaagacccccagggctggcctcctggtcttgctggccctgggtagcaggtgggtgggggggggtcacagcattgccaggagggagaacctggcctctggcggcacacagcggccagataaggccctgataacagacagaaaatagcaacagattcagactttcccaccagctgggcagcgggcagcttgggccacggtggggacagagaggagacggggacggccccgctcgctctgttgaggccacgctatgggagcgcaaggtgactggggcccaggctgggtctgggggccgtggtgagccattgcagagggcctgggtcccccaggctgacccgagttgagtctacagcatgacctccagccaagcggcgccctcccaggtccctggtgagtggctgatgctgtccacaccccctggcccagctaggagcatctctcatcccgtgaatctcgccaagcagggaaaccgaagcacagagagcagtggtagcagcagcccagccccgccatcaaagtggggtctgctggcgacaccagcccagcaccacctgcgtggggagcccggccccgcggttgggactcgggactcaccgcccacaccctcaggaccaagtggccagtacctcacgcgcaatccatcaagcagccagactgacttccaggcactagggcagctgagggagtgggcgcagagcctgggagagcccggagcagacggcgccttctgtgcctacccacctacccactggggagcccaggctcggcacacgccctcggagcctcgagcctccttcacgtccaacccatcaccccggtgtggcccggagccaccactgccatgtggggtccaggcccccggggaagtctccacccccgtttccctcgagtagcatttgtcacctggcttcttaaacccatgggtcctcaggttggcccccaactccttcccctgccgcccttgccttggggcctcagcaccccctgccccctctacgggaac

SEQ ID NO: 29543 - DNA, 1467 bp, Artificial sequence
  DNA replication origin
ctccatcagggcgccctgcagcttgccggcggcacctgcgtgcggcactaaggctggcggcggtgacagccaagggcctcggagtccacatgtgctacacgtgctctctccccccagccaccaagggactcgcacccagctcacatgtgcagtaacggaggctccgcgagggttaagagcccggccccgggactggccagggagagctctggctgtaccacgagcagcgtgtgccgacggggacggcggcaaggacagggaggagtggcagccagcgggtcccaggcctcaccagaggctgggctggacgcctgcacctggcctggccgtcctggggctgggatgtccctgggtgagctaggggagatggcggccccagccctggggtcaagtcccactggctctggtgaccccagggcctgctgcctgccagaaaaaggggcccaggcgcagcaggctgggcatgtgcagatgggggtgaggcctgctgggctcttggggccgcggcccacccagcggggaccctgacactcagactgggaaatgctggggtgggggtccccactgagaaatcccgctcccaagccagggaccaaggtctgcctgggatctccaccccagcccctcggctgcagacccctctgaaacctctcccccacccccgttggccttggagcctttggacctgctgtcactgcctcctggcattcttccgcccgtcaggggcagccccacgcatccatctctcctccaccccagctcatgtcacccacctagcatcctcccaaatggtccgggtatggccacatcccctccacgttggagtgggggtaattcacagtctgtgtgcaaagggtttcatggcatggggtaggtatgagattggtgcctggggctgcaagtggagtgtgggggagctgggtggagcccaccccacaacctgctgctgtctctctcggaccttggaaaatgggggtgagcatgctgacctctcctggcacctctgtcccagggaggccccttctcccagggtctctggatgtgtctggggtacagctggctccagcaggcctccttatggcaggttaactgtctcctgggagggcaggccctccttccggcttgggaaatgccctgccccatggaattggccaccaggagggcccagggaatgtggaggtgcctgtgagggtggaggaaatcaggctaaacccagacctgggtgggacccccactagggcacttgcgagctgagtgaccctggcaagtcaccaaacttctctggtctgtgaatggggtgtggtgtcttagcaggagacaccactgtgcacccagcacccacttgcacccagcatccactgtgcacccagcacccatctgctgtgcacccagcatccactgtgcacccagcacccacttgcacccagtatccactgtgcacccagcacccatccgctgtgcacccag

SEQ ID NO: 29544 - DNA, 1055 bp, Artificial sequence
  DNA replication origin
taacaattatctttgaagcaattaatgaggggagaggggttttaaaagagcaagaggaaaacttggatgtctgtcccaccccagtgagagcgcaccaggagatgggggtggctctgggcccgagctccccaacccggcgcccagcgcctcagcatccttcccagctacagggaggggcagctcagtgcccggcactcagcagggatgtgacggtgttttcctctctgcagatgttaactcacccccaccgctgccgccccccacatccccaggaggccccaaggagctggaaggacaggaaccagaacccaggcccacggaggaagagccgggcagtccctggagcgggccaggtaaccacgcgggtggtgggggcagcagcatcgcctcccgggcagcctggcccggcccctgggagcagggcgacgtgggtgctggggcaggtgtgcaggttgctggagacccaccaggcccaggcctgtgcctagtccaaagctcagccaacccgtgcagctggtggtatcactggagcttggcaccctcgcgccaatcccgggcctcacgtggtgtacaaggaagcgctggggggttccctggatcagagcctggtctgggccgcggaagaggatccagagtggtggctggtaaagaatcctcagaggcaggaaaggcagggaggtgggaacaggaggctgcgtctgagctgcccgggcccgtggccttcccagctgggccgggattcagagctgtgctgaggtgcccaggcaggcggtcaggcctgaagggcaggagagggccccaccccactccagagcggctgcagcctatggggacggagtcccatccacataccccgcggggcctgggccacagggtgtgtcctagagggtggtttggtgactctgctccgtgatttgcagctggagttctgaccccagaagtcccatgaacgtgttctccctgtggccccttcggggactgtgaattccattcatttatgaacgcaggaaatactggcagtcaggttgtttctgtcgttcctaataaatcccaca

SEQ ID NO: 29545 - DNA, 1386 bp, Artificial sequence
  DNA replication origin
ccgcaggaagcctccacgaggagggggactgcggagtgtgtagcgcagagtgtggctggagtcacttcccagacctcggctgcaggccttgagcttgtcggctgccccggggcggcctgggttatctcggattggggggtgcgggcaggttctacggggagaagccgccatctgcaacctggaactcccctttccgcggccaagaggcggccgagcaggggccgggagcagccaccttgcgctcccccgtcggtggcagtcaccatggcctcatggcaggaggagctcaccccccaaaccccgttaccctctcagcaccagggaggcttccaggtggaagccggaagggatccaccagtggggttgttgcagtgcggccccgctgtccaaagcaggacgcccggccggggtgagaggccgcgggcagagcctcccgtcacagggaccaatcacaacacaccaaaccccgccgtcaccacccacagcaaacccaggaagcgagggggaaacagggagggggctgattccaggagggggtgtccgcgggcctccagggtgagtcggggccctgcagtagggagcagagggtgcagtagagggcgcagccctgcacgggcaggaggccgcagggcctgagtggggggcgaggcgggcgtggacaggcaggagtgcggcccggtcactgggcctgtggccttggactccagtgaggcagcaggaggagccggcaggaggagagaagggctggggtctgagcgtgatcccagaagtggccacagagaagggacctcgggtggaggccaccagggcctggactccctcctcctccctggagccaccagcccggatgcgaagggaaggatgggcggcaggaggcggagagctcctattttatctttgaaatgaccttgtttgccggaggggcggctgcttaagattctgctatgcaaatggctaagccataatctataatccctgcacgcgctcgggagcagctcggccgtggctcatcctgcaggcccgtcccatcgtgggatgtggggctgagtcctgggcatcccactcctgcctcggaaaatggaggcgctcagacgtgccagccccactaggacttggaggggtggagccggggtcccattcgactccctggggtcctgggctggcccatttcacgggccctgtgtggtcgtctgcccagagagtaatcgtgtaggctgggccacaaggaaacaggtgcaggaaaaggccgaagagcgtgggggctggaccctggagtgtggaatcccctcccctggaacaggcctccgccacctccctctgtgaggctgggcagaactgaggggaactgggctcagaggaaagcttctcgcccagggctacctgggg

SEQ ID NO: 29546 - DNA, 1019 bp, Artificial sequence
  DNA replication origin
tgctcctggctcgctccacccgtaagtgcctcaggacctggagctctcccaggaccactatggacaaggtgaattccagctgatcacacaagtcgtgacttttccatccccactccatcctgggctctgatggcagagatgggaaggctggccatgtccccagggcactgctggccagtagaagggatgcccgagtgtcaggctgggtgtgagagatgggaggggcggcaggtggacggccccagccccagccccagccccagccccattccaaggtgtgacagacacagtagagtggggtcgggtgtgcacaaggagctggctcagggcctgagtttcaagtggtcagtggtggctggaacatcagggcccgggcggggatggggttcagaggggtcagggtggggctcagggcctgggcggggatggggttcagaggggtcagggtggggctcagggcccgggcggggatggggttcagaggggtcagggtggggctcagggcccgggcggggatggggttcagcggggtcagggcgggggctcagtgccagggactgcaaggagctgcctcggttttcttggctgtaaaatgggtaccctgaagggttttgtggggggtgttcgtgccgtgagcgatccggtccagcatcccggcgctgggagccggcagctgctgtgaggcgggaggagggctctgtccactatttcctgcctgaggcccacgaagggtcccccgccccagggtcccgacagggcccgcccgaggctgggaatcctcacccgagtgtgtgagggcgtcgggctggttatctgggccgagctccatctgactaatctcgccggcggagcgtctacgcaaacctcaaggcctgctatcgggtggaggctgaggcgggggcccggcctgatggacagcagggagatgggccgataggcgactggctccctccccacccggtgtgcgtgggtgggaaatcattccagctattctgccttatcagcggccctgtgctgcc

SEQ ID NO: 29547 - DNA, 1179 bp, Artificial sequence
  DNA replication origin
gctagggcctcggcgaggaggccagtccctccccagggtcctctggctgggtcttctcccaggcggtggtgccctcctcctccaaacacaggcactcaggtccacggtgtcccagtgccttggggacacagccgttcaacagccggccctgaggggctgacagtccagcaggaagacagagttaatgaaatcaagacctctgccccctggtgccctcaggaggtggtgagcactctggggacctgggaggcagggaggaggtgggaggggccggcatcgccctccgcacgacggcttcctggggtcctggcacggtgccatgtgggctggccctgaggcatcaccatacctggcatctaccattccctggagccagcaccccctgccgtcagctcccgggaacgcagcccatgccgcctgtctgctgaccccacccaggccccctgcgatgtgggtcctgagcacatcttggcaaggagaccaccgtgctggtgggcgggtgcttggaggatgggcacatagggcacgaggcccacctctagcagagagagagcctcggcaggtgcagccgccggcagggcccccccatggggctttccaaccacgtgctcaccccaaggacaggcaccccccgcacccccagccccccacagccatccacagtgagtgcagggtctgagggtctcaggaaggcaggttctgtggttcgaagccctttgttaacctctggcctggggtgagaagaaaaccctcatccaggaggcctggggctctaggccaaccccaccctgggctctccactggcctccagggtgctctgaggtttgtggcccagcagaggccaggcatcatggccaggaggccaacaggggccatgccaggcagaaggcagaggagaccagggcaggaggtggggagaccaggggcaggggcagggagaccagggtagggttggggggcaccagggtcagggggcagggagaccagggcaggggtgggggggcaccagggcagggggaccagggtagaggagctggaaccctcccaggaggtgatgggcctggggtcttctagggcagggcgctggggggccttaggcaggcccctcctttgtttcccctcagtgaaatagactcaggtcttgtgctggggcttaactgcaatgctgggcacacaata

SEQ ID NO: 29548 - DNA, 1330 bp, Artificial sequence
  DNA replication origin
ggggaagggtatcctcccaggagggctgtggggctgggcccatctgcagaggggcctcacaagggtcccttgtgagcatccgaatgcctgggtgcatgggtgaggtcagggtacactgggcagctggctctctgcagggggcctttcccacagccatgcgggcccctcagggctgccacttctccccgaggcccacatctgccggagctggatggcatctcccatgggggctggtgttctcaggcctgtagaatccacaagacccaacccaggctatggacagtggctgagcaccgtcctctgagtcataccccgtccagccaacctgccagggcatggagaaggctgacacacccaggcagcccaggtctaggaccaggagaccagagccatggggcactagtcagtcagtgtgttccctggatcaagccacacctgaatgccaagtcaagaaacataaagggacccaggcttgactccagccctggctgggtcactgatggccatggcacctctgggcagacctcagcttcccatctctgagctctggaggcggggacatggtgctgagggggtgaggccaagagctcgggggatgatggggaccgtttctcctgctctcgtctgtgaaaagcaaggcctgagaagctgggggccacgtcggaggttacacagccagcaagtggcatgggagagtcgagcccaggtcctctgatcgcaaacccatgtctgcagcccaggccatacccccacttgcagtgaatcccaccccttgggtagtgggccctccgtgaagccccttccccgttcacagataggagtcgccgagcggagcaggcagaaggccacctggaaaggccagcaggaccgtagccctcactcgcagcagtggccccggctgtggcactcgggacagccgagatggaaggaacaacgtgacatgcgctagcgagaagggagacggagccgcaggcggatgagacgcgggtgacgggagccatggatgcaccagagcttggagacaaagccactcgagggctctgcagattagcctggcttctgggggcctgatgagggctcccaccctgcctcctcctgggtccccccagcgcccctcagagggtccaggtccttgcaggagggctgggtctgggagaggcgcagaggagcctgggagctgcacacccaggatgggtagagaaatggatcagctttgctgttgaaaaaccagatgtcacatacgtctgggccctctggccacactggggaaatggctctgctcctcagagctgtgccccgtgcacacccagtgatggccaccactctgcgg

SEQ ID NO: 29549 - DNA, 860 bp, Artificial sequence
  DNA replication origin
ctcccatggaacgggccccaggacaggcccgtggcgaggctgagtcgggcccgtatgcgcctctgcccatcctgcaccaccggctccagctcgtctgcagagagacatcgcaggcatgaggcgtgcccggtctggggcctgtccagcccacctcccgctagggttggcccaaggggcagtggagggtggcagtcctgggggcctggggtgaatggcaggggccgggcaggtgctgggtcccaggggcctgggcagccctgcagcaagatctctagggcactgtggggtgtagggacgcagccaggaggatgcctgtggctgggtttgagcgagctgtgagccctgcgatggtcgttctccagagcaagggctgcgggtgggacaggcccacagagcccggccgcacagtgcaacgctggcctgagtttatgtcatggctgactgggggcccccaaaagatacatcagcctgcagtctatgaacgtgctgatatttggaaaaagggtctttgcaaatgcaattagattaaggctcttgagatcaatgggattatcaggtgggccctaaaaccaatgacaagtatctttctaagagacacagaaaaggagacagaaaagaccatgggaagatggaggtggagatgggaggcagccatgagggtcgcctgaagcccccagaagctgagagtggcaggagggagcctctggaaggagcctggtgctgccgacacttggacttgggacttggagcctccgggctgtgcaaggacacactctgctgcctgaagccccaggtcacgctaacttagcacccagccgaggacacacacacacctggccacacctggccctcacctgcct

SEQ ID NO: 29550 - DNA, 1194 bp, Artificial sequence
  DNA replication origin
ttgcctcctgcccggatcgccccagctgctgccagtttttcttctctctttgtagaaggagaagggggaggggtgcagatgcgatgctgtgaccctccccgctggcctccacaggcctggggcttgctcacaggccgggatgaacagggacagggtggcttccccctcggttccccacctctggacatggggggcgggcacccacagaggaaaatgagtgcacaagtccccagccgagtcaggagcgtggactctggcaccgacttgccgtgtgacctggggcaggtcgcttccctgatgcagcaacagctcccacccctgccacgccaggggttggaggaaaggggcctgaggggcccagccagcttcagaatttatagtcagatacagaagaaacactcgtggtggatgggtaggtggacggatggatgggtagatggatggatggatggatggatggatggatggatggatggatggatgggtgggtgggtgggtggatggatggatggatggatggatgtgtggttggagggctgggtggatgagtgggtggatggacagatggatgagtgggtcggtgggtgggtaggtgggtggatggatgggtgggtggataatgggtggatgatgggtggatgggtggatgcatgggtagatggatgggtggatggttgtgtgagtagatgggtagatggacagatgtgtaggtaaatggatggatggctgggtggatggatggatggatggatggatggatggatggatggatggttggataggtgggtggatggatgagtgggtgagtgggtgaaggaggggtggatagactaatggatggataaatgagtgggtgaatggatggacaggtggatggataggtgggtagatggatggtggataagtggatggatgggaggataaccaggtggatggatggatagatgtatgggtggatggatgagtgggtgggtggatagatggatggatgaatgaatgggtgggtggctgaaagggtgggtgggtagatggatggatgaatgaatgggtgggtggctgaaagggtgggtgggtagatggatggatggatggatgagtgggtgagtgggtaaaggaggggtggatagatggatgagtggatagatgaatggatggataggtggatggataaatgagtgggtgaggccaggcgca

SEQ ID NO: 29551 - DNA, 1327 bp, Artificial sequence
  DNA replication origin
ggatagatggatggatgaatgaatgggtgggtggctgaaagggtgggtgggtagatggatggatgaatgaatgggtgggtggctgaaagggtgggtgggtagatggatggatggatggatgagtgggtgagtgggtaaaggaggggtggatagatggatgagtggatagatgaatggatggataggtggatggataaatgagtgggtgaggccaggcgcagtggctcatgcctgtaatcccagcactttgggaggccgaggtgggcggatcatgaagtcaggagatcgagaccatcctggctaacatggtgaaaccccgtctctattaaaaaaaaattagccgggcatggtggcgggcgcctgtagccccagctactcgggaggctgaggcaggagaatggtgtgaacccgggaggcggagcttgcggtaagccaaggtggcaccactgcactccagcctaggcgacagagcgagactccgtctcaaaaaaaaaaaaaatgagtgggtgaatgcgtagataggtggatgggtgggtgagtagatggatggtggataagtggatggatgggaggataaccaggtggatggatggatagatgtatgggtggatggatgagtgggtgggtggatagatggatggatgaatgaatgggtaggtggctgacagggtgggtaggtgcgtggatggatggatggatgatgggtggatgggtggatgcatggatagatggatggtgggtggatgggtgggtagatgggtagatggacagatgtgtaggtagatggattgacagctgggtggatggatagatggatgagtggatggatggatggatggaaggatggatagtgggtagatggacggatggttgggtaggtagctggtggataagtggatggatgggaggataaccaggtggatggatggatagatatatgggtggatggatgagtgggtgggtggatggatgggtggattgatggacggatggatggatggatggatggctgagagggtggatggatggatggatggatggatggatggatggatgatgggtggatgggtggatgcatgggtgggtggatgggagggtagatgggtagatggacagatgtgtaggtagatggattgacggttgggtggatggatagatggatgagtggagggatggatggatggaaggatggatagtgggtagatggatggatggttgggtagctagctggtggataagtggatggatgggaggataaccaggtggatggatggatagacgtatgggtggatggatgagtgggtgggtggatggatgggtggatgga

SEQ ID NO: 29552 - DNA, 1235 bp, Artificial sequence
  DNA replication origin
gtgggtgaaggagtggatagatggatgagtggatagatgaatggatgagtggatggatgaatggatggatagatggataggtggatggataagtgagtgggtgaatgggtggatagatggatggatggatggatagatgcatggtggatggataaccaggtggatggatggatagacatatgggtggatggatgagtgggtgggtagatagatgaatggatgaatgagtgggtgggtggctgaaaggatggatggatggatggatggatgaatgggagggtgggtggatggatggatggatgggagagtgggtggatgcatgattaggtgggtgagtggatgatggataggtggatggatggatgggtggatggatgggagggtgggtgggtggatggacagatggatgggagggtgggtggatgatggataggtggatgaatagatggacagatggatggtgggtggatggatggataggagggtgggtgggtggatgatggacaggtggatgaatggatggacagatagatggtgggtagatggatgtgtggatgggtgggtagatgggtagatggagagatgtgtaggtagatggattgacggctgggtagatggatagatggatgagtggatggatggatgaatggatggatggatggatggatagtgggtaggtggatggatgggtgggtagatagctggtggataagtggatggatgggaggataaccaggtggatgtatgcatgaatacatgtatgggtggatggatgagtgggtgggtggatagatggatggatgaatgaatgggtgggtggctgagaaggtggatggatggatgacgggtgaatgggtggatgcatgggtagatgggtgggtggatgggtgggtagatgggtagatggacagatgagtaggtagatggattgacggctgggtggatggatagatggatgagtggatggatggatggatagataggtaggtggatggatgcgtgggtgagtgggtgaaggaggggtggatagatggatgagtggatagatgaatagatgggtggatggatgagtggatggatagatggataggtggatggataaatgagtgggtgaatgggtggatagatggatggataggtgggtagatggatggtggatggatggacagatgtatgggtggatggatgagtgggtgggtaggtggatagatgaatggatgaatgaatgggtgggt

SEQ ID NO: 29553 - DNA, 1839 bp, Artificial sequence
  DNA replication origin
ttttaacttccaaaccaggcccttctgccaagactctcagagatgtgggtgctgcggccatcttccctcccagggtgccacaggctcggcacccagcctggtcaggcaggtgtgtccagggtccacggaggacgctagagcccaccctgtttgccgccccttggggttgccctgtccctcctctgggccctggccggccccaccagcagtggccactttaaattccccgggcggacctgagaatgttccttgtttcccccaacaaagaggtcagtgtcttgattctgcggtggcaccgatagccatcggaaaccctatctgtgcagcatccgctgtgacaactttatctgaggccgttcccaaacctcgctgtgaagctctgaagcagcttgcagggctgctggggtggcccggcccatggagccaaacggccggtcctgcagaagccccgtggggctgcttggtcatccccaggacactgcggggtagtgggccagcagcaggttcacgggagggtgggagctgaggctgaggctgaggctgctgaggccccagcccgtctttcctccagcccaccctgagaagtcctccacctccccatcaccttaacagaggcaccagctggtccctcagtgcctctgtctccctcgaccatgcaaggagtacacttcccaggtgagggcctgaggcctgcacgactacaagccaggtccgtgagacccctgccgccttgctgctgccacttcatccactgggtcacacactcactcactcccttatccggcaggcaggccttgtgcaccagctgttgccaggtgtggggaacacagtgaacagaactgcatctcccgtgagtcctggagtgtggagccgcccagaaatagcaggtaggcacctggaggggcagcgacagagacacgggacaggctgagacggggagtgggggtggctgtgccaggatgttggccgagacctggagggtgaggaggggagggtgtggatacgagggggccaaggaacagcacgggggaggaaacagagaggagggaacagcatggagagggaacagcataggggagggaacagcacaggggagggaacagcacaggggagggaacagcacagggtgtgggaacagcacaggggagggaacagcacagggtgtgggaacagcacaggggagggggaacagcacaggggagagggaacagcatgagggagggaacagcacgggttgggggaacagcacaggggagggaacagcacgggggagggaatagcacgggttgggggaacagcatgagggaaggaacagcatgggttgggggaacagcacaggggagagggaacagcatgagggagggaacagcacgggttgggggaacagcacgggggagggaacatggtgttggtgctcaggataccttagcggggggtccctgacccacgatggcctgaggctttctcacctggggatggggctgggacccctggaggcaccacagggtctgagcagtcctctgaaaccatgcagggagccccagagcctggcgtcaggggtcatcaccatggcagaacctgatctcataggaggggaaggctgggcttggggagctgagtcaggccactctccctttagttttcacagcacggaggagggaacagcatggaggcgggggaaacagcatggagtggcagtgggaaacagcacagaggagggaacggcatgggggagggaacactgaggttggcctcaggccatatattcatccatccatccatccatgcatccatccacctgtccatcatccacccacccacctaatcatccatccaccc

SEQ ID NO: 29554 - DNA, 1038 bp, Artificial sequence
  DNA replication origin
ctgccagccagtctggtgtcggggtccctgctgctgcccttggtgggttcccagaggtgcagccaaggcagggaggagatacggggatcacggtgtcccccagaggggcagaatcctcccccacccccccgccacggacacctgtcctggctcagcctgccagtcgggaccctcatacagggactcatggtctgggctgactggtcccagtagagtgtctgcctcatgctgcagcgcccggggccagcagctccctgtgccccatcccctgccctagcaggctggtttccctttaagggctcagcccagggggagccaagtgacccccaccttccggaaggcttgggacggaggtgccgcgtcatactgacccttcctgtggatctctgtgttggcctcggcctcagtcagggcctggggcagcgtcctcagccagcaggcctcgtccaccagcagcagggtcagggctgggctctggggggggagggtaggaacacgtggggaggggtccgtcagcagcctgcctgggggttcccgtgagtatgtggggcatctgtgacacggatctgcctcccggcttggctggtaggccaagctgtggacagtcattggcccaagagctggcagaggtgtggcatgggccatctgtgccatagttgaccggtggggctaacaccgtgctggggctgggaggcttggcagggagtagtaccttccagggttgggcgcagggttcttgtggagactgaggcccaaagaggtcgagcaacatgctccaggtcacacagccagggagcagcagagcctgaactcacacccgggtctgcgtatctgtgttctccccactgctcgcccacccttgcccccagagtgctgggtgtgaaaccgctgttcccacaggggctggacctggtagaggctccttccacacaggccctagatgcctccagaatgacctctgtgggctggggccgagattagcccagaagatacggcacttccctagcaaccctcgggcctcagtgtcctcctgacagc

SEQ ID NO: 29555 - DNA, 1146 bp, Artificial sequence
  DNA replication origin
cacccggggatgaagcgggaggccctctgggcttaggcaggtccactggccagtggagtccctggccccagtgcagggtggggacaggctgtggtgcgcgtgagcgggccggctcaggcctgagggcggcaccgcaggggacacacagcccgggcgccccaggtgaacaagccggccccgcgcagcctgggctttgtgggctgaggctgccccctgcgggtggctgcaggaagagccgcccttggacggtttcctggagagccgggtccactctagggccccacctctggctgccgtccctgagtggccacccagggtctcccctagttactccaccacccgccctccacgtcatccctttcctgggagacttcctcggggccctcccactaggatgggcccagagcaaggaggcctggaggcaggcaggctgtgagcactcacaggggaccacccagccttgccccccaggcaggatggccctggcagccagccagccatggctgtgaacccgggtggccgctctcctgaccccatcctctgccccttgtttaagacgggacagggaagtggggcacaaagtcctaggtttggacacctgtctccctccagatgacgcactctggtgcagggtcaccaagccggtgcctgcggggggactcctgagcgtgctcctcacggccgagccccacagcacccccggccaccctgtgaagaaggagccagcagagcccacgtgcccggcccctgcacacgacctccagctcctgccccagcaggccgggatggcctccatccttgccaccgcagtgatcaacagtaagtgctgggctctccgcacccagggcggctgctccaccaaggaggagcaggcagggcaggagagggtgggagctgagggtgggaagctcgggggctgcaggctgccgacagagtgagaggtaaggcagggaaggaggtgacgtgggtggtcccaagtgcagaacacatagggacaggagggtccccagagcccagggccaccacagggaaagcccctgccagcaggcaagcgggcttaggcacagactcggctctgccccgcacaccacactagaagccagtgctttccctgggggcagacgcgggggcggccctgactgtggg

SEQ ID NO: 29556 - DNA, 2110 bp, Artificial sequence
  DNA replication origin
gtccggcctgcctgctctgggcccctgcgggggccctgggtgtgccggagaccgcgcaggtgaatggtggcaccgtgtgtgcttgcatgtgggttttcccgggcggcctgcgggactgggtggggaagcagccggcatcctgaggacccgcgtccggggtgggggctcaccgctgtggctgcgcatgtggatctccagggagctggcgctggggcagctcttgcggcactgggggaaggggcagacgcgctcgttggggtaggtctctttgggcttctcgtctgtggcggctgcggccggggagccggtgccctggcggctggcgcagtagtagagcaggtgcgcctgcaggttgcgctcgctgcggtaccagatgccacagtccttgcaggggaagacgtcttctgtggggtgggaagcaggcggggtcaggctgaaggccagcctgccagccagggcaaggctgtgggcggaggcagggcctggccgtgacggaccccaccgtcctccccaccccaggagctgaggctttgaccccttcctgtaactgtaagcctcctggatggtcctgtgacagccccactcccttccgtagatcccaggagccctgggacccgtggggagtggggtctgagtgaacccctatgggtccccttccaatggtgagccccataaggagatgctttggcctcatgggggcagaaggaagaagtggacaccgccaggtgaggctagcatccatgacatactggggtgaccgtgtggacccgggaggccgtggaagaggaaacgtgtgtgtacagatgtgcgtgcaggtgcgtgggagtgccaggctgcaaagaaaacccacgcacacagtccctgggcactcaggcacacgatggctgctgactgcagttctagggatgtgggcatgagaccaggagtgcacaagttaggaagcccccatgcgcccacacacctgggcggctccatgtcagtgaccacctggctggtcagatttgtcgaatttaccacactgaccccaaatgggctgcttataactgttgagagttttgggggcttgcactctgcttacggtggttttgccagcaggggaggacttctctagcgtgttctcggtttgtctttatagcagtttaaggaatgttctctgccccagagccctgccccatctgcccatggccccttggctgaagacagggaagggaaggacctgttcagcttggccttggcctccgtgtggaacccaggggccctgggattccttatctggctttcaagcccgttccacttagagactgatgtgatatctggtttctgcctctgcaggttagtgctggtttctcacccggcttctccgatgttgatcctgagtctgcagttatcacgcaggggtggcccctacccccgcgccctcccctctgcggcctgctcgccacctctgcctcttgggaggaatttcagtgcctgggtgaggtggctcttcctcctccacctcgctgttctaacgacttttctggctcacatctccctcctgtgctgttgatttctgtttctcaagttccttttacttgggggctgcaggcagctctgtcctctctcagctgaggccttgagctgggtcccagacctgggaggccactgggtgggtttgtttctgcgtctccaaggtcattgtgggggactcttgctgcaggggtgtggggagaggggccgtggccatgcagtttagaaaggctgcccgcctgctggtgaccacaggccaaatctggtggcctgcggaggggcctccaggcaggtgcctctgcatcccgcttcacaggcgagatgggcccagagtgccggaggctcaagaatgaaactggatctgaccctggaattggttcctgcggctcttccagagcagcagacaagcgtcggccgtgccctggcagccgcagaagtgctagggcaggactcaggtatgtcaacaagatgtgtggctcacggtggtgtccttccgaagcagcgttcccaggacactgctgcctggggatgaggcatgtcagacccgcgagggggaaaccgaggcagaggctgagcctggggcacccgcagctgcccctca

SEQ ID NO: 29557 - DNA, 1578 bp, Artificial sequence
  DNA replication origin
tcgggcccgaacacgtactgcggaaggaacagggccccggccaggcccagctcgccgggcaccgggctggagcccggcgtggggctggacagctcggccttgaccctggccggggcggggctgcgcggcgacggcgtccgcgacggggcctggggcccaggctctccggggcccaggatgggggccgcctccggctcctccaccgcctccaccttgatgctcctgggggccgccgggggctcgctgctgcctccattctgggccagaggctccgctctggcctctccgttggtggcctcggccagggcctttctgtccagtcctggcgatggggtgggcgccaggcccaggtccgcggaggccagggggccttgcagggccgtgtgctgctgctggaagctgcccagactgtctgcagagagatcgcaggggtggcacctcaggcctggggcaggacctggccggtcagagctggagggcgagctccggaaggggaggggtgggcgggagtggtttagagcgaaggctgaaacggacccccacctgtcttgggcgacaagcccactcccttcccactgctcagggggcctaaggggcaggggtggcccccacagggctgctcacctgggggcagcttggttgctgggtgtccggcccctggcgagtagatctcacccttggagccaggctggcagaccatgtggttggtgaccaagtggctgtagaggatgtcccttgtggtggagatgaagccacagctgtggcagacacctgtgggccatggcgaggtggtcaaggcccagggcggggaggcgggacccacacaccccccggcccctgcggtgcctaccgctcagcgtgtccgtgtgcaccttgaggtgccgctcgcagttggccttggtggtgaaggccgacaggcagatcaggcacacgaagggccgctctcctggaacacagggcgcgtaagagcggtgcccgggccagcttaaccttgggactccagggatgaggaaggcgactgggcccagggccgtgatctgtgccgggggaccctgtgctgaagggtctttaaacccctcctcctcctcctccgccttttgtctctcgggacagcagtgggcccagccctcagctgactacccagatagcccacagtccggcctgcctgctctgggcccctgcgggggccctgggtgtgccggagaccgcgcaggtgaatggtggcaccgtgtgtgcttgcatgtgggttttcccgggcggcctgcgggactgggtggggaagcagccggcatcctgaggacccgcgtccggggtgggggctcaccgctgtggctgcgcatgtggatctccagggagctggcgctggggcagctcttgcggcactgggggaaggggcagacgcgctcgttggggtaggtctctttgggcttctcgtctgtggcggctgcggccggggagccggtgccctggcggctggcgcagtagtagagcaggtgcgcctgcaggttgcgctcgctgcggtaccagatgccacagtccttgcaggggaagacgtcttctgtggggtgggaagcaggc

SEQ ID NO: 29558 - DNA, 1234 bp, Artificial sequence
  DNA replication origin
gcccgctcccgcccccgccgcctccccgcagcccgggtcccgtggcccccgggacggcctcggcccggagccccaggagccgccgcccggcccgcccccgtccccggccgccgcgcccgaggccgtgccgcccccgccggcgcccccctcctactcggacaagggcgtccagactcccagcaagggcacgccggcgccgctgcccaacggcaaccaccggtactgccgtctttgcaacatcaagttcagcagcctgtccaccttcatcgcccacaagaagtattactgctcctcgcacgccgccgagcacgtgaagtgagcgcccacactacagccgcagacgctttgcacgccccgctgcgatgcggggagggggccgcccccaggccgcacggactgccgctcctgggaaccccgccacgcacaggcctcggcggagggggccgcagggggcagcgcccgcctggacccttggcacttaataaagaagttcagtttgatgagcatggtggtgggccagcctagttctctgagccagcaggcacacgcagccagtgtcacatccagccctgctgtgtacacaggccactgcggcccggagtggctgggcccctgccggagttacaccactgggtgctaagagctagaccgagcgtcaggtcggaggccacagcacacactgaaccactgcagggccagccgctctgggcctaccccaccccagccctgtccatacccccctagggagagcagcctccacactgctgaccctctccacggtctacttggccgccagacacggaagagaggggcactgacctggctggccatcccccaaccctgcatggtcctgggggtccgatgtcccccatccagtcacagaccaccagggatggcaggggtgggggcgccctggggaggatgaagccctgtggtggccaaggctgggggaagaacaggcgagtaggtggacaggagagggagaccgaggccgaagcattccctggcctcgagggggtcctgatgctcactggtgggtgcatctctccctcagagccagggctgaggacaaccgtgtggtggagtcacctgtggtggctgagtcggtgcaagggtcagggcacccccaccccccgtcttccctgccctgctgggctgtatgggccggccacactgagggagtacttggctgaccgcgttcagccacggtgtcaccgtgccgtttgcagctggg

SEQ ID NO: 29559 - DNA, 944 bp, Artificial sequence
  DNA replication origin
gtgttttttaccccctttgagcacctgtcactcaccagagactgtattcgtagtttctagacacctttaaacagtttacttttaaatgtacacacagtgacaaccccccaccaggtttctattttttagaacatcttgtaccctgcgcccgcacctggggaggacttgggggcagagcctcctgaaccctccacgcaaattcatgcacaacaatgcaaatgatgagcagacttgaggggtccgtgcctcccgtccccgctatcacctggtcttcaacagaaggggtgtctgtgaggaaaaggctgcttgccttccctggagctcaggtccctgggagggggtggaagccatgtctgtccattggccttggctacgggccccatctggccagaccctagtgggcaggtggacaaagacatcagagaccactgaaagcgctgcagacccaggcccacgagctgcgggcaggagagcgagccctggactggctgggaagtgcctcgggcttctgaggcaagaggccgctgccttctttgcctgcactcaccagggctgctgggcaaagctgaaaaaaatgcagctagttcaagtagagttggaaatgggctgggaatggtagctcgcgcctgtcatcctaatgttctgggaggctgaggctgcaggagcactggaggtcaggagtttgagaccatcttgggcaacacaggaagaccctgtctctataaaaatgttttaaaagttagccaggtgtggtgggtcaagcctgtagtcccagctacttgggaggctgaggcaggaagatggtttcagctcaggagtttgaggctgcagtgacttatgatcgtgccactgaacttcagcctggggaaccgaacaagaccttagctctaaaaaatatagggttgcccagcctgggcaacatagggagacaccatttctacaaa

SEQ ID NO: 29560 - DNA, 2710 bp, Artificial sequence
  DNA replication origin
cagtgcccagcagtacggctggtggtcgagaaccgagtgctggaagccagcagagggatgtgtcctggcccagctgtgcccgccaggtgcctgggcaggaggtgtgtcccgatggaaccttggggccctcgtgcacagtcagggcactcagcccatggtgtggctgagaggacagaccctgtgcctggcagaggaaggggcctcaggagggcgaggctgccctgcatcatctcgtggacgttgtgtcccaagtagcgtgagggactcccggcaggctgggctgaccctgcctgggagttgccagcctgcaaggggctttgagctgtatgcagctcaggtagaagggagcaggtgccctcctggaagaaggagggtggaggcgggaggcccatcctgtgcagggcaggggacgggtacagcctggctgggtggccctgagggggaccttttaagccagtcttgaggagagaaggagtttcacaggcaaagctggggggagtggggaggggggaggagtggggagagagcagcttggaatgcagcggtccgagatccaagaagctcaggtcacacatgggactcagtggacagtgtgattggagagtgggctgtgacggtggccgtgtgccatgagtggacagtgtggctggaaagtgggctgtgacagttggactgactgctgggcatggggaggggctggctgtggtccacacacacccctgtgacttcaacagatgcagacccctcctctgtgtcggccacttgtgggtgcctgggaggcagaggtcaagcaggcgcagccccagctttcaaaggagacaggccagtaggcgacgggcaagaggacagagatgcagagtgaccgttcctacgtgggagtgagctggggacagaggtgcagagtgaccattcctacacgggagcgagctggggacagaggtgcagagtgaccgttcctacgcgggaagtgagccagggacaggtctgagggggcacctaagctgagagctggatgacaaggacagcctcggaggagtagagagggcatcaggaggcactgcctggagcaaccagctgcagcatggagcccagcgggtggtgggcttagcagggccaggggctgccgtcgggacaggccgccaacgggaggctcctctcctctgtgctgaggcagagaagggggacttctgacctctgaaggatggggccagtaacagaaggggttttacgcgaagcacaggcacctgggggcggggacgggcctcagagcagggtgagcctgggagaggggagcggtggcagctgtgtgaggagtggaccctcgagatttggaagcggctgttcagagagactcaagggtgaagtcccaggtctgggagtcggcgatggtggatgggtttgggaagcggtgggatttggacaaatcaagcattgctttgacaatgaagggtgaataggcaaggctgatgctctccagcttgaggggcagggggccactgaggatgcctatgcaggtgaggggaggagacaggtgggctggtggggagacaggtgggctcggggtgatgcctgtgcaggtgaggggaggagacagtgagccaggggggtgcttgcactggtgtggggagacaggtgggcttgggggaggggaacacctgcacaggtgtgggcagaagttacaggtgcgtggggttacagtcactcatggtacatcaagggcctggaaggacacaggggctgtaggtctgcaggtctggggctcaggggaggcgtggctagactacagaattagtggagagaagaccatgagcccaccccaggagtgtggagggagaacttcaaggggagaccagggcagactcagagccttgaacctggctcagcagagaaccagctggggggccgagggggtgtctgtgagcagggcaggcagcttcctggggagaggcgggagaaggcctgggccaccaccgagtcagcggctacaggggaggcacagggtggaggcccaggcggtggtctggtggggggagactggggtgatggcttgagggagtaggggtgactgatggcgtctgccaggtgtgggggccccagggtctgtgcagaagacgcgtgcccgaggcgagtcctgggtgcgatggggacgggctctggccacacgccaatgacctgggacgggcgatggcagcggtacccagccctgcatggtggggacagtagggggttatgcaagccaggacaggcgcagggcccttcgtgaggctcagtgtgctgccctaagcttcgagtccgggccgtggcggggccctctggggtgacttcaggtctgggtcccggtcacagggtccttgctgcctctgagatgagcccccaggaagggttgccaggcccgaactcccactcctgcggcacaggtgtggacactgaggcacgtctgggtgcatggcgggtttgtgcggcactgctgggctgtcttccagattctcctctgcgtcttgcattccagggcctcgcttggtcaggtttggggtggggctcaaagggggtgaggacactggagttgtgttttttaccccctttgagcacctgtcactcaccagagactgtattcgtagtttctagacacctttaaacagtttacttttaaatgtacacacagtgacaaccccccaccaggtttctattttttagaacatcttgtaccctg

SEQ ID NO: 29561 - DNA, 1248 bp, Artificial sequence
  DNA replication origin
ggcgaggggacagagggtggggaaggcgaggggacagagggtggggaaggcgaggggacagagggtggggaaggcgaggagagggtggggaaggcgaggggacagagggtggggaaggcgaggggacagagggtggggaaggcgaggggacagagggtggggaaggtgaccggacagagggtggggaaggtgcggggacagagggtggggaaggtgcggggacagagggtggggaaggtgaggagacagagggtggggaaggtgcggggacagagggtggggaaggtgactggacagagggtggggaaggtgacgggacagagggtggggaaggcgaggggacagagggtggggaaggtgaccggacagagggtggggaaggcgaggggacagagggtggggaaggcgaggggacagagggtggggaaggcgaggggacagagggtggggaaggcgaggggacagagggtggggaaggcgaggggacagagggtggggaaggcgaggggacagagggtggggaaggcgaggggacagagggtggggaaggcgacgggacagagggtggggaaggcgacgggacagagggtggggaaggtgaggggacagagggtggggaaggtgagggaacagagggtgacaaccatccaagtgtgaaactcatgggtatgtgcttgggctgcagacaccctggcctcaccccaccttggcccttttgatccatgagactgcacagttcccctcctggacccttggttccccccacacccaggaggcatagaacaggcaggacatcctgtggccagaaagatgatcgggggtctccagggcacggagcccccacccacacactacagtagggattgacagcagcctgaccgccactgccctttcccctgtaaggtggggttcccagtggatggccagagggtcccaccccagtggctccaatccccaccctccacgtcagcaccagccaggtggtcaccgtcaatgaccctgtcaccctcccgggggaaggggcttccaggcccacagccctggcaggttcatgtggggcactggccctcttcctgccccacccaccagccctgtggtctgggcgcctggctcacacctcccttcctcccacacgcaccagccacaggctccagggtctcagaggaactcctgggacatccctttatctggcaccaaagcccggggcagggcctgcatgttgaccgactgccttctctgctctggctg

SEQ ID NO: 29562 - DNA, 1623 bp, Artificial sequence
  DNA replication origin
ttgggagaaagtgtctgcaggaagcgccttgtgaattctgcggtgctcaccatgggctgggcgggttttcagtgggggcagcagggccttggagatggggccacactctggggaaccctttgggtcggggagtgagccccgctctgtctagacataggcagtcccagcacagcagagggcggtccttaggtccggaagggggcacagtcaggcgcgaattctgggccctgagctggggccatcatctcctcccgagagagagcacaggtgccattgcaggtgctgctagggtgctgcgtgccctccgagcttggcgacgctccactgagctgtgtgagtctccgtcctgggctccgtggagaccaggatgataataagatgaggaccagtggcttccaggagccccagtcttagaggtggagacaaagagctgtggaggggctgggggtggagaggagccagggggtgggcagagggggtggggatggggcgggaggcatggaaggggcaggggagagacgaagggccactggagccacattaagacagaggggaagtgttaagacttggagctgaaaatgctgggaattaagcggaaattctgctaaaagtttatggtaacacactgggatgggggccgggtgcaatggctcatgcctgtaatcccagcactttgggaggctgaggcaggcagatcacttgaggtcaagagttcaagaccagcctggccaacatggcgaaaccctgtctctacttaaaacaaaaaattagctgagtgtggtggtatgcgcctgtaatcccagctacttgggagactgaggcaggaggatcgcttgaaccctggaggcggaggttggagtgagccgagatcgcctcactgcactgcagcctgggtgacaagagtgaaactctatcaaaaaaaaaaaaaaaagaaagccaaaaatgctgagaattaaggcaaaattctgctaaaaggttatgataacacctgggatgggaaaggtcaggcgtgcaggatgaggcccgagggagagagatgccccttgcttggcgccttgcaaggctggaggaatggggccgtggggaagggcggtggcccctggctcagacaagggttccctggtggagggttggcagctgtgggagggagcggggaggctgggagctgcagggcctccctcaaagccaaccaggcctttggcgccagcatggaggggcttggaccagccctggaaggggagtcctttgtccctgtctccctgcctcccagctgcccactgcccatccctgctcaagagaggaggcgggaaggctgtgtcagggaggcccagctgggctgggggtggggccgaggttgctgctgcgggtcttcagatgaggactcgaatgctcccaggggcctggctgaggcgggaccagcggaaggagtagggaggagggctgggacagagactgggtccctgagatacaaggcaagggcaggggcctggtgtgaactcgcccataacctccaggttcgagtctctcctcctgagtgctccagacctgacccttgctcttcccttgggaccccactggcaaaagggactttgcagatatgactgagttaaggatcaagagagg

SEQ ID NO: 29563 - DNA, 998 bp, Artificial sequence
  DNA replication origin
aggtgaggctggctgaaccctctgggttttccatccttgcctgtaagtagagctgaaaacagcactttcgcccaggtgctaggaaacgagatgctgtgtgtaaagtgactggtggctgcctggcctggtggtaaaggtcccggaaatgggtgactgtgtgagtccaggctcacactgctctaaagaactactggagactgggtcatttatgaagaaagaggtttaattggctcacagttccacaggctgtgtaggaagcatggctgggagtcctcaggaaactcacaatcatggtggaaggtgaaggggaagcaggcacgtcctcacatggcggcaggagagagagagagaaagtggggggcgggggaagtgccgcatagtttaaaaccatcagatctcgtgagaactcactatctgagaatagtgagggggaaatccacccccgtgatccagtcacctcccaccaggcccctcccctaaccttgggaatgacaattcgacatgagatctggatggggacacagagccaaaccacatcagtggctttagggagatctgagtagcaatgaaggcatggcccgcttgggagaaagtgtctgcaggaagcgccttgtgaattctgcggtgctcaccatgggctgggcgggttttcagtgggggcagcagggccttggagatggggccacactctggggaaccctttgggtcggggagtgagccccgctctgtctagacataggcagtcccagcacagcagagggcggtccttaggtccggaagggggcacagtcaggcgcgaattctgggccctgagctggggccatcatctcctcccgagagagagcacaggtgccattgcaggtgctgctagggtgctgcgtgccctccgagcttggcgacgctccactgagctgtgtgagtctccgtcctgggctccgtggagaccaggatgataataagatgaggaccagtggcttccaggagccccagtcttagag

SEQ ID NO: 29564 - DNA, 1551 bp, Artificial sequence
  DNA replication origin
ggctttgggctctttctccaagttccctcaggccccagcaggtttggagcctcaaactctaatccctgtttctcagctcggcaaggctgtgctttctgtttttggacctccacgccaatgtgggaagatgccccacaaggaaaaccaggctgaacgtgggctcactttcttgtttatgttcgctcaagggatatagccccgggccccaccagcgctggttactccccacaggccccgttacatgcgtgtatcacacagcgaagcgtgtgtgtccagcctgtatccatgtcttcagcgggaggccgagtgccataccagcggttctgtctgaaagcattttacgaaggatagcccttgctatttcctcaaagagccaccagagggcactcccactccgcccagccgctgttcccggggggaaggggggatgggggggtgaagggtgatagaggggtgggggggtgggggggtgggggatgggggatgggggggtgggggtggtcccaggccctggactgcaggtgaaacctgcaggaagccctgtctgttctgtgtgggacccccacttccatcatggcccccaccacagacacagtgagtccactccagtccctgtcccagcctctggagggatgctggctctgaccccatctggccccctgcctttccctcgagatgtccatgggcccccaactctttgacgaggtctcagacaccccaaggaggccggggaaaggattcccggcgcagctgagcttgaggctgggggcttttctgttgtttctgcagccccagggcctggcaccgtaggacctctgcaggctggtgggggtgaatgaatgattgattgatgaatgaatgaatgaatgaatgtcagttcagctgccatttcaccgcctggaatttgggactcggactggcttcctggctcctcagcttgcagacggcctattgtgggacttcacctggtgatcatgtgagtcaatactcccagtaaactcccctccatgtatacatctgtcctattagtgctgtccctctagagaaccctgactcatatactgggggtgacgtcaacgctgctgtgactgtcattttctggttctagagaaacagtggacccactgagaccaagggcaaggggaggaaaggcccggggtagggctgaagacacaggttccaggcccagctctgctgctcaccgatgaggcttctcctctgttgagcaggtacaatcgtagggccctactcttgagcttgccgtgtgggttgacggtggcggtccacatacgaacactcagcgtggtgcctggcatgcagacagggttctgtaaatctcggtcgtcgtagacgattccatttattaccaccgagcacttcatgacccctttaggcaaaagacttccctctctggacccctgcctccacttctacgtggtggcgggttcaggactgatggctctgtagctccatcccatgccatttcattccattttcttccttagcttctccatgtcttggcttctctgttggggtgatttcagcaccaca

SEQ ID NO: 29565 - DNA, 1301 bp, Artificial sequence
  DNA replication origin
tccggcctccgcgcggttccgcccccgcagcgcgcgcccggacccgcgcgagccagccgaacccccgctacagcgcaggcgccacggggagttcgcttctcaggcggcgggcgtgcggatccgcgcctgcgcacagagctccccgcggccgccgggtcacgtgacggggctccggctgggccggcgggttcttcatccccggggatgatcgagttcatcaaagtggaaaacttaaggcggtcttcgtcgggctgatacttcctgctttattgaatgttgatattaaatgcttacctccggaattattttttgaggtatcgactttagattaaaagcctaacaattcttacctttcccgtgggctgcctggctccccgcgcggttcaacgcgagcagcgccagtgaggggacctgtcgcgtgtcctgctcagcgcggtgtcccacgggcgcgtccacagcccggggcgtccaggggctgcagcggtgcgagctgctctagagacggagggcccggccggagaccaggggccggcggtttcatcctgcgctgacccttgccaacgacgtggctggtcctggggatcacagggcttcgctcatcccatcttcctccatatccccaaggtggaaacaagggggcgagatgtccacaaactgaggaacagacaaaatgctggctgtccatgcagtggagtgtgagtcagtcatcaagaagagtgaagttcagacccatgccacaacatgggtgaaccttggaaacatactaagtaaagcaagccaatcgcaaaaggacaaaacctgtgcgactccatgctatggaccgagttctgtccccctaacatttgtatgtgaagccttaatccccaatgtgactgtgtttgcagaaagggcctttagagaagtaattaaggttaaatgagattataagggtggggtcctgatctgataggattagtgtccttggaagaggtaccacaggcctggcactgtggctcacacctgtaatcctagcactttgggagtccaaggtgggaggaccacctcctccaggagtttgagaccagcctgggcaacaaagcaagacccctgtctctacaaaaaaattaacagggcaccgtggtgcgtgcctgtagtcccagcaacttgttatggttacgtaagaggaatgtgaattcaaccctggtgattttgggtcgtgtcaggagcagccctgcgacaccagttggcaccttctgcagactctatgtgtcgataagacaaggtcccacccagcaagtgcccttttctcagctgatgaacat

SEQ ID NO: 29566 - DNA, 1177 bp, Artificial sequence
  DNA replication origin
gaaggaagctggagggggcggggcgagggagggaagcccgccggccgtaggactaccgtcgcggcctgatgacgtcgcacaatggccggcccccgcgggtagtggagcccgtttgttccgcccgtgtcgagcctggagccagaacctgtgaagagcggaagggccaagggacgtcttctccacgccgctccgactccaggggagccgtggcctcctctccgccctagcgctgaggttagctggggccgggagggcggcgggaggccgggccggcggcggcgggaggaggaggccgccgaggcggcggcggcggccgcgggagggaggcccgggagcccggcgcgcctccggccgtgcggacccaccggccgaagcgtggccctcgggcccagggaaggggaccttgagacaggcaccaccccgagttccgtccgtaagccggccccgcggtcctggggcgccctgggcgcccgagctcctcgcgcgctgcctccgcgccccgcggcagagtttattttcctgaagctgtcatttctcttccgggccactcgcgtggcacatgtgtgccgccggctaaggggcggtgagaggcgcccagattcacctccagagtaggtcatcccgggctgctgctgggctcttcggagaactttgagctctttatgaacctcctggaacttgctccgcagcttcaaagtgtgcacaggttgggcgcagtgattgccccaagacgcgcgccggtctcttaggagtatgtaacttccttgccccttggattaggagatcagaggtgctgggtcctttatatagaccaactgcagctataatgctggaagaactgaaacttaacagccttactcctgccaaacatttttcctgaatactttatgacaactgagtttgccgggtagagtggccgttttaaatgagctttgttcgaacaacgctaactcatttgcaagagtaggtcattcttcagacccatttgggaaaatggaagaagagagtgtttggcatctgaagtaccgtttggggtgtagcaaggtgctcatcatgtctcctgttagactcacctccagcctgttgtctgtagagtagtcctttcccgttcagtagttgggattatccgggtgaggtttgacctcggctgaatcccgcttcccagctttgggaggag

SEQ ID NO: 29567 - DNA, 1172 bp, Artificial sequence
  DNA replication origin
tgctctcatggaagactggtctatactgagatttccgccctggaaatctccctggtctgagcctcagagtttagcatattgatgagttatgtgcttcagactgtgagttcctcatcttagctgttagggtgatttgacgaagttgccccagggaagggtcagttagaagctgctgtgtagttctgttctgtgactgcagggacagtcatgagctttgaggaccaggtgcggctgtctcctcaggagcccatcagggtgagcttgcagagggaagagggccccatcgtgccagaaaagtccccctgctcgatgctcttgtgccccgtctctccataaagcagcttcctcattgcaggtgggctgcagggtcctgctgcttacccctgggcagggtaccctggaaggtgggagaaagccccagggatccctttccactgcgttcctctctgctgtgtccgagggaggggcagcagggaggctcggggtgcaccctgcatctccccaacagaggcctcaagcctgaaacccatcaggtgcgttgtgattggactttattcagttttaaccttgaatattagagcaaatgaatgagtaagagcagaggaaaagttggaaagggcatccgaggattgtactagaagaagaggagcagtcttttgggtgcctgctctgctccagaggcagggcatgtgctctgctgtggctgcacctacctgggacaagcctggaactcccgtctctggatggacaaatggacttgcccaggccacacggcggaaggccatctgtgccaacgacaccgggctgtgactgcagaattgctgccctgagttagtctagaattggtggttgggatgatttcactcctagtttgtgtttgctctaatttggcatctgacccggtttttaacattgtgttttaaggagagagctgggaatgagatgagatccccacttgagggtgctccctgatcctgcctctctcttgccatctcctctgtactccaccgcagagagttcaatcatagtcgggagcacttggcgttttgtgtgtaggtttgtggggtacaggtgtgattctgtgacacagacagatcgcgtggtgttggagccaaggctttcagtgcctctgtcacccaaataacgcacggtgtccccatgtgtttggcttt

SEQ ID NO: 29568 - DNA, 1435 bp, Artificial sequence
  DNA replication origin
tgagttagtctagaattggtggttgggatgatttcactcctagtttgtgtttgctctaatttggcatctgacccggtttttaacattgtgttttaaggagagagctgggaatgagatgagatccccacttgagggtgctccctgatcctgcctctctcttgccatctcctctgtactccaccgcagagagttcaatcatagtcgggagcacttggcgttttgtgtgtaggtttgtggggtacaggtgtgattctgtgacacagacagatcgcgtggtgttggagccaaggctttcagtgcctctgtcacccaaataacgcacggtgtccccatgtgtttggctttttaacaaaggaaagggagcgggagcgagagagagagaacagacagcgcgagcgcgagcgggagcgggagcgggaccgagagcgggagcgccggcagagggagcgcgagcgagagcgggagcgcgagcgcgacaaggagcggcagcggaggaaggaggagtgggagcgtgagcgagccaagcgggacgagaaggaccggcagcaccgtgaccgcgaccgggagaaggagcgggagaaggagaaggggaagcccaagccccgctccccgcagccgccaaggtagaccctgcttcctgaagcccaggggtgtgggggaggtccggcatgcagctctgtacctagtccccctggcctgcgcttcccctctgtggcccacagctctggagcccaggggaccagtgcaggcccacagcccgagcccatagttccaaacccagagctctccaacgcagggcctttctgtaaaactcccaaggccgtgacatctgccctgagctcctgggaggctgttctcattctagaggatctcactgatgtgaaaatgcttacagtccacgtgcaaacatcggtgtgttttaataggcgctgcccttgtataccacgcacggtgtgtaactcacaccctgggcaccatgttactgttctcaggagagttctgaattccaaagcatgcctggcccccagagcttgggactgggctcaggtgctgtggggcatccgtgttgctggccagggtgaggcactctagcagccagcatgcaggggagggccgggcgggctgctgtttttcctttgcggagtgggtgccttgggtgcagaatgatccttgctgccaactgctgggggcacagtcaagacccatgagacaggcaggcgctggggctcaggacagccctttttttctctcaaatatacttgactgttagagcagaatggatgggcgtcagtggacattagagtactggatgatgtttttggtgggtgttttttacaactttattgaaatataattaatggacgctgcaacatacccatttaaagtgtacaatcagtggtttctagaatattcacagagttgtgcagccatcatc

SEQ ID NO: 29569 - DNA, 1074 bp, Artificial sequence
  DNA replication origin
ggcagaatacatgactaggggctggggaagggggtctgtggccaggcacgtgtgcccataagccaccaaagtggacatgctgacggactcataaacccagagccacacagcacagtgaccttccacgtggatatcactgcctttctatgtctctgcttctaaaaccaatgatctgggtggcgtgaaaacccctattttgtgaatctggaaagcagactcagctggttctgtttgtagaaatcaatgtgcaattttagcaaccctgtaacaatcaattatgacatgcaggtaaaaatgcaggctgataccaaatccaaaactcacggacagcacccccaaatgtgggtaagcaccaacctgtgcgggactctgggacaggcacagaggctgcaacggggagcagggcagacggtggtgccccaggaccatctgctgcaagggctccagatgggcactgagggccatgaggaacaagaaagcaggctggcaagcaggaggggatggggagacttccctgtgcagaggaatctgagcaaaaccctggaggaggtagaggcagcccgtccgggcagagggaacggaggaggtgggggcagcctgtcaaaggcagagggaacggaggaggtgggggcagcctgtcaaaggcagagggaatggaggaggtgggggcagcccgtccaggcagagggaacggagcaggtgggggcagcccgtccaggcagagggaacggagcaggtgggggcagcccgtccaggcagagggaacggagcaggtgggggcagcctgtcaaacgcagagggaatggaggaggtgggggcagcccatctgggcagagggaacaggaggtggggcagcccgtccaggcagacggaatggaggaaatgggggcagcccatctgggcagagggagcggctgggggtgtgtgcacggggtgctgggctgcacctttgcagtggggtctcaggggagaaggcagccttaggctgagtgcacactgaaaatactgtgtgtgctgtaggggaagggcttctatccaaaagggcttgaaaggctgaagaaggcggcacaatgt

SEQ ID NO: 29570 - DNA, 654 bp, Artificial sequence
  DNA replication origin
acaccctcgccccccagcggctcccgagtgctgggccgagtgcagtgcacgacacagaggcagccccggctgcgcatgggcagagggcgcacacaccacgagggcaaggacagctgcttatcaaaatattttattttaggagacccctcaaaaaaagacccaccacattagacagacgccccaacaacacccttggcctttttttggtcttttctgtattttttcctttttaaatcaactaaaacaatttgatgcttaaaataaaagacaggaaatatttcctgatgagactttagtcgagaatatagatatatttctgatccgggggcgggtgatcaggggcgggggaggagaaggatgtgccaccagtggttcgcgaggttccgtttctcagctcaggagggagcctggctgcctggacccgggctagggacccagagctggggctccacaggcctgaccagggccagggaagaagacggaggaggaggaagagaaggcggggctggcggctggggcttgtaatttacatgagaaccgtgctggtcactagcgctgtctgtgtctgtctgtcctgcgggacttctgctctggggagggaggctgggattcagcgtcgttgtcatttcctgtgtggcttcttttccagctgag

SEQ ID NO: 29571 - DNA, 1766 bp, Artificial sequence
  DNA replication origin
ctgtccacacgtgggtcacacacgccgttccctcgggcaggacctggtcggcctgatgagggcagccagtgcctgaggaggtaaatggccgagtggaaaagttcggcaggagggagtgagcagaagaagccggagccctcgggcacaggagtgtcctccccggcctccctccctcggctgggcgcccccgcatcctgcgccccgcccaggggaggatggaagaaggcagccccaccgcggactccgctccgcccccgcctccttcctcctccgacccggggctgccttctccccagcggccgccgccccatctcccgctttgctctggttctgaggtgggacggccggactcccaggcacaggctgcaccgcgagaacggcgccagggacccggccagcgccgcgcgtctccccaccttccgcgtgttctcagcgctgtcccgggggtcgcagggccaggaagacacgcccggggggacctgcgggacctgcggactgggcggggcccggggtcctgtgggcgcagaggacgggaggacgaagggcggcctgcgctcctgcgggtggctgaggcaagcgcagaaataccgggttgggcaagactggaaaagcggcggcaggaaggctggagggcgacccggaggcggaggcccagacaggccgagcggctctcaaaccacaacccgggcccgcccccagcagaccacgcccccggaccctggtccggagatgcggaacgaggggcttcagacaaacgcagggccgggcgggtcagaggcagcgcgggggacgccccccagacgcagcgaaggacggacccacggtcaggagcccttcagcgccctgagcgggcctgcgggaagaggggtgaggcagggagggcactggacagggcggaaggaagcgctctctgcagggtctcccccctacatcaaggcgcaggtgcacagtgggtcacgcgctgccggctgcccacaacgcaggtgtgtccagccgagggcactgctggcgggggtgcaaaatcgtcatgggacgttggctgggacagcagagggcccctccctgcggcgcggccgcccccaccccctcatgggttttccccggcaggagtggtctcgtgtgtctcggccttttccccatctgtggatccctctagggccaccgcctccaagcagggtctacgtctgcctgcccacccaaagcccagccgaacgggtgggtggaagcgtggctgtgggggaggagctgcgggcagagggcagaggccctggggcaccccctgggaggggctggcgggcggatgccgttgccagaatcccacacaggctttctagtcactgcatggggagcgaggagaacgtgagtgccaaccacctggagcaggacgtccctggagggcgtggacgcccatcgatgcctgtcacacagcaaggccgtccttcccagctgcctgaccaaacatcctctccactagaccacatgggggcagtcaccctcctaggacaggcccctctgcaccagtgtccaagagccagagggatgggtagccacacctggggtccactgccacccggtgcgagttcaaacccagctccagactgaggtgcctagggctgtggccgggggctgagcagccgcagaggggacctcgcctggtcccagtccacaggtgagctgtggtgggttcacctgtctgctcctggccgttgagctgtggtgggctcacctgtccgctcctggccgtaaagagacagtcactgcagatg

SEQ ID NO: 29572 - DNA, 1012 bp, Artificial sequence
  DNA replication origin
ggttgtggtttgagagccgctcggcctgtctgggcctccgcctccgggtcgccctccagccttcctgccgccgcttttccagtcttgcccaacccggtatttctgcgcttgcctcagccacccgcaggagcgcaggccgcccttcgtcctcccgtcctctgcgcccacaggaccccgggccccgcccagtccgcaggtcccgcaggtccccccgggcgtgtcttcctggccctgcgacccccgggacagcgctgagaacacgcggaaggtggggagacgcgcggcgctggccgggtccctggcgccgttctcgcggtgcagcctgtgcctgggagtccggccgtcccacctcagaaccagagcaaagcgggagatggggcggcggccgctggggagaaggcagccccgggtcggaggaggaaggaggcgggggcggagcggagtccgcggtggggctgccttcttccatcctcccctgggcggggcgcaggatgcgggggcgcccagccgagggagggaggccggggaggacactcctgtgcccgagggctccggcttcttctgctcactccctcctgccgaacttttccactcggccatttacctcctcaggcactggctgccctcatcaggccgaccaggtcctgcccgagggaacggcgtgtgtgacccacgtgtggacagacctgttccccatgccaggagggagggtcactggctccaccgggggatgggggacgagggcactaggccgaggtggggggcttctcgctctccccgtcttttcctggcgttttcctccattccctctggctcctattccctcccccttcctctctttcttgggtatggttgagcaggtcgtgcactgcacaaggactcccagcagaggacgaggactgacatcaatttgtctttccctcccaacactgtgcgttccctaaccctgcacgaaggcaccctcctcccctcctcaagattccccacccggcctggcctgcagccctagccc

SEQ ID NO: 29573 - DNA, 1159 bp, Artificial sequence
  DNA replication origin
aagttgaatcagcaaggtgctgacggatacgcaagcagaaaccctcttataggaggttcaaggctgggcgcagtggctcactcctgtaatcccagcactttgggaggccaaggcgagcagatcacttgaggtcaggagcctcagaccagcctggccgatatggcaaaaccctgtctgtactaaaaatacaaaaattagccaggcatggtggggggtgcctgtaatcccagctactcggaagcctgaggcaggagaatcgcttgaacctgggatgtggaggttgcagtgagctgggacagcaccatttccctccagctcgggtgacagcaagaccctgtctcaaaaaaaaaaaaaaagtttgagaatgtcagacaaggcagcaccctgtgtaggtgctcaggttgggcggagtctctctcgggggaggggggtaacaggacagcgcctcccggggcctccttgcatgtctgtgtcctgatgcacagcaggcgggggctgcggggaccagagaaggaagaagcgccccagctgggcacttcccgaggaggaagtggtgccggaatttcccccaggtgtggcctcaggtataagagcggctgctgccaggtgcatggccaggtgcacctgtgggattgccgccaggtgtgcaggccgctccaagcccagcctgccccgctgccgccaccatgacggtgagcctctccacatgccgctcggatggatgctgcttggatgtgcagcctggcatggaagggctggggttctctgagcctgggaggagggtgttgggatggggtctgggaaacccctcagtctgggggtaggggaggcagctgcagatcctcggagcgctggcatgctgggtgtcttgggctgaagggctagcctctctgggcttcagtttccccatctatagagggagggctgtactccatctttccgctgggaacaaggaaagctgaggtggaagtgaggtgccccctgccctgggcacctcctaaccacccacctgcctgtttcaccagctcctccccggcctcctgtttctgacctggctgcacacatgcctggcccaccatgacccctccctcagggggcacccccacagtcacggtaccccacactgctactcggctgaggaactgcccctcggccaggc

SEQ ID NO: 29574 - DNA, 1124 bp, Artificial sequence
  DNA replication origin
atcgcttgaactcagaaggtgggggtggcagtgagctgaagtcataccacactgcactccagcctgggcaacagagcgagaccctttttcaagaaagaaaagaaactcaataaatgtgttgaatgaaaattccatctcctggacaagggccaccacctccaggaagtcttccctgaggcctcttgctttgggagtctgagtggagtccttgttcttctgtgcagcacccccacccccatctccaggcacctggacgcagtaggtgggtgagccagggggccaggcaggggaggggctaacaactgcccagcagccccatggcaatgtcagcccttggggccgggggcctagagactgagaccctgagactgtcacaggcctgggccccctttccacgactggggctgctccccccggggccccttaactaaaatctccaacagagcctgggtcccgaagcgtggctagttcaccatcagggagggcgcttggccttggatgttgatccgaaccacgaaggctgggggccctgccttgagccgacagccctgcagttcatcctcagagacttgccttgggggccgagagggtgcccctaggcgctcacatcattacaaagcatagggctcaaggcactgcttgaggaaggaggctggttcctgttcccaggggtgtcctcaggggagacactgtgtgggcagagcagggacacctgtgacccccccgtgctacagctcagtcccacctgcatgcactgctcgcggctgcgtagacctttctggaaggacaccccagaattgggtccatggctggcctggaccagggctgaacgggagaatgtcgcattgaatgttggcctctggggatgtgttcatcagtttaataatacacgtacacttaaataattgtttaagaaacaggggtacttccaaggaggttgggaagaggcagcctgcgggggcctgaggccagtgatagggtaagggaagccgggagcaggacagggagccaaggtacaggcagccgtgtgacaccttttctgcagctttaagggctggaagaggtgctgagctccttctacccccaactactgaggctggagatgaggagaacagtggggggct

SEQ ID NO: 29575 - DNA, 1822 bp, Artificial sequence
  DNA replication origin
aagtgatcctcccacctcggcctcccagagtgctgggattacaggcgtgagccaccgcacccagccatatgagtttctactaagcacctggcactgggaacaggccgagaacaaaatggtgaaaacccttcctgcctccacggtgactaatgaaacaagtggtgtgtagtctgtgagtgagtccaggacagaggctctgggggaggggctgcagttcttttttttttttttgaggagtctcgctctggcccaggctggagtgcaatggtgcgatctcggctcactgcaagctccgcctcccgggttcacaccattctcctgcctcagcctcctgagtagctgggactacaggcgcccgccaccacgcccggctaattttttgtatttttagtagagacggggtttcaccgtgttagccaggatggtctcgatctcctgacctcatgatctgcccgcctcggcctcccaaagtgctgggattacaggcgtgagccaccgcgcccggccaaggggctgcagttctaagcagagggtcagggaggcctcgaagacctgaaggggaggaggaaggagccaggcagccatgcagggaacagctccaggcagcaggaagagcccatgcaaaggccctgagaagacacatgctgcgtgtgtccaagggtcagagagtggcctgcgtggctgatgccaggtgagagggggaccgcaggggcagggcagggcgctgggggtgcagatcatgtctgccctggggccatcagaagcttgtggctgtcactggaggtagctgagcctgtgggttctgagcctgcggattctgagccggaggcactggggtgaggctttgggtttcaatggcagcatcaggatggtttcaggggatgagggcagagcgggaggcggcaggtggcctgggtggggatggcccatgtagctggggtctggatttgggccaggattggatgtggggtgtgggggtttcaagggtgacctgaagcttggtgacctggggggacggctgagatgaggctggattgagacgtctgtatggtgccgagtgttggctggtggggggtggattctgaaggcccccaggaacagaggaccctggctctgaagtgtgagttgctgggagagcaggtggacaagcagcaggcaagggcttctccggcctcaggggagtgggtgccttggcgagagcccaaaggtgggggacgtggctgacgccgggcaaagctttgggggcaccgggctggggtggtggtgaggacctgtgggcaggtgtgtgtgcagccagccacagcctccgcacaagtgaggggaaggggtggccagaagcccctgcaacttggcctgagcgtcctgggcagctggggggccccccagcatcagtgtgggggcaaacaaggccacatccgccaccagcttcaccccagcttctacggaaaagaggcgcagggtagaggctcaccacgtggctccgaccctgttcccttttcacttaacgccagcggcctcctctggaatccaagccccttagggaggcgttaggtgtggagggcctgcagggcctgcaggagctgtcaagggaggactctgctgcctcctccaggcccgggaggacctttctagggaggcacacacctggaatccaggtactatatttcgtggaatatacggtacccgggatttcgtgtgctgctgagaaggaaggcgatgctgatgttaatgaaactggaatgcggcccggctggcaggaaacggggtgcctgcccaggcctcgggaaccatcgctaccccagccccgcccaccggccccagg

SEQ ID NO: 29576 - DNA, 1423 bp, Artificial sequence
  DNA replication origin
cgggatttcgtgtgctgctgagaaggaaggcgatgctgatgttaatgaaactggaatgcggcccggctggcaggaaacggggtgcctgcccaggcctcgggaaccatcgctaccccagccccgcccaccggccccaggcagaggctcacgcgctcccggcttcgctgcatttattgcaggtgggtgcacctggcgggagggcaggtccggggcgaggtcacacgacctcgtcggtcaccgggatggggttgacctggggacctcccgggggtccccccgccgccaccgcagcctcctcctcgctgggcttcttgcgggcctcggccgggggccgcggcggggggttgctgggcggctgcttgatggtgcctccgatctgcggccgctcccggggcttgggctcgatgggcgtccactgctcgccacgcacagccgcctgcggggcactgaagggttgagccgcgccccagcgcccgccctccctccctccctccctccccggaggcccaccccgctaggggccctgggacaggctcaagtctgaatcccacgcaggatggtgtgactgccactcagagaggttaagtgacgcgcccgaggccacacagccaggacctgggtcggcctgacaccagcccaagctatttcttcatgccaggagtggggcccgaacccctgggcttctggaagatcccgtggtggacactcccagatgcaaattctagtactcaaattctcctctcaaggtgccaagggcagggaaggcagggaggcaggcccgaggtccagcaggaggggtggcccaggagagtagcaggccctgctccgtctggtgggcgccattcacccacgctggccggcagccccccaagggtgcccaggcatttctgcacatgggggtggtggggggagagcttgaagaccacgggattccactggcttttactaaaaatacagactcctgggcccatgcccggaggttccactgcaacaggtcaagtggacctgggagtgtgtgcttttcatcttctatcccataatatctggtggaaaaatatgtcacatcatatacgtcatgaacagaaagagaaactggacatgtgtgatcctacctgactccaaaacggaaacattccattctgaaaagcaaaactagaaggctgatagaagaaaaggcaggaacgtgaaggcaggacccagggccagggaaaggtgttttcacaaagcacagaccatagagcaggtgaacagggaaacctctgctcttccgtgcagtgaaggactccacgcgccaagttaacagaccctcaccagaaagcatgaaggcatccccagtgtttaaaggttacaaaggctaaatagctaaaatatatgtggacttcctgcaacttaagaaaaagacaatcaggccgggcgcggtggc

SEQ ID NO: 29577 - DNA, 1536 bp, Artificial sequence
  DNA replication origin
gcaggtgtcggcagtttaagaaaatgtctgcgtcctggcaccgcccatgaatcagcgcgaatagggtttaggtgagaaaagcctgataatgggacccaagcgcaggcacggtcttcggccggctgcgtgaccccaggccagtcacagcacctccctgagcctccgcatctttgtctgtaaagtggggaccccagtacccctcccagggctgtggtgcgggttaatgaggaaatgcaaggaaatgacccgacacactagacacgccaaaaatggcagcagcaaccgctgcgtccccgccgtgctgtgagcacacgcccaggctcacacttgctcccagccttggctcagcctacagagccggcttcaagggccatgcgtgtccgagggtgtcagggcaggggctggggatgggggtggccggggccgacctcagagggcgccactcaccagtaggtagatgccgctcgcaatggccaggcaggcggtcccaaggatggtggccagcaggaagccggcgggcaccgagagcctgggggacagcgggtgagaggcagggacacagaagggcactcagaaaggggaacggagccccaggtctgggggccaaggccacaaagtctcaggacaaggcagactgcagacccaggggacgtgcgcggaccggggcttgtttcggtcctgggtgttctcagccttgatgtggacactagcggctctggtgcacttgctcggaggaagcagccacgtgtgggtgtcctggcctcagccggcagtaaccagcagacacacagcacggaaccctccaccctaccaggaagcccaggcaagaccccccagcagtgcatgctgaccccagaccctggcgacggatcggagctcctcggatttggagtggatccttacaaatcctgcacactagacagcagacacaggccctgccagagccagggacccgaatttttgtttggaaaaacactgaggtaagtgggggtggctcctgtccaggcagcccggccggtgggacagtggggagggtcggctccaagccctcctgagccctagagggggtgcgggacggggactcacaggagatgcaggacggcccgaacatagtaattcctggtaaagggcccgaacagcttcaccacggcggtcatgtacttctgtcccctgggggagggaggaaggcgagacggcgcggctgggcctctcccactcgggactcctttgctgccctgctgaccaccccagggcacccaggcctctttcctcccacaaaacacaccgggcaggcaccggccttggtttacccacaagcaccaaagggttggttccggagcctccaagtgagaaaccaagctccacccaaccctgtgagccctgcctgggccccgcagcccccggagagaccccagagcaggaggagactcaccagcgctccatggtggagcccttcttcctcttcccccgggggtactccagcaggcacacaaacacgcccgccacactgaagccatgtggttaaggaacagccca

SEQ ID NO: 29578 - DNA, 2414 bp, Artificial sequence
  DNA replication origin
aggaaatgggggctgggcctctggtccccatggggaggccacccttgtccttggtagcatcagggtgcagaggtgttcccgggctgtaggggtgactcccccaccccccaaggctctggagaggccgatttgctcaggaagccgaccttcacaccttgtcctgctattaatagacgcctggttgacacgggaccctcggttgggtccggagcattgggcaggggcacttgtcagtgtttgagagctgaagtttgggaagccctggggaagcgcaggaactccccgcctgggctggggctgccgggcagggcccctcctatgcctcggcgtggctagagagggcgggggcagaaggctccgggacagccctgcaccctacagatgcgggtctccgcccagccgcggtcacctggggggctgggggcggggcctgggcggggcggggttcggccgggagcgcaggggcggcagtgcgcgcctagcagtgtcccagccgggttcgtgtcgccatggggcagatcgagtgggccatgtgggccaacgaacaggcgctggcgtccggcctgagtgagtgcacgtcagggacggtggaggctgcagcctggaggggtgtcccaagaccccagccgggacctcgggctacttacagggtggggaagtggggcgccaggcgggccaggccgggccggggtcaggccaggagggtgcggggaacgggggcgggaccctcaggccgcgggctggaaggaggagttctgagacccccagtaattcccttgcagaccctgcggagcgcggcgcccctcccccattcccttctctcggtcccccgactccgcgaaggaggaagttgcagcgcaggggaagaggcggttcagccccggtggtttccggggtcaccgccccgaagcccccgagtgggggctccggcctgggcatcgggagaagctcccctgcccctcggtagccagctggcctggaggtcgctctccctgggcttggggtggggaatgggctcatgccctggggctcagcccttctcatctggagtctgcgctggaggcggtctgagatttcacaaggcgccgaaaccacccagtgacggccctgcccagcccagctgcacaggcactttgctcttggggtgggatggcacagcccccagtcaccctcctgtgcatttgctcagaggttctggtgagggcagcggactccatttggaaatggaccctctcgggaccagggccagggagtgtctggcccagcacgggtgaggctgggctcaggcgaggtctgagggcagaggcaccactgcagcagctccaggaaggacctgcaccgggggaggagtgcctgggaagggcctgggggctgagggtgaggaggaggggcccgctgccaccactcccctggggctctgagcgccctccctgttgtctggagggtgcgtggcagctggagtgggagcagagacctcagggtgggagggctggaggacggggccctgcagcctgtcctgtgcccaggaaagtgaccgcctgcttcgagtcagcggccaagaagtcggtgggtcagttcagacagctctccccagagctgccccgtgagactcaccctgcctgccccgcactccctacaggaagtagacggactgagggcacccagctgggagccaggagacctgggctctagtctggcctcctgctgaaaccctccaggggctcctggcccgaagagttagagccagactggacgccctgcactgcccgccctggcctcccggctctccggccccctcctccagctgccgtgcttcctttctgttcctagatctcctgagcgtgccccagggcctcggcacaagctgctgcttctgcagagcctcatggctgtctcatttatttctcaattcaaatgccacctgcctggggaggtccttccagaccgtgcagccccaggaggcagctggcccggagacagcagggccttgacaaagagtcccccctgtacacagcaggtgctctgtaaatgtggctgggtgccagaatacgtcctcagacctccctggtggcaccagcggcagctttgcaccctctttcggatggcaggctcgggaccaggacggtccccaaagatgcatggacaattggctgagtagactcaaggacactgccctcccctcctccgacgcagacagacaaacccagagagttaatgtgtagctgggctcaaaccaaggataggaaatcttccaacaagaccatgtggagacaaaaacagaatggctggcagggcaaggtggctacacctgtaatcctagcactttgggaggccaaggcgggcggatcacgaggtcaggagatcgagaccatcctggctaacacagtgaaaccccgtctctactaaaaatacaa

SEQ ID NO: 29579 - DNA, 1847 bp, Artificial sequence
  DNA replication origin
ccaccccaaccaccccagcagaccggagttcctgccctctgacctgctccgagggccaagcttgcatccagtgatcacggccgcccaagccattgccgccaccttcctctcaggggctgcctgttcccaggctctgtggttctctgtcccccctgtgacagaagcagtgcccagggcagggggctcgcagctggcaggggcggctgtgcctgcaggagctgcgtgtgggtgtcaccactcaggcgctttaccttctgaccaggacccacaggaagggcgggggcacaccgctaccctcctgtgtccggccctacagatgctgggcacaggatgaggcgctgccattcctggtgacctgacatggatttctatccccaggtggggccagggcctcaaatcctggatgacccctgcgcccacctcctgggtcctgacggcctgccgaagccagctgcctgactgcctcagcagggaccgcatgccgcttggagaaggggtggcctcgccggagctagggagcggatgtggtgggctggccggactcctgggacatgtgggtggtggcttgaccccgggcccatgggcagcttgctgtggggcagtgcagggagtcctgcggccgcccaggtgtcaggagaggtccccgccgagtgcttcagctgccctaagctgcaccagcgctttgccaagatgggatggggagggggtatgagaactggcagagcctcggtgcagcagggctgaagggctttctcaccccagctctggctatgcccagttctctgagaaaggagctcagtggggaggtggtccctccagcggaccagggaaggggtcaccgtgctgggagcagcctccttgggcctcaggaaaccaccaagtgcctcggatggtggctgcccacggcgcttctgctgagaccctgcccccggcccaggtgtctcggagggtggctgcccacggcctgggtgtggctggaatggtggcaggagtgggcaccagtgcggccccggtggccatggggaataaaccagcattgctgcctccggcctccgccgtttttctgtttcgtaaaccagcatcccggggttcctgctctgagtgaccctggcacctgtcagggagtccaggtgtgccccatgagggcctgggggaggggcaggctgggcagagccacagaggggctcccctcaaaccccacattggctcaggtgggaccctcaggagcaaccccaggtctaaagtcttcccatgggcgctgggctcaccacccccacgccagcccctgcctcccgtacccaggccggacgtgacggggccgtccctgcattctgtgctttcccagttgtacacatcctgtcccctccctcgagtctcagtcacagttcagtgacctggtgacgggaggccccctgcagtgtctgacccaggccacgcctgtgccagcccagagccagggggaggaaatgggggctgggcctctggtccccatggggaggccacccttgtccttggtagcatcagggtgcagaggtgttcccgggctgtaggggtgactcccccaccccccaaggctctggagaggccgatttgctcaggaagccgaccttcacaccttgtcctgctattaatagacgcctggttgacacgggaccctcggttgggtccggagcattgggcaggggcacttgtcagtgtttgagagctgaagtttgggaagccctggggaagcgcaggaactccccgcctgggctggggctgccgggcagggcccctcctatgcctcggcgtggctagagagggcgggggcagaaggctccgggacagccctgcaccctacagatgcg

SEQ ID NO: 29580 - DNA, 1410 bp, Artificial sequence
  DNA replication origin
ccgagtccgtggtgcccgcgcgcatggcggagatggcccgctgcatccgggagcgagacttccccagcttcgcccagctgaccatgaaggacagcaaccagttccacgccacctgcctcgacaccttcccgcccatctcttacctcaatgccatctcctggcgcatcatccacctggtgcaccgcttcaacgcccaccacggggacaccaaggtgacgcgggccgggagggcagaggctgcgctcgcgctgtagcgcgtgtctaggcttgtgctgccgtggagacggccccggggctcgcgtgcagggcaatctgtgtctgaaagctccaccctgctgtgtgcgaagctcactgaccatctgggttcttctgtttcattttgtttcttgacttgcccgggtcacggccccaccaccttcttcctgggttcacaggcagacgtgtcaagtaccaggcacttggggtcacagctccactccagtgtggccctgagggcctagactgagctcttggagagcccaaggccgcctggcagaccagagggttggggagacaagggtcaggcaccacgtgaatagccagggtgactgctgtgggttccaggtggcgtacacctttgacgcgggccccaatgccgtgatcttcaccctggacgacactgtggctgagtttgtggctgctgtgtggcacggctttcccccaggctcgaatggagacacgtgagtgtggaccccgcccctcctcctttttgggagatggtgccaggaactctggtcggaagagacggaggcacctgaaggctgtggcgctgagacagggagtcccagggcaggcagcagtcccccgagtgtgggagccacgggcagggtgtccccatagagccatcccacagcccacgtccacagggaagaaagagaggccgctcacgcgtgtgtgagcaacgcccagggtctcccacctcctgagtgacagcgtcccctgcagctcgggaccccgcaggctcttattctatagaacagtggcttaggaaacacgcctgcactcccagatgtgtgcgtaagtgtccgacattttgaaggaaaggagtcaaagcccctgatttccttcttactgaagcgagttagagccagtcaaggcggccgggtgttgaccccgccccggcagttgggtgtcttttcttgggtggggtccggcagctgcatcttggcgccacagagcccccatgtacgccctcctcggtgcacagcttggccctgaaccgcctcttcccctgcgctgctctgtgggggtgccacagagcccccatgtacgccctcctcggtgcacagcttggcccagcctccttacgccccggggctgttgatttcttccctcccgtgttttcatggtgtcttattctcaatgtgagag

SEQ ID NO: 29581 - DNA, 2091 bp, Artificial sequence
  DNA replication origin
gcacatctgaacattttcatcttccagttgcagctggcgtggggctctcgcctgtaatcccagtacttaagaggctgatgggggagaagcactgtaggccaggagttcaagaccagcctgggcaacatagtgagacccccccccatctctacaaaaaataaaaaaatcttcccgttgctgtatgtggagcccctctagattgtcagtgatagaaaccacttcaaactggctcagccctaaaatagcgatgattttgtggctcacgtaactgaggattccaatgggcacagctggttgcaggccccgctggacccagctctctgctggccccaggccacttgctggcagcttcccacccactgtcagagcctgtccccccggtggtggtctcacaccatcttcacccctcaactccaggggtgacgcttcctggcccacctgggctcctgcgccttccctgaaccaccctcggtgaccagggtgggtgaccagacctggaggtggggttgccctgctggagccctgtgggaggaggggagaaggtggctcccgtgctgggtgggcagggggcgcgtcttgtggagtccagctctgtcctggcatcggtccctgccccacacagccttaaaattccttcccaccctcaaagcccagcttgggtgtcctcgggggcctttctcccgccttccatggggcttcctgctctgccgcaggtaccttttgttgcccttgtcgcgggccgcaagctctgcaggccgtgaacagagagtgtccgagagtggaactagcggaggtgggggacagacggctgggccggtgaatgctggcctcaaaggctgatggcccagaagccctgtcatctggaaatccccatttgccgtggggtgtgggacgttcctggggcggtgagctgtcagggagcacagcgcaggcagctctgaggaccctccctgaatccgcatgcctgcagcctacaccctggcccgtgtctacggcgtggagagtgacctctcagaagtggctcgccggggctcaggcagcgcctgccggagcctgtatgggggctttgtggagtggcagatgggagagcaggccgacgggaaggacagcatcgctcggcaagtggcccccgagtcacactggcctgaactccgcgtgctcatccttgtggtgagtggggtggggcgggtggagcagcagcccggtggcctctgtccctagtcagggctgctgccgggagcaggagcgaaggcgtccatccaggctttgcttggctcctggggtcagcgggggctgaaggaacagaagcgtggttgagtgctcaggaaccgctcccatgcggcgggcgccaccacccgctgggatctggaagttgcccctgcgtcacccctgctgtggccgggaggcctctgtggtcaggcaggtggcactgactcccacccccgctgcctgcattggctgagggagggccgagtgtttgaggctgaggtccttggggctggccccctgcagggtgtggcccaggctgtctctccctcgtgcaggtgagcgctgagaagaagctgacaggcagtaccgtgggcatgcgggccagtgtggagaccagccccctgcttcgggtaaggccaggagcgggtggtcccggggccctgggagtcacgcttgtgcccggctctgccctcagcctctgtctgggcccgagtgttctcacacctgcggcagccccgccaagaccacgtgcaggagccaaatgcagagatggggctcgagccgggcctccaaccccggagtctctcctcgaaccctctgctgtcgagacccccagcggctccatgggaaacaccctgtgccttgcagttccgggccgagtccgtggtgcccgcgcgcatggcggagatggcccgctgcatccgggagcgagacttccccagcttcgcccagctgaccatgaaggacagcaaccagttccacgccacctgcctcgacaccttcccgcccatctcttacctcaatgccatctcctggcgcatcatccacctggtgcaccgcttcaacgcccaccacggggacaccaaggtgacgcgggccggg

SEQ ID NO: 29582 - DNA, 1061 bp, Artificial sequence
  DNA replication origin
cagtttccccgtctgtcgaggccctgggagggcaggacggagcgcgccgccgaatcagcgcgcgacccccgcgtacccggcctcgctcccggccatccccgtcccaggccggcccgcggcactcacagtacttgatgaccgcgatgttgaccggcgctgtacaagtgactgccgccagcggcttctccgaggccatggtcccaccgcgcagtgaccccagctccacagccacttacggcccgcgatcccaccccagaggcctctgcctcctcacgcgctaccacaggattggcccgtgcgagcccggctgctcgcgcgccgaccaatcagcggcgagtcgggcgcacgcattacctctcagccaatggacgggatcggacgatgggttgctgacgtaggtccgccccacccgcagggtgcgctcgccaggcctggggcgtggtgttgtctgcgcaggcgccgtgtgcccaggcgcctggcgtccgcgtcggcgatccggggtctgggcgcggcgaggtgggcgctgttgcctgtgggggctacctgtctgctggtgctgtgcgggcttgtgcggggctgtgcggcagctgtgtggggcccgtgaggagctgtgcggggggctgtgcgaagggctgtgtgaggcgctgtgctgggggctgtgcggagaccttgaggcgctgtgcggggtccgtgaggctctgtgtggggcgccgtgtgggagactctgcgggggccgtaaagggtccgtgaggcgctgtgtgcgggttgtgaggcgctgtgcggggaccatgaaggggccgtggggcgctgtgcgggtgccgtggggcgctgtgtgggagggaggctgtgcggggccgtgggacggtgtgcggggctgaggggagggcgggtcgcgctgtgccctccttgaagctcttggacggccccgctgggtatgggggtgcacacaggcccgagggcaggcgctggaggatgtatcccgggatccactcttaacccggcagccgaaggcaccctgtcccgccgcccacagccttctccgcgccatgtcctgggccagg

SEQ ID NO: 29583 - DNA, 1307 bp, Artificial sequence
  DNA replication origin
tcccgcccgcgcacctgtcctgggcgtgttgcccgagaccccgcctcgccctcagttccgcccccgtggccccgccccactcgcgccgggcgctggttggcggaggcggcgcgctatgctaatgagcctgaccccttcaagcgccggcggacgcagcagtccggacccaggcgcgcccctcccgccccagcccaccccggcctgccgcccgggaggggaacatgccgcgctccttcctggtgaaaacgcactccagccacagggtccccaactaccggcggctggagacgcagagaggtactgactacccgatccccgagcccctgccgggactcgaccctgaggggcgggagagagagagaggcccctgggagcgggggctggggagacacctgtcccaggtgggaggagaaggagccagcgcctctgcgcagcggctgcggctgcagggagggaggtggcccacgggcgcctccacttcagggcactgagccccgcctccggcagggcgggcgggattctctcccaacttggagaagttttctaagttttctaagcccccaagtctccctggaactcacccctgatatacagccgcccgtcccaaccactacagccccagctaaaggcaccctggagtcatcttcctggcgcacacgtttgggaggggtcgcggggtggtgggtgggagggaaggagggccgtctggggcggcccggctcagggacccccggagcatgctgactgggggtgtaagcacaggggatggtgagaaggacacatgggctctttctggtgcaaaggcactgcccctcctgcattcagttcaggtgagcctccgcccgtggtctccctccctcccccacctcccttcaccccagaagccctcctgctcaccccggcaggcttgcctgggcaggctgggctaaagggctgcaatcctccacacaccggctaggctggggagatgggtgcccagcaaccgggctgcccgttcattcccactgcctgctaggcttagggacacgagagaagaggactctgtccttcagaggacagcctgccacacgggcggtgagagcagtccccacctggcttggcagcttcttgggacaaaggcccactgaggggcgccggcggacgcggtggtcgggactcacgctctgtggccggtgggggagagcaggaagggcgctgttggggctgtggcccccagcaacaccgccaagaggcctttatcccagctcagaacccagagttggggatgggggggatcccacctggacccacacccgaggcccgggctg

SEQ ID NO: 29584 - DNA, 1151 bp, Artificial sequence
  DNA replication origin
tccttctcctcccacctgggacaggtgtctccccagcccccgctcccaggggcctctctctctctcccgcccctcagggtcgagtcccggcaggggctcggggatcgggtagtcagtacctctctgcgtctccagccgccggtagttggggaccctgtggctggagtgcgttttcaccaggaaggagcgcggcatgttcccctcccgggcggcaggccggggtgggctggggcgggaggggcgcgcctgggtccggactgctgcgtccgccggcgcttgaaggggtcaggctcattagcatagcgcgccgcctccgccaaccagcgcccggcgcgagtggggcggggccacgggggcggaactgagggcgaggcggggtctcgggcaacacgcccaggacaggtgcgcgggcgggacggggcggggagcgcgtggccgccggtgtcctccccacgggaattctctggcgtgcgcgccgccgagtcacacaccgacccgtcgggcctggccacccactcgccgtgagtgaagggcagagttcaaagctgtgtggaaaccgagcgagaatctcttccacagaatgtggaagcgtcggccgagcgcggtccttggagaacccttgctgcggagaatgacgctcactctgcggcctggcctcgcctccccatcccttctgcaaactcacaggacaggattgatggggagagcccaggcgaaacgaagctgaccctagtgaccagccctactggcggctctggaacaggcccgggaccggtggcctggagacagtggtcctttctggatgggctgcagtctccgaaggcttcccccactggagtcagccctttaggagtttgtccagtgcctccagaaagctgttttttgggggacggaggacttggcctggaattctggaattcccagggggtcagacatggttatgggaagtttaataaaaccggtgaatcacgtgaattctgcaacagctgcacgtgtgacctgggcaatccgtttccctcctttgtggtcctgtagagccctcagggtcataaaaagctgggagccgctgtgtccagtgtctgggtctcttttgacatggacatttcataacgttgggggccaggtggggccgtctctgggctggcgtgcac

SEQ ID NO: 29585 - DNA, 1487 bp, Artificial sequence
  DNA replication origin
gtcaacataaatggaactctaaccgtttttgccctgaccggcaattcttggggtgggctacccactggaaaaccgctcttgggtgtcggatggaggcagatgggaggggccaggctgccgggcccagcacaagtcatcatcctgatgtcctagatgtccagggaagggggcaaggacctgggtcgcctgctgcagttcaggagggcgggtctagcaggctgtgggccgtgggtttccccactcaggggcacgtcagtttaacccccagagccaagctgccggcagtgaggaacggaagacacggaaaggatggagacggccgccctcccccaatccccacccccgaggctgcacctgtgggaagggggacgctgatgtttccctctgtggggccttcttgggtccagcctggacaccgccctgtgcatcacagctgaagagtgagtctgcagccgacttgagtgtccctggggggcaagttgttgcggcagccctgggaccccaccccaaaggtgctcgcaggccctctagggcgttcccgggatgagatcagccattctcctcgggagggctacagcagccctgagtaacaccaggctctagctgggattaggagataagcttgctggggcttggcgggtggccacacaacgggtaggtgggcggggagggacggtgtgggtggaggcttggctcaggtatctgcaagcgttatctgtgtctgcgagggagagagagaaggaagggaggctataaatagaaacctttccaggcgaggaacaggtgaataagcagaaggcaggcatgtgtcctctgaaatctacactcccggcgtggtggtgccaggccatgcttgcaggagaggcgggcaccttcttccaggggcacctccacctgtccttccactccccctcaccaagtggcagacaagctggagtgtggctgggtcccaatcccactgtgtcctaacctctcacagccttggtcttcttttttgtttttttttaattttttgagacagggtcttgctctgttgtccagactggagtgcagtggggtcatcatagctcacagcagcctccacctcctggaggctactgcaacaagcaatcctccctcctcagcgtcctgagtagctgggactgaagatgggtgttgccacgcctggctaattaaaataatttttttttttttttttgtagagacggggtctcatgttgtttttcaggctggtctcaaactcctgggctcaagcagtcctcttgtctcagcctcccacagtgctgggattacaggcgtgagctgctgagcccagactcacagcctagttttttttcattggcaaagtggggctgatactagcccagcttttcacaccctggacgtgtgatgtgggacgtgggatgctggtgtggcacggccctcctccctgctgtctgtccctcagagcttccatggactcaccaccccccaccttctccaccccc

SEQ ID NO: 29586 - DNA, 798 bp, Artificial sequence
  DNA replication origin
ccagcctgggcagcccctggttcttccttgtggaaggtgcaaattcagtccccactgcagtaggaaacatgttcaaagacttactactcacaggtcctgggcagggagggcgccaggagtgggaagggccatcctccgtccccagatcccacagggcagaagtgaagagtcaggcagagagaagacagtgtgtggtaacgggccgtatgcacagggaatggggagtggtcactgcaggttcacaagcaaatgcctgaatggtctgattaaaggaagtgcagggagtgcgggcagcccaggctcctgggtgggagatacgcccctaagtgctcatctctggcccctgacatgggcggttgagcgtggtgtcctcctggtgcccaggctgcaggcttggctgtgctgcccgttagaacagtccctacccacaccaaccgtaagacacatgaaactgcacaatgcctcagcacaggcaagggagagtgaccggtgctgaggggagcccttgggcctgcggcagatgaggtgagacttgagccatcaagcagcgaggcagcgtgcgtgtgagtctgcaggccacaggcgtgttcgtgcgtgtgtccatgggcgtatgcgtgtgggaagtcgcagtagctgctctgaggtgacatggaggctgggcatcagcgggtaagtcccgggcaccaggagagggatctgtggggtccccggcatcgtcctgccgagttggatacctgagctcggttccagcaacaccatccgctctctgccagggtcctttgagattcccacctgccg

SEQ ID NO: 29587 - DNA, 2320 bp, Artificial sequence
  DNA replication origin
cctggagtacaccagggcctgacagcgaggcacaaagccagatgtggctcgccctggaggagctggggctcctgccctgcgcggtccaggcccgtcgcagacttggggcagcatgcccttgttttcacgttatgcagctgcatgggaagcatgaaccctgctccccagaaagcgcgtccaggtctcagggaccagggaacttctccattagaaaggggtcaggtgggaatggagagcccctggccccaggccgggcccccaagaaactgctgataattcttatacctggatctcaggagccacgaccagcattttgggtactccaaggcggcggcagcagggtgtggttcgcgagactcagcccaggcctttccagaactgcaggtgtgcgcggtggccgggggtggggagggggtgggggctccctccaataaggggcctcccagctgcaactcctctaccccagggcccagcacacctgccgcagcagcctgaccctcccaggatcctctgggtgcgtctgggtggtgcctgaggattcctctaatttggggccacctgggtttaggctcctgaggccctagggaaggaagcagaagccacttttcctgtttcatggatgaaaacagatattcagaaaacctgccccaaatctcctgctaacaagaggcaaacccggctgacattccaccctgtggtccagccggggcacctacttggcagcccacctggaaaaccccagaggcctccatgggggacccctaactctgcccaggatgtgatgcagggaggaggaaggtgggaagggagggtgccctcagctacagtcagcctcctccgatccgaaacacctgggaggacccggccccatcgagggatggcctgaaaaagccatctccggtgttgctgcctccgccgcccttccttctataaccacatccccagggttcgccactctctaaactcactctaggaaaaagaggcctaaatgcactcagcaaggcatcacaatgtcaaaggcactttggtattttgacaaaaatagcctaaggaatgcatctctaattatcagtgggctctcgggcacaagtagagatacttttgagaaggagtctcccaggttcaagcaattctcctgcctcagccgctcgagtagctgggattacaggcacgcgccatcacacctggctaatttttgtatctttagtaggggcagggttccactacgttggccaggctggtcttgaactcctgacctcaagcaatccgcccagcttggcctcccaaagtgctgggattacaggcgtgagccactgtggctggctggagatacatttttgcagggcaaggggagactccacatggcacccactcagagccagggcctcggcaggtagaagcctggctggaagcccacccggaccctctgacgtgcagtcctggtcttggccgcggtttgggctcttccagtggtggatggcatgctgaacccggggccagtgcaacccctgcagagtctgccgtgtgagcttcccagagtctctggagaggagcggctgtggcgccagccccaggaaacgggagtggcacccacgtggtgcttttctcggaaccctcagtgcacctgctgtgggtttgtggggactggggtgtgttctgcatggacagcagtggcctgtttccacgagtccctcgaatcaggggcaagccagggcctgtggcctcatcccggtctggacgctgggtctactgggccgctgtatcaaggggccacaccctggggtgccgaacacaacaggagtctaagtgtcgccagctcaggaggaagtctagtacccaggtgtgggcgggctgtgccatggggcaggggtgggggccgggggcggccgcagcggcctggtgcttcttggctggctcctgtggtcaacacacaactcctctgcacccgcacgtcaccctccccctgcgctctgaatccaagcttcctcttttcatcagagcaccagtccttggattaaggcccacctaatggcctgaccttgacttgatgggacctgtgaagactcgattttcaataaggccccatgcccagaggttggggggaccccagcatcttttagggggacacagttcaatccacggtgctgtccgtcagcacgctgtcaatgctgtccctggcatttctgcaggcactggggctccaaggaccctgctgatggggtgacccagggcgcaggccacagagaaagcacctttacgaagggcctgtgtaacctgctgctggcctgcatccggaagggatgccaagtccctctccccc

SEQ ID NO: 29588 - DNA, 1739 bp, Artificial sequence
  DNA replication origin
aatgctggtcgtggctcctgagatccaggtataagaattatcagcagtttcttgggggcccggcctggggccaggggctctccattcccacctgacccctttctaatggagaagttccctggtccctgagacctggacgcgctttctggggagcagggttcatgcttcccatgcagctgcataacgtgaaaacaagggcatgctgccccaagtctgcgacgggcctggaccgcgcagggcaggagccccagctcctccagggcgagccacatctggctttgtgcctcgctgtcaggccctggtgtactccagggtgggagggagacccaggcttccaggactctgcctgagcgcggtgggtccacatccgagctgccgcggccccggtggtcagagcgggcggccctctggctccggcgctgtgcacgccctcacaccccgacgtgaggggcttcggcccacttccctcgtgtggccgtaggaggggtcccggcctccccactttcactgggacagcccccacgggtatcgggggtgcagacatttggctctatctagggctttgttaacaagaaaaatggagcaggggtcttgctccgtgcctgaggtctcgtcccaccatggcaggatctgctgagctctgacggacctgagttccccactttgctggggttcgttctggagtcctcccctgggcagactctcccagacaccaggtcacccgagaggcggccgggcccgtgaggaaagctgaggccgcaccttcacccagacgctggcctgtggctctcagctctcctgtggcctccatgaggggacctggtgggaacaggcctgctccctccagaattgtgtgcagggacacagagagtcctgaggagggggtcctgggcttcctctgacagccctcctgggcacggcagcagcgggaggcctgggttcaaccaggaggggacagggttttgcttcctcggcattcgcaggtggcacggggcttgggagcaggtgctcggcagggctgagagttcggaggtggcccagggtttgggagcggggcaggccaaatgtgatggggacggctccttgtctgggctccgctctctgtcccctcagtctgggcactgctggcttgtaggaggcttgtggctgcggttcagtcagggagggagggcagtcgcgtcgcctgcggccagcgggacaagcacacagggacaggcttctgcccctttcagaggccgcagtatgttaaaaccgttcctatccgtagcatgagcgtcagtgggcccccggggggtctttctccttcccgccccgggcccagtgcctgccctggccttgctgagtccccagcacagcggtcacagtgcggtgccaagagggggcctcagagctgagggtgacacagagcagggggcctcagaccagcctaagtcgggattcgtcccctgaggcacctgccacggaactgggggcctggggcagagcagagcaaggggaggcagttcccagccccagccagtccatgcctcccacaacatgccggctcctctcccttccccagggcagtgaggtgccgctcagtgactggaaggtgctttgccctcctcaggtgaggcgtagagacttaggcatcacctccccgagggctgctgttgagaccacggcctgcccagacagggcccagagctgtcttcagccttcctgggcacccagggtcatgcccttgtgacggctccgtg

SEQ ID NO: 29589 - DNA, 1472 bp, Artificial sequence
  DNA replication origin
ctgccctggccttgctgagtccccagcacagcggtcacagtgcggtgccaagagggggcctcagagctgagggtgacacagagcagggggcctcagaccagcctaagtcgggattcgtcccctgaggcacctgccacggaactgggggcctggggcagagcagagcaaggggaggcagttcccagccccagccagtccatgcctcccacaacatgccggctcctctcccttccccagggcagtgaggtgccgctcagtgactggaaggtgctttgccctcctcaggtgaggcgtagagacttaggcatcacctccccgagggctgctgttgagaccacggcctgcccagacagggcccagagctgtcttcagccttcctgggcacccagggtcatgcccttgtgacggctccgtgtcaccctcgggtcagatgtggaggcggcttggacgtggagagctgcccccgtcgctgctcctgctgggaggtgggtggcgggtaggctgcccaaggggtgagacaggcttggccagtggccaggtggcgaactgtcggcctcactgggcaccagtcagaggcccacgtggctccgggggacactgtgtcttgagcctccttctggaaggccacagggaagggcaggctggcaggtgtctctgatgttccctggagtttggtgctgcctggtgagggcctcccagacacaggaccatgtcatcaggggtcaaagagtagtgggaaggggaggtggggactccagtggcccttggcgagggcaactggaaatcagccctgctcccttgggggtgtctcccttcaagtgacaactggcagaggctcctgtgtgtccggcccaagctgtggccttcagggtcaggacagccacctcccctgcgagtaaggaatccagaacagaggctggaaacactccttaactgagtgcgggagggaggaggcaggaggcagtgactgagctataatgaccagctgccctggggttggctggcgaacaggtgattcttgttggcctgaggcccttggacactggagaacaggacatcccatggccctggtggtggcccctcagagaactacaggcagttagtgtaacactcagtatgctcagaaaccaatccaggaggtgctgaggtggcgcacacctgtagtcccagtgacacgggaggtcaaggcgagtggaccacttgagcccaggagatcgaggctgtggtgagctgattgcaccactgcactccagcctgggcagcagagtgacaccccacctctaagaaaaagcaagcagcctaggagtccgaaccccagcagccctgtgggtgtgggaacagggtggtcctctctgaggcaggagggcccagtgccaatgtgtaggtggctctgtgggaccctccgtggctgagtgaggctcaggcccaggctgtacccccagcgtgagctgcctggggaggacacagccgac

SEQ ID NO: 29590 - DNA, 1776 bp, Artificial sequence
  DNA replication origin
gctctgtctttgctctataaaacgtgaaaagattatcacactggataatatagaaaagatgccagggttcctaagtatcacaaaagccagtaccaaatgcgcaaggtggaagtggggccggggcagggtcgggctgggcagggcagcagcctgggttcctcccggctcgactgcggagcgcgactcgcgcgtcggtcccttcttcccacgagggggtatcatggctttgaagagacggcggcagctccaggtcccagcgtccagccctgcccaagtaggccgcctgctcggccagaagcaccgaagaacccagcgacgccggtgggaccaggcggccctgctctggcggcctcggcggctggcccgtattcaggcccggaggctcggccccggctccccttctgcgcgggtgcaggctcctcctgtgagctcagtccggtgaggtgcgctcccgagcaggtgccaggtgcgacacaggagcggggacatccctgaccccagacgcaggcgggtggctgcgcttcccttcagttctcagagagagacagggccagagcagcctggaaggcggcctcctcgtcaatactgtagtcctggagacaggaaggagagatgcaccgggctcgagggagacaggaaggagaggtcccctctgcccatcacccacacaggcgtgtccacccttcctgcctccctccagcaggacacaggaaggacccagctccactgtccccacaggctcggggcctgcacggtcctctggggggtgagaaggtgaaggtgtgtccatcacccgctgggtacgggggcactcggaatggatggctgctggttcaggtcggactctaagcccggggtttccgaggtgagcaggccggccagggctccctgacctctaacaatttccatcctgaggcaggcggagcgtgggtcccggacgactggcagagggagtgacagccatcgccaggactgttagccagggccaggaatgaacagggcggcgcagggaggggccgcaccaggagtgaggagtttgtgcgagggtctgcaggcccgggggccaggtgtgtgcctgacccgcggcgggtgggaaaaggagacagggctggagtgttcgatgttgatgaaagtccttcccgcgctctctagaaagcttccagaaggaagcctggctcaccctcgaggggttctgtggggtgggcaggcagggacctgccctgtgcggtccatgtccccgagaggcctgggcaccctctagtggccactcaaactcagctgccatcactccccacctgcaggcagcccccacagaacctgggggaatgtggccacctgaaacgaggcttctgtttctggcttcctctgaaccctgcggaccctgaggctggcgaggggcccgagcaggaggagggtggatgaggagggcgtgggggaggacggtgctggcgggatgcctaccacaaaggtgtcgtaggagaacttgtgtcggtgaagcaggtgctgcaggaagttggcgctcttgtagctggggtccccccagggcattgccgagcagatggggcacacctggaacaggcactggggtcaagccgagccggaccgcggagaggcggggtagccgcagtaggactgggggccctccactgagccccgtcagtgctgcctcagcctgggaaggcaccccagacctggaggcgcgtgtcccggtgacaagcgagttattcagtgcgcgtcaccctgaaggactcatggacactccccggtttccgccag

SEQ ID NO: 29591 - DNA, 1818 bp, Artificial sequence
  DNA replication origin
ttcgaccccaagaaggtggacaaggccacccacgtggagaagcagctctcatcctacaaagcgccctgtcgaggctgcaacaaaaaggtacccgcctgcttgggccgccctggagccggggtcacttgatgggcagcctcagcccacgggttctgcagagggtgggggccggggccctctctctttcctgttgagtaatcgcggtctctgctcctgcaccaggaagccagccccggcgcctccctcccctcccgtcttcatctctcacttcctgtggtgacggctgacgggggggccagcccggtgggggtagcactgtcagagccgcctagcccgggccaggggaacccacgtgggttgtggccagggtaaggaccagggggctgagctgaaaccttcccaatgcagccttcccctgccagccgataccggggacggcgctgggggctccaaggtcacaagggccgcgggcacagtcaaggacatctaagggccgagcaccctccagctgccaggagggccagagccgggctgatgggcactgccacacccacatcagagcagcgtaagggcctgcagcttgtcatgggcctcattggcccccatgtccatcctgtcctggtgcctggcccgtgccccgtggccctccctggcacatccgcttcagggtggagaggccccagccagcgccccgttctttcagtggcttccggaggactgagcagctagaggtgattttgcatttgcgtttcccgacgttgccacatctcaggtgaataagttctatgaagcgctcacactagtacgtggcccctcggtggtttgtcctcgaggtcgaaggtccagatgtccaggggctgccctggactccagagtggtgcggctgagcaggctgtggtcttgggtgcttgggcacctcccgtctctccctgctcagagttcttctctcctgggcagccagaaaggatcagaaccggtcacatgcagagcggcctcccgtatcccacagcagctccgttctctaatctgggtcttcagatgcggctgtgtctcccggcaccttgctggaatgtggtgcatccctcggagtccagcagcccttaggcagagctgggtgccgagcttgagtccaggagggcctcagacacctgcgatcttgcagcctgttgccctggacagtgggtgtgctgtgggtggaggatggcgccctgcctccacggaagcatccccagcttgcccctcagtcacacgaagcgtctgtccccagcctggggcatttctgagtggcctccacttggcctcttcctttttctggagcaagtatttgaactcctgcaggcgccagagatctccttacctgtttcccgctacccttctccagccaggtttctgccctcggccagattgtcctgcagtgacttgcttttggccatggagtagtggctgctcagtgcctgagattgttttagcagcagaagggaccgggtccccctgctgctggcaacacagacgcttgcttacagttctctggtcctggacacctgaggtctcggcctccccaggacggcccttccagattctcaggaccgccttgccctccctgccctgtctcctaggtgaccctggcaaagatgagagtgcacatttcgtcctgcctgaaggtccaggagcagatggccaactgccccaagttcgtccccgtggtgcccacatcacagcctatccccaggtaggcacgctgccgggcaagggagaggaactgtcctcggcggtttcctcgttctgggagcaagcgcagtgccccatcccagagaggct

SEQ ID NO: 29592 - DNA, 985 bp, Artificial sequence
  DNA replication origin
tgctgagcagcttctcagctgaaggaagtggctgagggcgatgggtgtgggggcgtcgacagccttacaaagggaggggcgatcgcgcactggccctcccagcaggcacccgggactgccaatgtgtctcccacactggccgctgcacaagctgagaagctgggacggcccgtgcctcagggatctgcctggctggcaggccagcaccctcagcaagccccacagctgtcctgcacgagtggaggctgctcacacagcccttccaggcaggttcgtgatcacgcgtgtcctggcccacaggcttctggttacagaggtggctcactgctcagactgtcccctggctgagaacagctcctgctgggcccccagggggcctcctgcgcgagggctagagcagggtgcatgcccccacactgggatactcttgccatgagagatctaccctggaggaggaagttgctctggttggggagcttgcggaggggacagaaccagaccagcaacaaacttccgaagggaacctgaagagcctttaaactttctgtggtcatttgcatgcatgccttagcaacaccaacaagaaacaaagttagaagcagagagagaacagccagaaaacaaaagccagcaggaaaagtcggggagaaaaatctttgaaaggcaaaggctgtgtgaaaagctcttgcaggacccgcggtgagactaggatggtcgtcattctaccaagaaaagcatggcagaggggagttttataggaaagatgctccacaattccatgtggttctgcattctgtgttatggaaactacattttaggaaaagacatatttgaaaaagaagggcaaagaccaatttgtgcaggttaggaaagtggagatgctgtggccgaccacacggtgaaggtgttggcacccaaagcctacgggaggcttttctaaaacaaggcctaagtcaagcctcacagcgctcagtaacagatgaga

SEQ ID NO: 29593 - DNA, 1399 bp, Artificial sequence
  DNA replication origin
gcggcgggcggcgcgggcctggccccgggatggctatgttccgcagcctggtggcctcggctcagcagcggcagccgccggccgggccggcgggcggcgacagcggcctggaggcgcagtacacctgccccatctgcctggaggtctatcaccggcccgtggccatcggcagctgcggccacacgtgagcgcgcccgcccaggggccgcggggagggggccgtgccccgccgcgggaggggtcgcgaggccggcggccgccccggtgcagctccggactgggcgcgcggggactcggggcgccggggcctcggggcgcgtggggtccgggtttccctgtgccgcgccgcctctgccctctgggcgcgttcatcccccgcccagcctccttcgcgccagccgcaggcgcccggtccgactgctgcttcggttcaccgggcgacctgcggccctgcccaagctcggggtccccggcggctgcggcgggcgctccggtactcagagggcagcaggtgccaccgctccgccagtggtggtggatttgggcttgtgcggctggaatgggcagttgtaaataaataacttgtagtttttgctatcaactcttgttcggacccgctgtctgcctgttttgactacagaggaaaggagttccctaaagtttagaggggcttgtttggagtctgatgttcttagttttgtttgaaggagaacttgagtcacaccgatcactgagtagccaggcaggctggtccacagaggagcagacactgaccaccttgctggggtttccagctgcaccagggctcacagccggctcctccagggtgtttcaggaacagaaactggaggacgtggctctcctggcggggagctgtgctcaagtattctggagctgccagccccgttgggaggaagcctagatcagtgtctgctccctcctaagtgctgaataatacagctcttgagcaaaatcagcagtggcaggggagagagagagcaggagggcttccccgcagacatccaagctgctgaggtggtggagtggaggggggtgcacccagactggtaggaggctctagaacattttgcaagcaaagtcagctgacttcaggggctcctggtacagagggagctgggactgctaggtggatgtgtgctggtcacccacggaggtggcagggccagtgtcaggatgcagagctgccttcattacctgtgtcaggcagcacaggcgcctgcccacgctgggacagctctacctacttctcttgtgaggctgctacaggctctgcccctgctcctccatctcacttagccgtgacattttgggggggcagcctctgaacgggaatatttttttttgagacagagtcttgctcttgtcacccagcctggag

SEQ ID NO: 29594 - DNA, 1597 bp, Artificial sequence
  DNA replication origin
ccggtgatagacctccaggcagatggggcaggtgtactgcgcctccaggccgctgtcgccgcccgccggcccggccggcggctgccgctgctgagccgaggccaccaggctgcggaacatagccatcccggggccaggcccgcgccgcccgccgcccgctgtcctggcccgggccggcccgctagtcacagccgctactgcgccgcgctgacgtcatcgtagggcgccgcccccagccgggcttcgcggccgtcacggcgccactccgacgtcatcggggcgcgccctcgcgctgtcgccgccacagtctgcgacgggacccggcgtgcccatgtgtcaggtgggcgaggactacggggagccggcgcctgaggagccgcccccggcgccgcggcccaggtaagagctggcggccggacccgccaggccgcccctcgccttcccgccgcactcctgccccgaagggtcccggccgggcttgctccgggaagccccgcgtggagagcgggacctcgctccctagcactcggggaatgcctgtcaagcggtgacggccacctagaaggggacttactccactggctcgcgcctctcatcctagcagccactggggacggctctgccgctgacagtgctgtccttattcggagagaactggtgccgtgaagctgtctcgcctccccgtgtcagccttgggagactgaaaagcggcctttatgtgccccctgagccggcttttctaggctaaacatccccccagagcctttgtttttcttgaagtttggacagaacacaagcctgggtttgtgtgtgtaccgaggtgcctttctctgacccaactcagggtgagaaacaggagctgtctccccaaagcccactaggcgtggggaagatgtgatctgtgtttctctcttctcccccctcccatctccaaagccgtgagcagaagtgtgtgaagtgcaaggaagcgcagcccgttgtggtgatacgagccggagatgccttctgcaggtgaggcctggaggtggctgagaccctggcaaacatggcctcgctagcagacaggatagccgcaacttgtgatgctttgttaattctttttaaaaacatgtacttactttattcctgctcctgatggggtccctcgtgcccctggtgttgaagtggaggcgaaagcattggtttcctgcttgggaaagtttcccatgagctagccacagatcccctgatgaggtttctgatggaacttatggggacagttggaagtggggccgtggtgtctagactgggataagctgtaggaggaccaggcgtttgggggcagctggaatacatctaggggcggatcagagcatcttgggaacttggcagatggtctgggtgaaagtttttaatctcgtgtgagatgcttgtttcatctgtggcaggatagaggcttggaagacctctagctttcccccaggcgcttgtcatgtctttcttggcttgtagccattgtattgttcagttgtttccactagactcatagctccctgaagggaggaccaggtctctctccttttagccctcttaattcccagtggtggtgcgtggtttt

SEQ ID NO: 29595 - DNA, 926 bp, Artificial sequence
  DNA replication origin
tgtgcttctcgttggcatactccacagtgcctcccttcgccaggtccctgggggtgggaacacagcgtgacccactgtagtgggtccacccacccaggcactgccccaagtccaggacgaacctctggaagttccaggtgaagcgcagggtgatgtcggccgtgccgttgtagagctcccgcttcatctgggcacggctggggggactgatgcgccacagcgccccggagctgccctcaatctgcgccgtgacgatgtcctcagggctgtactggctgatgaactgcatggccagctgggtacaagtgacaccctcagtgactgcagccgcctccccacaccagctttcacagggcagaggccacttaccggctgggggtcaaactgccgggacagctcctcataggcctgggccgtgaaggggatgatggacggctgctgggcgctcatggtgaacagcggctggggcaggcacggggacacggggccacgaagatgagcgtggaggagcggctgggggtggtgcaccaccttggccagaacccccaggggatgggaatggacaggcggacccacacatgctcacctcatagccgcccagcttcagggtgacggtgacatcgatgggctggttgacaaccccaaccacggagcgcaccagcgacatgaagagcagtgggaaccagatgatggcgatgaggaagaggatgatgaggccacccatgccgtacttgacgatcttcttcttcttctgccctttgggctgcgggtatttctggaggggaacgacacaggtcatacgctcagctctgcccttcctgcgggtcacacaaccgcattctccagctcacccagcagcccagaaaagccccagcctgacctcagtatggcacagcggtagtaatggtgggcagacacaggccagt

SEQ ID NO: 29596 - DNA, 1112 bp, Artificial sequence
  DNA replication origin
caggggtgcctgcggccaccaccgaagaccacattcaggtggaagccagggtcggacccacggacgggaccccagaaccccaagtggagctcaggccccgtgatacgaggcgcatcagtctacgttttagaagaaggaagaaggagggcccagcacggaaaggagcggcagccatcggtataagcgccctgcctcacaacctcctgcctacccagttttctgagtggggctactgcagggagggtctttctcagatgagacggccaagcccagtgcgaggcccacctggatcccaggaaggtgccacttctgagccacagctcccggctctgcctacagagccgtccctgactgctgcccccggggatgctccccacgtgtagggtgactgttggcctgggctggcccctcacagttgccccagacagaggacacagccccagctgtctccttgccagtgacactgggagctttcctgtgctccgtctgcttgtctgtcaaacagggagaatgccagcctcttagggtggtcaggagccatgagccaggcccagtccccagggggcccaggcagaagtcagcttttccctacagaagctgaggacagggaggaagaagagggggaggaagagaaagaggcccccacggggagagagaagaggccaagccgctctggaggaagagtaagggcggccgggcggcggctgcagggcttctgcctgtccctgtgagtgatggcggccgggggcagctggggagtgggggtggggaggcgggtactgggcccaggctgagcgcccccttccgcagggcccagggcacatatcggccgctacggcgcttcttccacgacatcctgcacaccaagtaccgcgcagccaccgacgtctatgccctcatgttcctggctgatgttgtcgacttcatcatcatcatttttggcttctgggcctttggggtgagccaggcccgggacccaaacccagtgtacgcagagctcagcagccacccacatcccctgggcttggctccccctgacctgtgctctcctggccacagaagcactcggcggccacagacatcacgtcctccctatcagacgaccaggtacc

SEQ ID NO: 29597 - DNA, 1289 bp, Artificial sequence
  DNA replication origin
gatgcggacggccagcgagctgctcctggacaggtgggggcgggacgcgcacaacaccagcctcaccatggccctcggggagcagccgaacaggggcaggagactgactgtgaccggcaacagatcgggccgtcatgccttcgggcagtcccagactcccccaaacacgcgggtctccctgtaggcgcctgcgcatcccagagctggaggaggcagagctgtttgcggaggggcagggccgggcgctgcggctgctgcgggccgtgtaccagtgtgtggccgcccactcggagctgctctgctacttcatcatcatcctcaaccacatggtcacggcctccgccggctcgctggtgctgcccgtgctcgtcttcctgtgggccatgctgtcgatcccgaggcccagcaagcgcttctggatgacggccatcgtcttcaccgaggtgggccgaggccgcgggggagggggcgcccggcccaccgcgccgtgaccctccccgcgtgctgagccccctcccccacagatcgcggtggtcgtcaagtacctgttccagtttgggttcttcccctggaacagccacgtggtgctgcggcgctacgagaacaagccctacttcccgccccgcatcctgggcctggagaagactgacggctacatcaagtacgacctggtgcagctcatggcccttttcttccaccgctcccagctgctggtgagtgtgagccttggctggcaatgcggggctgggcaggccctctgggcacctgtgctctccaccagggaggcaaggccccctcaccacaccctcccgcccctcagtgctatggcctctgggaccatgaggaggactcaccatccaaggagcatgacaagagcggcgaggaggagcagggagccgaggaggggccaggggtgcctgcggccaccaccgaagaccacattcaggtggaagccagggtcggacccacggacgggaccccagaaccccaagtggagctcaggccccgtgatacgaggcgcatcagtctacgttttagaagaaggaagaaggagggcccagcacggaaaggagcggcagccatcggtataagcgccctgcctcacaacctcctgcctacccagttttctgagtggggctactgcagggagggtctttctcagatgagacggccaagcccagtgcgaggcccacctggatcccaggaaggtgccacttctgagccacagctcccggctctgcctacagagccgtccctgactgctgcccccggggatgctccccacgtgt

SEQ ID NO: 29598 - DNA, 1978 bp, Artificial sequence
  DNA replication origin
gcccctcctcggctccctgctcctcctcgccgctcttgtcatgctccttggatggtgagtcctcctcatggtcccagaggccatagcactgaggggcgggagggtgtggtgagggggccttgcctccctggtggagagcacaggtgcccagagggcctgcccagccccgcattgccagccaaggctcacactcaccagcagctgggagcggtggaagaaaagggccatgagctgcaccaggtcgtacttgatgtagccgtcagtcttctccaggcccaggatgcggggcgggaagtagggcttgttctcgtagcgccgcagcaccacgtggctgttccaggggaagaacccaaactggaacaggtacttgacgaccaccgcgatctgtgggggagggggctcagcacgcggggagggtcacggcgcggtgggccgggcgccccctcccccgcggcctcggcccacctcggtgaagacgatggccgtcatccagaagcgcttgctgggcctcgggatcgacagcatggcccacaggaagacgagcacgggcagcaccagcgagccggcggaggccgtgaccatgtggttgaggatgatgatgaagtagcagagcagctccgagtgggcggccacacactggtacacggcccgcagcagccgcagcgcccggccctgcccctccgcaaacagctctgcctcctccagctctgggatgcgcaggcgcctacagggagacccgcgtgtttgggggagtctgggactgcccgaaggcatgacggcccgatctgttgccggtcacagtcagtctcctgcccctgttcggctgctccccgagggccatggtgaggctggtgttgtgcgcgtcccgcccccacctgtccaggagcagctcgctggccgtccgcatcagtccctggtacagagaggcaccagcctcacgctccccggggtcggtgactgcctcctcactgccactgcgcgtgtggtagccggtgctcagggggctgcccatgtcgtctgtcatgctgctgagtggctcctccgcgcccagcccactggggagggaagccgagtcacagagaatcctgctctatggcctgaccccaggctacagggagggtcagggtggaaagtgcccacggtcctttggggtacaagggaatggcgagggtcggggatggctaggcgatgcccacacaccaggggcagcagctggggctcgggtcacccccgcacctacctggacacggtgcttggggcattgggggcctcggtggggcctggcagcgtggcctcggcctggcttgtgtacagctgatccagcacgcccctgtgcacttcgccgccctgcagggcacagcagggggctcagggctgcgtccagctcttgtccccacacggggtttcgtgcagtgggcgcgggactaggctgttaagcaggcaggggcgtagtcaggcagagcagggacgagcgtggtgcacgggcaggctcacctgcaggagctcctgtgtgaggaggtagcgctctgcccgcagcacgtcgctcatggtgccgtggtgccgggtgaactcctgcagccagcgtgtcagctcatccactagcgcctgccccagcatccacaggaactgcgccgtgctcagcaccctctgcaccacatggctccggcctgcgggagggcgggagggggcgctggaggggcagcctgtggggccaagagagacctcccactccccagccccgggcccacgtacctgccgctgcctcctcggggccctctgctggctccacctcctggctgggaccacctcctgggcacaggatgctggtgagtgactggcagtcccgcggcttcccctcagagtccccacgccccccagctcacctgtgggtagctgtcctgcctgttcctgccttgcctgctcctgctcctgctgccgccgcctcagcaccgcctgggcgttggtcacccatgcctgg

SEQ ID NO: 29599 - DNA, 1769 bp, Artificial sequence
  DNA replication origin
ggctgggaccacctcctgggcacaggatgctggtgagtgactggcagtcccgcggcttcccctcagagtccccacgccccccagctcacctgtgggtagctgtcctgcctgttcctgccttgcctgctcctgctcctgctgccgccgcctcagcaccgcctgggcgttggtcacccatgcctggtacgccagctgtcggccagcccccgggttaggacccggcctcccgagccatcagacccaggcgggaagctggggttgggcaagccgggcgccagatccagatccctgctctgtgtctcccagggacctccgtgtccctgagcccctcccggatggggaccctgaggggctgtgggggaagactcccacccattcaggagttgggtgggctggtctaacaccaagagccaggggcccaaagatggacccaggacagccaggcggccagcacaaaggtgttgggccggtctcacaggtcaggccacgggcagccaccagaacctgggtggtcagagccaagaccgtggggcagcaggctacacatgacccatgtccctgtagcctggtttcccatgggacttgggaggcctggatggggcggggtgggctaactggaggtggaggagctcggctcccaggccctgggggcatctgacaccctctatgctgccctggtccaggaccacaagctctgtggttggagtggggccgacggggctctcccacctcacctggaaggcactctgtgccgacggcctcgggtcttcaggaacagcctcctcctcttcctcactgtcggactcaaacaggaagtagtccccggagtggatgactgtgggcaggcagcactgagagccagccttccatgcagggagactcccagccagaccccctccgcctgcatgggccaaggcccgagagccacccttcccatgcggagtagccgggagcagtgcaggcacaagacacaggccagcgcggtgggacaagacagaggtgggcagggcagctgaggagcagagccagcgcgggctggggtgcagagtgggccgactgcagaggaccggggaaaacccaggaggctgtgtgagagttagaaaaacagaacaggccgggcacggtggctgacgcctgtaatcccagcactgtgggaggctgaggcgggcggatcacctgaagtcagaggttcgagaccagcctggccaatatggtgaaaccccatctctactaaaaatacgaaaattagctgggcgtggtggcgggcacctgtaatcccagctacttgggaggctgaggcaggagaatcctttgaacctgggaggtgggggttgtagtgagccgcaatcacgccattgcactgtagcctgggcgacagggcaagacaccgtctccaaaaaaaaaaaaaaaaggcctggagtggggcacatgcttgtagtctcagttacttgggaggctgaggcaggaggatcacttgaacccgggaggtagagattgcagtgagctgagatcatgccactgcactccagcctgcagtgacagagcgagactccatctcaaaaagaaacaaaaacagaataacgcagtgctgctgggtcccaggtgagatcgctgctcgaccaccatgtgtcatcggggcaagctccgagactcccactgttggaagggctggggcatagccaggagaggacatagtcagcccaggggtctgcagccagtgaggcaccccccgacccaggaggcctgagcacgtcctgacgctcagggcc

SEQ ID NO: 29600 - DNA, 785 bp, Artificial sequence
  DNA replication origin
agcctgccctccacgggccggggcctgagacagtgaggaacctcccattgccccctcccagccccaagacgggagctctgggctgtgtctgggcccaagcttgcctggaggctagcagggcggtggcctggaggtcggccctgacgtgcaggtagtaatggctaaggaagacgcggcgctgcagcagcaggaagaagaagcagacgctgtcccagatgatgccagcctcctccacaggcagcaggcagtcctggtctctgtccatcatctccttggctgcaaggcaggcaccggcaagggtcaggcccagggcccaggagcagggggcttccccacgccctcccccgccaccgtcctggccactcacggtcatagtagcccttgacggtgcatacaaggctgaagagctggatgacccagcagaagccggtctgcatctgctccacgaagacgcaggccaggagctgggggagagcagggtcagcggggccagcggggccccagggcggtgggtgcgggggggccggaggctcaccgacagcatgttcttggagatgatgacggtgacgttgtacagaatgaggcagtcccacagcacgaggcgggcccgtgtgtccctctgcagcagggccgtgccgaagagcagcaggtagaagcaggccagcaggtagcccagcccgaagatgctgatgcgggtggcccccgtgacaaacaccaccaccagcaccagccagaacaggtatcggaagacggccaccttcagcatgtcaaggtaggacctgcca

SEQ ID NO: 29601 - DNA, 2930 bp, Artificial sequence
  DNA replication origin
caggctggtcttgaactcctgacctcaggtgatccacccgcctcccaaattacaggcctccctcctgggattacaggcgtgagctgccacgcccggccccgtcttgttttctgctcccaggcgctgctgcctcatcttctgctacccaggcccagccttgtgctcacagccattgctccagggagcccaatcgagttctaggagcgtgaggtttagagcccggggtctgggcgctgggtgtgcctgttgctacagggctgcctcagcctctgggccctccagctcttccttgttgaaacatctgctttcgagcatcaccgaggccagctccccgtctcctgtccacctcttccttgttgaaatacctgctatcaagcgtcacctaggccagctccccttcttctgcctccttccacgcggctgcgccatgcagtcgccatcctgtgagatcagcatgtcctgggttccccaacatcgagggtaactttgtttttgtatcgtgaggttccctctgtggcagatggggctgtgggttcagcatgtcctgggttccccagcatcgagggtcactttgtttttgggtcgcgaggttccctctgtggcagatggggctgtgggttcagcatgtcctgggttccccagcatcgagggtcactttgtttttgtgtcgcgaggttccctctgtggcagatggggctgtgggttcagcatgtcctgggttccccagcatcgagggtcactttgtttttgggtcgcgaggttccctctgtggcagatgggggctgtgggttcagaatgtcctgggttccccagcatcgagggtcactttgtttttgggtcacgaggttccctctgtggcagatggggctgtgggttcagcatgtcctgggttccccagcatcgagggtcactttgtttttgtgtcgcgaggttccctctgtggcagatggggctgtgagatcagcatgtcctgggttccccaacatcgagggtcactttgtttttgggtcgcgaggttccctctgtggcagatggggctgtgggttcagcatgtcctgggttccccagcatcgagggtcactttgtttttgggtcgcgaggttccctctgtggcagatggggctgtgggttcagcatgtcctgggttccccagcatcgagggtcactttgtttttgggtcgcgaggttccctctgtggcagatggggctgtgggttcagaatgtcctgggttccccagcatcgagggtcactttgtttttgggtcgcgaggttccctctgtggcagatggggctgtgggttcagcatgtcctgggttccccagcatcgagggtcactttgtttttgggtcacgaggttccctctgtggcagatggggctgtgggttcagcatgtcctgggttccccaacatcgagggtcactttgtttttgggtcgcgaggttccctctgtggcagatggggctgtgagttcagcatgtcctgggttccccagcatggagggtcactttgtttttgtgtcgcaaggttccctctgtggcagatggggctgtgagttcagcatgtcctgggttccccagcatggagggtcactttgtttttgtgtcgcgaggttccctctgtggcagatggggctgtgagttcagcatgtcctgggttccccagcatggagggtcactttgtttttgtgtcgcgaggttccctctgtggcagatggggctgtgagttcagaatgtcctgggttccccagcatcgagggtcactttgtttttgtgtcgcgaggttccctctgtggcagatggggctgtgagatcagcatgtcctgggttccccaacatcgagggtcactttgtttttgggtcgcgaggttccctctgtggcagatggggctgtgggttcagcatgtcctgggttccccagcatcgagggtcactttgcttttgggtcgcgaggttccctctgtggcagatggggctgtgagttcagcatgtcctgggttccccagcatggagggtcactttgtttttgtgtcgcgaggttccctctgtggcagatggggctgtgggtttcgcagatgcgtggagtcacatccatgccctcagtccttagggaccgaccctccctgcctcacacgcctcccaggaagtgtggccgggggccggcagtgccacggctccctccccagcaggccccggccgctcccatccccagcacgtggtcctatcagaacgccacgtcagcaggactcccagcaggtggcctttaggtctggcttctttcacttggcagagcacactgaggtctgtctaggctgtcgcatggatcccggtcccacgtgctgagcagcgcgttcccagctgtggttgctgcaggttgaacttttcctggctgcaggcgtccgtgcagcttctggccgttgttttcagagctgtcctatcacacgcactgtcctatcatggaatatgacgccgtgtgggccacaactcaggcccagcagcccccacccccgtgctctctggcctcctgctcagttcctttgcccccaggggcttggtgcagagttgaaggaatctgtgtgtgtgaacacacaggacactagagctgtcagttctcgagacaccaggtgtgcgcgaggtgattcccatggaccctgagggctggtgatagactcgggtcaacgggtggggaccgggtgtctcaggccccaggcaggcccggcccttcctgacatgacaccccttcccccagattatccctggcgctggagccgggccgtccccatgaactccgcactcatcaagtggctgtacctgcctgatttcttccgggcccccaactccaccaacctcatcagtgagtgccccccaccacccccgcctctgcagaggaccctcagagtacattcacgcccccaaatctgctcacaagtgtg

SEQ ID NO: 29602 - DNA, 887 bp, Artificial sequence
  DNA replication origin
ctgtgtgccttgagcagacctgcagcaccaggacagccacgcaaatccagtctcacggcgtcagcaacgctaccggcctccctccggaacttcccaagagacaggagaggcgggggcggcttagacccaagacaagagactagagcaaacatcagaccagatcccgtctgaaaaccaaatggccacaaagaagggtgctgaggccggggctgtttgaatgcagaggacacgtttgacgatggcactgccaggagacgggaccacgggtgtggggctgtgggctcagacaccctcacccaggagacgcatgctcgaggcagcacttgggtgtgaggcatcacggccgacccgcacggggcccggagaggacgcagtgctccttgtgtgactcacaactttcctgaaggtttgaaatatttcaagatagaatactgggcaaaaaaggaaaagagaacagcagagcctggagggggccaggccgcccccgagagacaggatgcaggtgatggcgcctgggtaggatgtggagcagagaggagggactggaggaggccaaggctaagtctaggagggtggacaggagtctggggcaggcgggaaacacccccacgggcatccacaaagccacaaagcccactcccacccaagccacgtgcccctcaccaatgcacagggccgggggcatccccaggcacagcaggtactggtacagcaggaacagcgccaggaagaggcagtagttgggccagaggcgggcaatggcctggcggtgcctgcgggtgaggatggccaccagccagcaaccgtgcagggtcaccagaaagttcatgcgctgcccgatcacgttcacggccatcaggaagcagatctggggaggggagagggcg

SEQ ID NO: 29603 - DNA, 1560 bp, Artificial sequence
  DNA replication origin
tctggaccttggtgccatggtgagtgtgcaccaccacatccgggggtgcctgggtgcgcagacccatcagggttgtcgtcctgttcaatgtccacttgcccgggggagtggcagcgccaagaaggcagatgtgtctgtctgtccccttctgcccacccagagccagcccagagtagcttctcagtgagcgtttgttgactgaataaacagacaaccttgtgttggcacgggcaccacccctgtgccctgacactgtgtgagcgtgggctctgttggcacgggcaccacccctgtgccccgacactgtgtgtgagcatgggctatgcccattggcacaggcaccacccctgcgcccctgacagtgtgtgtgagcgtgggctctgcccattggcaccatgcacagccctgggtctcagtgacaagctgtgcaggccatgtgttcacagggtgcctgcgtgtccatgtgaaacgggtgccagcatcgtgtctggacacctgtttgcaggccagtgggtctcatcttgtgaaacttgtgagcctgtgtgccaacatatgcacctgtgagcttgtgtgcatatgtgagcacgcatgtgggcaaacatgcactccagcatgtggacatgtgtgcaggtgcgtgcatggatctgtgcccacgtgaactagtgaacccgtgtgtgactctgcgtgtgagcgcaagtgaacccatgcactcatccatggatgtgagagtgtgtgctcgtgtgcctctgagtgggtgtgagcgagagggtgttcggtgcctgtggggaggctgcggtggatgggctggtgccagccgcctgagagctcttgccccctgctataggagggtgctgggtcccccggctgtgggaggggtgctgggccccccggctgactgtgacaccctgcgcttgtcacagttgctctacaccctgaccttctggctcctgctgcgccagtttgtgaaagagaagctgctgaagtgggcagagtctccagctgcgctgacggaggtcaccgtggcagacacaggtgagtggtgggccagaggcgggggttgccctcctgcctgcccgccctgatgccatcgcctgcccctggcttggcccacagagcccacgcggacgcagacgctgttgcagagcctgggggagctggtgaagggcgtgtacgccaagtactggatctatgtgtgtgctggcatgttcatcgtggtcagcttcgccggccgcctcgtggtctacaagattgtctacatgttcctcttcctgctctgcctcaccctcttccaggtggctggggggccgggatgggggctggggcacggaccctccccgcggtcctcaccacccccacctcacccggcaggtctactacagcctgtggcggaagctgctcaaggccttctggtggctcgtggtggcctacaccatgctggtcctcatcgccgtctacaccttccagttccaggacttccctgcctactggcgcaacctcactggcttcaccgacgagcagtgagtccaggctggggcggtggggcaggggcgccgaaacccc

SEQ ID NO: 29604 - DNA, 1241 bp, Artificial sequence
  DNA replication origin
gtgctccagccccagctggcgcaggctgacggggcccagggtggtgggcagctcagggcgcaggtccatggcccacacgtagcgtaggcagcacagcgtcatcccatacagcaggatgcagggcgagcacagcatggccagttggtggcggctgcgcaccgtccagatgaggcaggcccagagcagcagtacgaaggtcagccagctgtggtaggtgatgctccatacctgcgcggcagagagggctgcacagctgcccagcgcaccccacccaggcgatgccccacacctgcgcggcagagggggctgcacagctgcccagcgcaccccacccaggcgatgccccacacctgcgcggcagagggggctgcacagctgcccagcgcaccccacccaggcgatgccccacacctgcgcggcagagggggccgcccaccccaacccccacagccgcctaccatcatggcaatgagcgcgcacacatagctctggtccatgatgaggtggcccaggctgtggagcggagacgcctccctgggctcagcccgcttgggccgcactgcaggtggggacagcggtcagcttcggcaggttgatctgcaggcctccccaccctgactatgccctaaaatctgggccctgggcaagcacacagcaggagagacaggcccccggtgggctatgggcagaacacgagggctccggcaattgggctgacaccgtccctgagcgtcagggatggccctgccagcacctgccgttctctgggcctcactttccttgaaagggtgggaaaggtggccctgaccccctttccagctctgcgcacctgaagactctcaggacccccaccccagggccgtggcttcatttgcttcattcagaaacacattgcaaaatggaaaatcaagggttagggtaaagaaagaaagtagccagaaagagcccccaggccctcccaaggcgacgtggccaacacagagttcccaggccagcccctgccctggacgagcggcctcctggggccactgggccacctggagcagctcccagagctaacagcacaagacagcatagccacattctctggggaggggttgggggacctggaggccccccatggggtcttggggatcaacgacgcggccactcagctgccctgggggtcttgggggttggtcagtgacatggccactcggctgccctgggggtctcgggggtcactgacaccgacccgtgga

SEQ ID NO: 29605 - DNA, 1606 bp, Artificial sequence
  DNA replication origin
cagagcacggagactgtcagagctggggtggggcctatcgtccagccccacagcctgcggtctcagcccgggcacctggcgcctcagccaccaggagagcccccgagtcacagatggggacactgggccggtggcagccaggccagagccagggcatctgacgacagccgtgttctttccaccacacctggctttccctggtgtttgggaaatggctgtgttctgggaaatctttagtcaggtccagggaaaacaggcccggcaggtctctctccccagccccaggccggcctgtcacttcttctaggcagctggccacctctgtccccccagaggcttggggagggcaggagtaccacccctatcttccaggcagagccacccagaaggctggcaggggtacacaggagaccctggagcctggccatgtccctcaggcccccttggtctctagagaccccccggggtatagacagggccccgctgctccctgggtgcgtggttcggggagatgaggtggtataggacagtctgtggtctgtctgtacctggcaaggtcatcacgtgcctgggcttggcaggacagaccctgggtcttcggccagggtgggagctgctaccaggaaggcctgcaggaactgtgagcttgagtgaggaagtaggaaggtgtcaggcagacctcagggacggctggggcctgtgcccggggaggctgtcctgtggccctcagaggagcagctgtggatgtggccgcctcccacgctcctggctgggcaggtgtgggctggagaggtggcgtcagtgcgatacacctgaccttgcccctgtccgtgaccttggcaggatgatgatgagagggatgtggatgccagcccgacggcagggctgcaggaagcagcaacgctggcccctacacggaggtcacggctggccgctcgtttccgagtcacggcccactggctgctggtggcggctgggcgggtcctggccgtaacactgcttgcactggcaggtacgcaccgaggcagggggcactggcagtcacactgggaggggtcttgggagttccctgatgactgtggagacagcgggacacatggcactggccaggtaccaccctgtgtgcccctgccccgcaggcatcgcccacccctcggccctctccagtgtctacctgctgctcttcctggccctctgcacctggtgggcctgccactttcccatcagcactcggggcttcagcagactctgcgtcgcggtggggtgcttcggcgccggccatctcatctgcctctactgctaccagatgcccttggcacaggctctgctcccgcctgccggcatctgggctaggtaacggcttgccacacagcccctttttcctgccaccctggtcccgcccacctggctcgtctagcccctgtggccccactgcctctggggtggtaggctgtgacgggtcttctctggacagggtgctgggtctcaaggacttcgtgggtcccaccaactgctccagcccccacgcgctggtcctcaacaccggcctggactggcctgtgtatgccagccccggcgtcctcctgctgctgtgctacgccacggc

SEQ ID NO: 29606 - DNA, 1795 bp, Artificial sequence
  DNA replication origin
gacagatgaaccagaccagtcctgtcctcacaggcctccagggctgcaggggctgctgggaggctccgaggccagggtaacagggagatcagggcaggagaggcccaggccctgagcccacccctctcagagaccacacagcagctgggggcgaggctggatcagaacgcagggcgccatcgctcaccccacccacagcctggccctggccctggccctgggaaatcttctgagcagagccgtgaaaaatgagcatttctgggagtggaaagaacagaggcagctgctgtgagagaacaggtgtgaggccaccgaggggcaggcccggccctgacttggggtatgaggccaccgaggggcaggcccggccctgacttggggtgtgaggccaccgaggggcaggcccggccctgacttgggccccacgtgccgcagccatgctgcagacgcccctcaccctcctctagcggccagcacccctcgggctggctggcacactccgtcgcatgcctgcaaacacgtgtgtgtgttgcccatatgtgggagtgagggtcgcccgggggccctgccaggccgggtcatggggcttctagatctttcggaacggtatcctgcaggtgcctggtgcccccagctcactctgaagtctgtccacgctggccgcccagggcgcagctgcacactcaggctcccatcacaccaagatgaagatgaccagagtccagccacccagccccttcccagcagccaaactctaggaagctcatgccccatgcccccatcagcatggaggggctgacgagggaggggcgggtctcttggaggacaggcagcagcacagtcctcatgagcgctggaccccctcaaatgcccggaaaagccacttgacctccaggtccccgttcccacttctgaaatgcgggcaccagccttgccccatggggtggcgacaggacaggcaggagggcaggccgcctctgcaggctgagcaggtgtactcgacctaccgtgtggcttggggaacccctttccctctcgggactcctctagaagttgaggcccatgtgcgtggcgagcatcagctatctgacgagtgggcactgggagggtgaggtgggaggaggctgggtgcccggggcagggagttcgtgggccaggacacccaggtggccataaatcctggctgagcctggggatggcaagtgtgggcccaggcagggacgagagggtctgagcagtcaacgttgggtgtcgcaggccccagctcatgccctgtccgtgtgagggggccatagctcagagattcccggggccggacctccaagtcttgtagcagctaaagttcactctgcctcccactccgaggacagaggccctgcttcaggcccgtcgctcctggggtccaggcccctgctggggctctgggccgacagcctgtttgcctgtaagtgcatggggcctgctggggccgccccttctcagcccttctgcagtggctctccagccagacccactgcccagcactgcaggtttccaccaccgcgtggccccaaataattcccctgtgaagagttcctaagggcacagatgccatgtcggggcgtggaggtttctgactagaggcagagcccgagtagaaacaggtctgaacggatggaactgcaggctgggccccggggtgggatttggaacttcctcctctctttaacaccaacttacaaccaaaacgtctacatctgttttaaaaagattaaaataaccctcaaaatggctgagaccacagctctcgaatgac

SEQ ID NO: 29607 - DNA, 2303 bp, Artificial sequence
  DNA replication origin
acactaaggtgccctgccacgggcttcgaacccaaccctggtgcacttgttgagcattggacgttcctggcaggtcagaccgtgagctcctctgctctgacggatgcatggacggctgccacctggctggacaggtgcagaggggaggtgccaccttctctggggacaggactggggcagaactcacccggctgaaaagtgcagctgtggagaacttcagaacttcagaagcctttgctgtgaatgcattttcctcctgcctcttgggccagatcttagggattttttttttttttaatgaaaatgtataatcgtcaaaaaactttagatttaaaagcatggagccgatggctatgcttggtgcgttaatgggaggaagaggggatcttaacttcagggagggctcctgggggagctgggggaggctgctgtgtccagcagggcgggcggtgccccccggagcccggcactccgcgatgtgtgcgctaagccgaggccgccttgagcccgtagcagcgccgagcgcgattctttcgtgtctgcttccgggagggtggaagggtgaagctgttgagagtgggaagggaggggctgtgcttcttgagtttgccgtgtgcccctgaccctttcaggtgcaagcgtcagctccacggtgccaatggggagatgggtctggaggccccaccaggctgtgaaaggcccggcctcctgtgctgtccgtggaggtcggggtctccctctgccctgcgcctcctctaacttgccctgcgttttccgtgcccctggtctagggtgaggctcgggtcttggggactgaggggcaggtgggtgtcaaggtgagagctgggctgggctgggcctccctccagaagacttcccggggctcctttggcaccaaggatggggcagatggtggcacgcatggcctcccctgggcacagagccagactatggagggatctcgttggctacatcctggctggggctttggggtcatggtgggagcagcagccaggggtctcgcttggacacgggtctgagctcactgtggcctccttcctcagcctcctgaccggggtcctgaggctggagggtgggtggagggtggagggtgggtggatagtgggctggaggatgggctgctggcgccccttaggcagcatgaggcgcctttccagtcccagtgtcctccctggtagccccggaaaggctgagtggtccctcaggtcccctgcgaggagacgacatcaggccccacccctcatctcctgacaaacctcacattcctaggaggaagcaggcctggctagcacgtggcaggcacagcctccctgactccagaccttatcagatcagtgcaagtgccagggagaccccgggtgggagctgtgtggttgggactgatgcaggcactggccggactctcaggatgagggtgggaggccaggccccgggaccttctgggacaggcaggagggcagacacgggacatggtgtgggggctgtggcgagtgcggccacgcagagcatttgggctgaaggcgcgctgtgtcccactgccccatacgtgtgcgggggctcccagacacgtgctgggggcaggaatcatagcatttttttgtttgattgttttttgagatggagtctcgctctgtcgcccaggctggagtgcagtggctcaatctcggctcactgcaacctccacctcccgggttcaagcgattctcctgcctcagcctcctgagtagctggaattacaggtgcccgccaccacacccagctaatttttgtatttttttgtcaagacagggattcaccatattggccaggctggtcttgaactcctgacctcaggtgatcctcctgctgcagcctcccaaactgctgggattacaggcgtgagccaccacacccagccaagaatagcattttctttctttctctttttgaggcggagtcttgctctgttgcccaggctggagtgcagtggtgccatctcagtgtaacctccgcctcccggtttcaagcaattcttctgcctcagcctcccgagtagctgggattacaggtgcccgccaccatgcccggctaatttttgtattttcggtggagacagggtttcaccacgttggccaggctggtcttgaactcctgacctcaagtgatccgcccgccttggcctcccaaagtgctgggatgacaggtgtgaaccactgcacccagcccaagaatagcatttttaaaggaaaaaaagcaaggtagaaagatgggtcaaaaccccagcgccccgctgggaggctggt

SEQ ID NO: 29608 - DNA, 1576 bp, Artificial sequence
  DNA replication origin
attcattcattcaataccaagcaggccccaccaggcagcgggcttggtctagggtccggggacatggtggacagttggacagacagctaaggcttgtcccaggtggcggccactcaccaacaacacagacaaggaaaaggctcagagaggaagagggctacttagcccaaagcccacccaccgcccccagagcacacccaccgccccccagagcacactcacccccggagcacccctgcccccccagagcacaaccgcccccccagagcacacctatccatccccagagcacaccccgccccccagagcacacctgtccatccccagagcacaccagcccccccagagcgcacccagccccccagagctcacccgcccccccagagcgtacccggccccccgcagcacacctcccgcccccggagcacacctgccacccccagagcacacccactcacccaaggacgggctgagacaggagggccctggctggtccctggcgccatcttctgtcagccttgccacagacaccaagcaggggcagcctcacgggtgggatgagaagggggctcagggtcacagcccagcccaccacttctcccatcatctggtcttggggtcctcggagtagccggctagcagggcaggagtgaggagcactcctccaatgctccaatgcccccattttcagatgggatgggctctgagaggggaggagctcccaagagtggtcaggacccaggtccgggcatcccggccgcagggccacggcttttcgaaacactccttggatctacctgtgctgtctatgcagccggcagtgctcttggtctaagtgtgttgatgtggcctcagctgtgactttgtgggctaaagccagagggggagacttcagagcaggctgcctggaggagacggcattgcttttggccctgaagactggctccaactcagggcaggtcggaagcttcgcagatcaggctcaggcagagaaggaagaaattcagccaaaggggaggcggggcctgagacaatccaaggagcggggacaggagcctgccctgccctgtggctcccatgttcccatcaggagctgcccaggctgggcctgtgaccccgtgggggtaatgccttttcctgagtcagctgcaatgggatggggtcagagagagctgtggttcccaacccccaaccccctcgcctcaccagcacacgcctgactatggcccacatccagctccttgggaagcagagagcccagccatcacccatccacagaccttcatcctacagctgagaggagcacagtcaggaggggagaggctgcccccacggtagctgctgggcccctgggtgtccaagggctgggctggcctctgctttcagtgggtgctggccaggaaagccacaaatgccacatggtggtaaccaggaccacacaccactcaaccggaacattccacaaagagggctggacaccacccactcccactggcacataggaagacctgccaggggatgtcagatgcctgagcccccctgccaggatccagttcctgggatgagacccttgcag

SEQ ID NO: 29609 - DNA, 917 bp, Artificial sequence
  DNA replication origin
ccctccctgtggcctggtgcccgtgaggagtggacagtcaccccgagagcatagaccaccctcgaggctcccagatggcggccgcagagccccacttccctgcctggtgtgtgataccttccatggctgaggacacctctgactgctcactcctgtgaccctggacccaagtgctgggccacacctggactccaggccccagtccttccttcttctgctgtcctggctcctgggtggcccccgccctccccgctccgaggctctgccctgtgctgggaacccaggaattgccaccccctggccccggtttctcatgtcaggatctgctggccaggttgactcctgagcgccactgtctcctcagacttgctggtcccacccggtccccacctgtccaccgcccgaggctctcctgtgaggccgctctgcagctcttggcctgggggcccccggcctctcatggtgccttctgcactgtcccctttggagatgggagctttgagggtaggcgccaccgttcggtgaaaaggcggtataagcaaagcaacccccagatactgaaggagccgggaaataaaaggaggcagacagagcaagtgtgttggtacccgcctatttactggcaggaacttacagacggaaacatggcctcaggcagcctccaggcaggtagagctctgaacccaaacgcccgatctggggctcgtatcgtgccctgggaggaatgtgcaggtggctgggaacgtggcgggtggggtggccagattcctgctgcagcaccgggtttgtttaggaagaaacgtacgaggactagacactcttttttttctttcctgcacgtgaatgccagggagtaggtgctcctgcaggaagatgatgcatcaaccagccagtctggaggcattccgagacccggg

SEQ ID NO: 29610 - DNA, 1096 bp, Artificial sequence
  DNA replication origin
cagactggctggttgatgcatcatcttcctgcaggagcacctactccctggcattcacgtgcaggaaagaaaaaaaagagtgtctagtcctcgtacgtttcttcctaaacaaacccggtgctgcagcaggaatctggccaccccacccgccacgttcccagccacctgcacattcctcccagggcacgatacgagccccagatcgggcgtttgggttcagagctctacctgcctggaggctgcctgaggccatgtttccgtctgtaagttcctgccagtaaataggcgggtaccaacacacttgctctgtctgcctccttttatttcccggctccttcagtatctgggggttgctttgcttataccgccttttcaccgaacggtggcgcctaccctcaaagctcccatctccaaaggggacagtgcagaaggcaccatgagaggccgggggcccccaggccaagagctgcagagcggcctcacaggagagcctcgggcggtggacaggtggggaccgggtgggaccagcaagtctgaggagacagtggcgctcaggagtcaacctggccagcagatcctgacatgagaaaccggggccagggggtggcaattcctgggttcccagcacagggcagagcctcggagcggggagggcgggggccacccaggagccaggacagcagaagaaggaaggactggggcctggagtccaggtgtggcccagcacttgggtccagggtcacaggagtgagcagtcagaggtgtcctcagccatggaaggtatcacacaccaggcagggaagtggggctctgcggccgccatctgggagcctcgagggtggtctatgctctcggggtgactgtccactcctcacgggcaccaggccacagggagggtgtgcaggacgcccacacccagcccgatgtccaccaggagctcagtcttaggcatggaggcacctgcccaacctgggtgcctagaaggatcctaagaggcccctccacaacctggagtcagtcgttctgcctcgggactctggaccccacaatggccgcactggccactgatggggcggggtgggctaatggaccggaa

SEQ ID NO: 29611 - DNA, 1500 bp, Artificial sequence
  DNA replication origin
tggtgaaaccctgtctctactaaaaatacaaaaaagtagccgggtgtggtggcgggcacctgtagtcccagctacttggggggctgaggcaggagaatggcgtgaacccaggagatggagcttgcagtgagccgagatcaggacactgcactccagcctgggcgacagagcgagactccgtctcaaaacaaacaaaaaatgggtggctggggagccgcactggccctcggtccctggggaagggaagggctgaggcaggcagatggcaatccaggtttagactccaggttagaccacctggaggctgagccctcggagccgggggctggaagacgcgatgcattgaggttaggaggagggacctcgagagagctggcagcgcagcagcacctggtgcaggccctgggtatgcagggggcgttgctggcgggggggtggggggtagttacctaacctgcctgctttcccgtgtggttaaaaggctccaatgacagtgcctgagagtgtgtggacactggcagcctgtgagagcaggggcgggtgggaacaggtctccaaaaggactgacggggcctaggagacaggagagggacaggtgcttgaacaagggctgggggccaagacgggggaaagagcttctcaaaggaagtggagccaatgggctggactgagatcccatctccaccttctccagggcttccacacccaggaaggagagcccatgggttgaagcttcgtcacctgggaagcaggagagcccgagggttggagtccatgacctgggggttcctggccctgaaggagccaggctgcgggccggagctgggccagctgccatggctggaggcatcactctccttgggtcctcccaacaacctaagggtggcaccatcccaccccacagacaggcgaactgagcccagcatggcccagcaagagactcaagtcacaggcagactcccccagcagcctcagctccagcagatgccccaggaggcaggaagggtctgggccagttatcacagatttcacagactccagccagcctcagaaggtgccacagaaaggcctggctggacacccctccgccaccctctgtgcctctacttctctgccctgacctaactggcagagaggatatagggctagacgaataggccctccggggttggggacagagcagctgaatcctgggaggaatccccaggagcctcctcagccctgtggtcccactatttcaagcatgggtgggttcctggaagcggctgcccggactctcctcccacaaggagatggccattgaggagcaacagccctctcagcccaagtccttgtgcaccgagaccaactgtgtggccctcagtctggcattcaaggctcccaccactctgggttaagtgtcagctgaccctgtgggcttcctgccactccctgacagaccaacatcgtgctgcatcccagccttggccccagcagtggcctggcctgggggcaaccctg

SEQ ID NO: 29612 - DNA, 2010 bp, Artificial sequence
  DNA replication origin
ctcgggcccctgcctgtcctgggctccctgggtcctgctgccttaaaggcgggtcgttcccctcggatccctgcctgtcttgagctccctgggtgctgcctgccctgtggccacgtcccactgttgcctttggacaaagctctcctagggcctggggttctcccatgagatgacaggggttggttcaaaggtctctgaggtttttagagctttgtgaagtgttctagaatccattttctctctcattgctggacagagagtatagactgggctttttcttgagtttctctcaactcttctttgtccatgaggcaggaagaggggcttcctcagtcctcagcttggggtggattgggatggacagagaaccgtgcaggatcccagcctgagacggtccagcgccccgggggagcggagcccgtggctcagccgtctgtagccacggccggggtcactgtcactgagggcacggaggccccgccggcgaggtccgaggtgggcgtgtggggtggtgggcgctggaggcaggacctctgcttgtggagggtgggccaggcgtggaccaggtgtcacgtccgctggggcctttgaggggcaggtggggattggcgcggagaaggagtgaagcagctggggttttgggagcctgtgcggagcaggcccggatgccagggtggctggtgaaggtgggcctggccgggctcggcctccattgggggagccccccaggtcccctccccacacagcttccccctctgtctgctgtccaaggctcctgtgctggcactctggggtggtaggccatgcagcccgtgtgaacctccatagaccttgctgtgaacgctgcacggggcgtctgggggcgggctggcttccccccgtcccctgggccaaccttgccagccttcttcttccataaaagtgggatccgtctgagccctcatggcccctctgggtctgggtttgctttttgtgctctgcctggggtcatggcagggaaggcccagcaggctcccttgcagagcagggcagagcagcggccgccaggagctgcctgtaccacgtctgctcttcttcctctcttcctctgcccggccccgcccaccgtcgaaagcactagcacgggagtgtttatcggtttctcttccaagccaaataaggcagagagcgctcttgcaggagttggagcaggccagggggagggcagctggggcttggaccaggaccccggctccctgtagctgccctggcctggcagctgtcatccgcgaactctgatcctcgcctgccctcacccggcccctttcagagcttcccatgctcagctggtagcaaaagaagtcaagacctagcaaggtgcctgccccggccaggaggcccaggttctagccctgcagctgccgctgtgagctctggggactcagacgactgatgtccttcccagcttctgtttcctttgatgagaggaaggttggaccaagcgacctgccctgcttctgtctgtttcctccagtccttttcctttttgaccagttcacttgttgataactccagcaacgcatgaaaacattccccttgtaaaaaagggaaatgccgtgggtaggggggaccaaggacctcttctgcaggagcagacgcaacagcttggtgtggatcttcctcagcctttttgtccatcctagacatgtggaatttcagttttacacaaaaggaatggtaggcgtctgactctctgtggcttgtatcacttggcagtgccacagggattggtgcatgtttgctctctcatgctatgtgtcaggcactgttgtctctgcgacaatcctgtgaggagggagttatggttcttgatttatagacgaacaaactaagacagaggagattgggctcatctgtggtcatctcagcagttgtgagaggtcagggccagagcccagtggtgtcattctgcagggcacatacagacacgacccacagggttctgccgcaccccctgccgcttggcctgct

SEQ ID NO: 29613 - DNA, 1914 bp, Artificial sequence
  DNA replication origin
taaggcagcaggacccagggagcccaggacaggcaggggcccgaggggagccacccgtcttcgaggcagcagcacccaggaagcccaggacaggcagggtcccaagcggagacacccgcctttgacgcagcagcacccagggggcccgggacaggcaggggcccgaggggagccacccgccttcgacgcagcaggaggtaaacggaatgttcctcacctacttggagcccggccagcagcctggggcactgaggagcttctggaccatttaattagctcggtgtccaggtttaattagctcagtgtccaggaaactcagttttatggctcatctgacctacacggggcagggtcctgcaggcctggtggctgctgtgggctgggcacccaccgcacctgccacagccatctgctctcagacctgctggcgtggagagtcaggacaccctcccggacacactcagcccgcagcccctggaggggtttgcagggcagggtgggggtccgtctgtgaagaaggtgactgtgcaggaacagagggtcagcaggcacctgctgcacacagccacgtgggtgggactgggggaactgtctctgcccagggagcggggcaaagcccacagggtcctgcaggcatcagcccctgggattctcccacaagccaggggtgactccaccacgcccatttcacagatgagcacacagaggctgcaggaggggagggttccccaggtgacctgctggtgggtggaacagtggcacctgcacatctgggcctgagctcttgtggcactgccctgcccaggagggcaccaggctaagagtgacttgcagggcacgatggtgctgaccaaaggcccagcggcacggcccgaggcagaagcagtctggtcccaaagccgccgccttccggtccccacaccatggcaatggttgtgcttgcggggtgggggcgggtgagctgggaggtgcctttgcgttctccccgatgctgctcagcatcccatccccatcttcatggtacttggggtccgcagtgaacgacccccagcatggcaggagaccaagcagagatgagaatgccccaccccacgcgtgagacatcccccacatcggggcctgggtggcccttcccccacttcctcctgaccctccccactgccctccgcacctccccctccctcccagggcctgtccttccccacagacgaccagcagcgctgccagggtgtggaggcctcagagtttttctgtgctgggctcccctgcagggtcagggatctgggactcatccctcagcaacagagaaggggacagattccagggcatgggtgaggcctgcgttccacacagagcaatcccctgactctctgcgcaggtgggttcctcgccagcccccgcagcctctccagaaagggaggaaaccagggcttatctgggcagccatctctggcgcagatacaggtaaataggtgggggacagtgggtagagggtgtggccccaggaaggacgcaggtcccggaatgtctgacggagccgaccctatgcccccactgtgccctgggaagggagctgggtcaggcagagccacctctgtgagcagcaaggtctccctcccggcccacccagagctcaggggtctgggcagagcccagctgaagaaagggcccccgctggcctttgcacacagcaggcactcagaggggcggtgacaaagtaagacctcccactcagctctccttccttcacacaccatggcctcccccacctgaggtcagtgatgggcactttcctgccacccttggatcggccctgcccactggcccccatctgagctgcaggcactgccctcctggattcctgctgctcgacaatcccggggacggcaggaccccctccagccccaaggagag

SEQ ID NO: 29614 - DNA, 1154 bp, Artificial sequence
  DNA replication origin
caggtgaggacatgaggcccagcgactctggtggtggctggtgtcacctatggcagggccgcgcggggcccagtggaggacgcctggcccggacctgactgctccgtgggaaccgtggggcgtgctcagggtgacttggtgcggctgggctgccagccggcctggctgagtcactggcagtgaaggcaccaggtggtggacgtgctcggcagctggcgggagagtacccccacccaggaccgtgttcaggctgagggggaagggagcggcccaggcaggcaccgcccatggcggggcccccgcactaacggccacctctcccgatggactgcagttctggagccgcccctgaggagaacgccctgctcagtgtcctggcagactctggactcttcaccgtgccatcctcgctacagcctggccaggcagccgctcccgtccccccaccccacagacaggaactgcagactcctaaaggtcgagccagctcccaagtccatagccagaaagtgatgcaggcggggcccggctggggggcaggtgtgaccgggtcatgggggagcgggctgtgcacaggcatcaggctgagaggtctcggggatacgtcctgggagccgcctgccaggcgtcctgtggggctgcctgcaggcctcctctggctttggcaggttctgtcccgacagaccgaggcttgggaagaccggattgtgcactctctgcctggagagagggtggggaggggctggggcgtgtgggcagggagaacaccctgggaggcatcagtcctcttccctggggacgggccatgcgtcaacagtccctcacttcctctctcaggggcagaggcgtgggggtcccgagcctccaggttggagtaggttaggagggcctcagagccccctgctgccccgccatgtggcattggaaggggtgtgaccccctaggggatctgttaaccacactccgccccatgccggcctctctgttccctctaacctgcgcaggagcagggccagctctgagctagcagaggtgacatgaggctcgtcctggccccgcccaccctggcccctccctgtttcccaccacgctccgcccaccagagctacatgttgtgtttgagcctcagccccagacctggctcaggtcctcag

SEQ ID NO: 29615 - DNA, 1404 bp, Artificial sequence
  DNA replication origin
acacgtgccacccaggacccgagatcccacactgtggtgcacagaaggaaccaaatgaggccgggcgcggtggctcacgcctgtcatcccagcattctgggaggccgaggcgggtggatcatgaggtcaggagattgagaccatcctggttaacacggtgaaaccccgtctctactaaaaatacaaaaaattagcggagtgtggtggtgggcgcctgtagtcccagctactcgggaggctgaggaaggagaatggcgtgaacctgggaggcagagcttgcagtgagcccagactgggccactgcactccagccagggcgacagagcgagactctgtctcaaaaaaaaaaaagaagggatgagacgcagggccaggacctggtggctcagggcattgcccggggcccagcttcccttggaggggccccactagctgccccagcctttgggcggctcctatgtgcacatctaggaggggaggaaggggagaggctgtgtgctcagggcatctggggaggcgaagccacgggaggttagcagggaatgaacacaggagggaactggggggccacacaccaggggcagagtaggggattcagcagacgggagtgaccgcagaagggccagggcttggggacaggactgtggggctggaccctggctcggggcgggccagtccggcgctgatagcctctctgccacccacggcccctgagcctgtacgtcctcatgtgtgcaacagggctgctgctgctgtctgtcccaagaggggaatgtgtgtgctcattccccgcccggcaggagatctgggcccggctcacttcttggcagggactagaaggagggaagggcctgcaccaggctgaagtgtcaggattttcttcttcttcttttttgagatggagtttcgctcttgttgcccaggctggagtgcaatggtgtgatctcggctcactgcaaactccgtctcccggattcaagtgattctcctgcctcagcctcccgagtagctaggattacagatgcctgtcaccatacccagctaatttttgtattttcagtagggacagggttttgccatgttggccaggctggtcttgaactcctggccttgggatccacccgtctcggcctcccaaagtgctgggattaccggcgtgagccaccatgcccggaggacctgctcttttaggaaaagcacaagggcgtgcacccaccaaggagggagaaagcgaaggcagcggaggccagggcagagccttacaggccgcccattgcagggtcctcattgtcactggcccgcagacacattgcagggtcctcactgtcactggcccgcagacacattgcggggtcctcactgtcactggcccgcagacacattgcggggtcctcattgtcactg

SEQ ID NO: 29616 - DNA, 1433 bp, Artificial sequence
  DNA replication origin
attccctttttaaccctttgaacctctgtcctcccctgttcccagcgggaagcctctggtgaacgcgccatgcaccccacctgcccccgctctctgggtctctctcccagctggaacggccgcttccccaggtgccttccctgggccacagccttgtgcctcggcggctgctggatgcctgggtgtgtgggtggctcccagtgtgtgggatggcacacgagcctctcgcccttctgtgtggggtcgcacacccaccgcaggccgtatttttgctcacgttcatgtttctccacggtggacgctgggttgcagggacccttcctgtgtgcgggtgaggatctgggcagctgctggtgccgggcccatggggacgctgaccgtcccgggtgccggctctgaggtgtgcagtggacggctgtcctgccgggcgctgccagggccccttaggccgacgtgcgtggccacccgattccccgccgttgtctcaggaacctttgccgagtggggtggatcaatttttcgggtgtgttttaatagcataattacagggagtatttcaggctccctctgacgggccggcagggtttggctgccggctgtttaccaggctccaatctgcacactatttttctgtgggtatatatagctggggctgcttctccttcctcaggttcaggctaaagagggacagcagccgcctcagccaccccctgtggtttcctttgcctgtggatgggcggctaaaatgggcccaggaagagtcaagaacaaggccggctctcggtgccacagctctacccccaaaagcaggaagggggctcgggccatgcccatctgtgagctacaccggtccgggagcggcatcaggcaggggagtcctggacccccgcagtgctggggtgtgtttgtccgccctccctcccgtgtgtctagaagcctccagcctcggggaaaacaatgaaactcaactgtgacttaaacagattcccaggcccgcaggagctcccggaggcttgtggctgtggcgagacctggagggccatgcgggagggacagacgcaggtttgcggaggccgcctgcccaggaggggcgtcaaaggaggggacagatgtgggtttagggaggccacctgcccgggaggagcctcgaaggaaggcacaggcgtgggtttggggctgcctgccctggaggggcctcaaggaccccaggtctggtcttggtctcactcacctcctggaccccccaaggcctgcagtttgcaatctgtcgcctgggacccccactgtctgcctttacgcagctcagccaccacgcggccctcgctccctcatttacttgatttctgtttatggttaaagtaccgtttaaaacgacacatcattaaagcaacatgaaagggagttttgaaaagggaagccatcgtccatcccac

SEQ ID NO: 29617 - DNA, 1285 bp, Artificial sequence
  DNA replication origin
tctttccccgcctgtgctcagcatcgcgctttgtgaataaacagcaatgaccgtgcggggcccccaacctcctttcctggctagcttgggagggagagcagggagctccagccccaccccaacacccacctccactggccctgaaccagaacttggacttctggctgctgcccagagctctgtcccacaggaccggcgtgagaggatgcatgaatgaatctgagtggtcgggaatctgcagtgggatgggctgggctgcagacacccctggggacgcgctgtgtgtgcagcatgagggaggccgacagccccacaggtcccaaggagcctctgtgctcctgggagctgccctgtgtgctccgggaccaggcggtgagtggccccttcccctcagctccatggaggcccgacggacccccggccaccgcggcactcagcgcagctgggaaagcctgtgttgcgggtctcctggccccacgattgtgcgaggaattctgagccttccgggggggacggctgtcccgcccctacccccacccagcctgggtgtgagatccaaagcccgagagacctgagacttggaagcggctgtgaagcttttacggtgtcacttacaggggaggaaacccagacccagagaagggggtgagggccccacacgttcagagcaagatagggtcggctgctgcccacgagccgccaccaggtcggccacccctctgcctgcccccgtcctcccagtgaccctggaccccaagtccccttcaggtgcctcggccagcaggtgtgggactcaaccgccaaggagaggagaagccttcaccccgggcctgtcccttcccaccagtgtgatcttgggtgtgtgaattaacttccctcaccccagagtcctaatccaaaaaataggctcaacagccgcaccctgaagccagcagaggagctcaaaggtcaagagcaggacagaaggcagatacagaggatgtgggtgggggtaggggaagggggggtcccacctcacagtcacccaggagactcaggcctccaggcaggctaaggcagagaggggcaggggttggctgggaacagcttgcctttcagaagaacacaggacccacacccagcaaggaagggtctgtccatgccagatgtgtgtgtgggatactgtgctggcttctaaactgctctgtgagctaggattctctaccacaaggaagggcaaacttgcttttggaaccagaagaaaaagcttatataaacaaagaagcaaaagtctaactgtcagccg

SEQ ID NO: 29618 - DNA, 2033 bp, Artificial sequence
  DNA replication origin
tcagccatggcgcgccggccccggggcccccgcaccgccccatagcgccgcggcgtccgctcggtctgggccgggccctgggccctccagccatggagccgcacgtgctcggcgcggtcctgtactggctgctgctgccctgcgcgctgctggctggtgagtggggggcgggcgcctgggggcgacgggagggggctgcgtctcggctccccacggcctggacaccggacgacgccggccggggcgagggctgcgggcgagcgggcgcggaaattcccagggacgcgcgacccgggcgcccgcattcctgaagcatgagcgcgccaggcggcggcggggctcctgtcccagggccgggctggaagggcggcggcggctgggggagacggcaccgcgtgcccacgggggcggtcgagcgagcgccgggcatagcgcggctggcgtctccgccggggcgctgcggagaggaggccgccgggcgaggcggtgtttgccccggtgggaagggccgcggcggtggtggggggagcacgaatctctttttctctttcgggtttaaaaaaaaaagcgcaaagttgcatcaggacttcctgacaatctgggagaaggcgggcttcctgcctggagctgtttaatttggagcttcccgagcccaacgaacgtccgtgcccagggcccagccccgctcaccgctgcacccccctctgccggactgaggcggtcccacactttggaaaaaaatagtgtgggttcctccctggtcctcccttgccctactgggctcagtttcgcaggggcgggggccggcctctgccctggtctgggggaggggacacccccggaggctgtggcctggtgtcagggcggggcaggggtccccagtcctggcatctgtgttccctgcttgccgggcagtggtgcccctttcgcgaagcacacccgggtggcttggtgctgcacggcctggcacccctacccttccccgaccctggcctagccgggacccagggtccgcgccctccgcccgggggctccccacgtgtgattgatctgggaagcagtcggatggaattaacccacggacaagtgggacggtttgcattgggagtccgccatggacacggcaggtggggccttttgattgtaaaagccctttcggagcccttgcctcgctccaggtgggagctcgcccagcgctagctttggggatctagagccgcctgcctgaggctcccagacagactgcgttttgatcggtcgcacagaaaggtggtgaaacttggggaagattttctagacaggaatcaatgaaaaccattgaggctggagaggagaggttttgagcaactctcttcagtgcggtcagccctgtgtggactgggcagcctgggacctgctcccagtgcagggtcagatgggccgtaaacagggcccggctgtgttccttcctgtgccttgaaaacaagcaggacagcctggcacagaggcagagtctagagctgacaggccttagagagggaaacaggaaagcttctgaaacgtcccgttcacactgatcgttccatttcctcttgtgtctgagtgggagcgggtgtcctccctgcagggaatgccccccctctcagatggcagctgctccttgggcagagttggcaatgtttttctttaaatgaccagatggtaaatattttcatgtcacaaaatcttcttcttctggtatttttccagccattaaatgtaaaagccctcctgagttcatgggctgtacctaaacaggtgttgagcccgattctgtggcacatgtggtttgctgccccctgggcattggtcagggggcctgggttctgccttctcgattgctatccgcgtgggggatctgggggagggatcactgttcttcttgcttttggcctccttggggaggatggggaggtagcccaggggtgctcacccaggccccgtgtcagtcttctatgaaacttttaaagaatagtgatgactgactgtctgtctgtatggtactttccttaaac

SEQ ID NO: 29619 - DNA, 1525 bp, Artificial sequence
  DNA replication origin
ccggcccgccctggtgcgttggggcctggagacccccgactggcgctggcccggagcggacccctcccctcccgcagtcttggccccgcggctccgagcgtgcgcggcggtgggcaggggcgcttctcgctgggtgggctgcggctggggcccgggcgctacataaggggtcccggggcctctggctcccccaggcagcgccccacgcgcaactgcaccccgcgtgcccgagcgactttcgctttgctccccgaggcgcgagcacgcagcgccccctggggaccgtggggaggctcggagttcccgcggcggccgggcctagtggtcccggagggagcacgcgggatgctcgggtcgcagcagtgccgcgatccgcgttggtctgacgggggctcgggggctgctcccagccacgccggccaccgcgcgcggctttgcccgggtcgctctggcgtgagacggtgagagtgagagccacggcctgtgcacctgctgccgcggcgccctgccacggagaggtagggtctgagtccagggtgttcgggaccctcacccaggccacgtcagtttggccttcgtctgcccttgagatgggcacagaaagagggcaaagggctctacaccgtttaattgggctcagttcatggctctcaaactcagctgcgtaaggcagggagtggggctggggggactgtggccactgagcctcaaggcactggcaactcatgagagcccagcacaagcccacaccctccagctcaaaaaaaaaaaaaaaaaaaaaagatggcggggcagtggctcaggcctgtaatcccagcactttgcggggctgaggcaagggggtagggggtcgggggatcacttgacgtcaggagttcgagaccagcctggccaacatggtgaaaccccgtctctactaaaaatacaaaaattaggccgggcgcggtggctcacgcctgtaatcccagcactttgggaggccgaggcgggtggatcaccaggtcaggagatcgagaccatcctggctaacacggtgaaaacccatctctactaaaaacataaaaaattagccgggcgtggtggcgggctcctgtagtcccaactactcgggaggctgaggcaggagaatggcatcaacccaggaggcggagcttgcagtgagccgagatagcgccactgcactccagcctgggcgacagagccagactccgtctcaataaataaataaataaataaataaataaataaataaatatacaaaaattagccgggcgtgatggcaggcgcctgtattcccaactactcaggaggccgaggcaggaaaatcgcttgaacctgggaggcagaggttgccgtgagccgagatcatgccattgcactccagcctgagtgacaagaacgaaactccattaaaaaaaaaaaaaccacccagaaatggagattttcatgggaagtctagtgtttaaaggctgatataggccgggtgcggtggctcacgcctgtaatcccagcacttttggaggcc

SEQ ID NO: 29620 - DNA, 1279 bp, Artificial sequence
  DNA replication origin
gtggcagccaggcctggtcctcagggaagctctgaagctgggcagcgtgtgcccaagccatgcctctcactgccttgaggtcttggataagctacagagccccaggagcctcaaccccctcctcgcctgtaaagcaagggtcctgcctgctgctgctcagaggagggttgagtgagacacccgcgtggaacacacctgggaaacagcatgtgctctcctgccttttgggaggacacaaacttcaggtacttcgcagacaactaacgtaccagccgtgatatgccatgatatcccacggggaggggagaagaggggaggggaggggagaggaggagaatggaggggaagagaggggagggga[450 bp omitted]cctaccagcagcaaagggggcactgaggcccctaagctgtggcgaggaagctgggatgaagacgccgatccgtccctggctctcaccatccccacctcgccagtaaaaccagagcccaactggatgcgctgatgggaaggacgcggccaacactaacctggagaccaagggcccaggctggagcgcagatgctgccccgagtgaagatgaaccacgtgctctcctgcagccacccatgtggtcttgtggccccgcgtggtctcgtggagtaaatgcagtgctcggggcttcagagacaggcacagtgggctggaaccgggatccgccccgccctccaagctcggcccccagtagggtctctgaggagcagcggtggctgctcgggccctgcttgggagggtacagaattgctgactgctccgggcagcagtggggatgagctgagcatcacccgggtgaagagctgga

SEQ ID NO: 29621 - DNA, 1050 bp, Artificial sequence
  DNA replication origin
ggagcccatggacggcgcgtcctggagctggccatgtcaacgtgcagccgaccacacagtcacacacgagggtcctccaggcagcgggtggaacacacctcatgctgtgcaggggagggggagaagagtttctgcaccagctctcattgacggagggtcagctgtgctcccctctggatggcgcccatgggcgtgggtgggtcctgggcatctcggcctccctggcaacaaagaagctctgagcaaaaggcaggggcaggagtgggcaggggaagggctcggccagggcccatgtgacgtcactgcctgtggacacgctgagctgtggcccggtggctgtggtgagtggtcagtcatctgcagtggccactgacctcatggtcactcgtcaggcatggagtgaacctcctcatggccctggggatacagtcacctgagacatagctccagggagccccagggccacagatggttacatcccgaggacatgctaggggagcctcaaggggtcgaagcagagtgaggtgagctctgggcagtcaggaagggctcagaggcagggactgctggaaggtggaggagggatttggcaggtgggggacagcattccaaggggagtcgggactgaggacaatggccctgggggattccatggccctgtgtggttggtgcagtggggggactgagcagtgaggagggggtatggctgctgtgttgagccgagaggaggggactgaagacagaaggtccctgtcctgctcccttgggcctgaatgcccccagacctcctttctccctttgttgctcccaaccagagccccagggcatgagaggacgccacccagccacccacgcagggctctgcgcctcactgtgacctccatctgtgggatcagcacggggccagagtcaccaaatgcaccaaatgctccaaatgcacgtgggagcctcagagtgaggaaaggactgtctgtgaaaacctcctctgtcctgggtactgcctgaaagcctggactccgagggccacacatgacctgctccaccctcaag

SEQ ID NO: 29622 - DNA, 1423 bp, Artificial sequence
  DNA replication origin
gcccccaactccccggcctcagtctccccacgcccctcacctcgtccaccgacagccgcagtctcctgcgggccggtggcctggcctggtcgcgtccgggggcggcgggcgggcgggcgcgcttgcggctgccactggtagcggaggccggggcgcggagtgcgggcctggcggggctgggggtgcggcaggccagcttgggcggcgcgatgcgggggggcccggggcggcggcgcgcgaagaagtcggtgacgcggcgctgctccatggcggcggagtgcgcggcgaaagcaaggaaagaaggaagggaggaagaggcgggcgcggttcccgccaaatttcccgcgggcgccctggccccgcccccggcgcggaccgaaccatcggggcagagcacggggggagggaagggacggggcgcgcatgcgcgctggtgggcgcgggcaccggcttggccgcgcgcatgcgccgacgtgcgggcgtggactcgccggcgggcgccgtcgtgcgtgggactttagcgcggtctccggatcccgcgtgtggctcccacttttcagggcgtgtcagtggggccgctggcttcagggtcagaatgagcgcaatccaggcaaacagcagcgcgcgcctgacaaaaccccggcgctgcccgggggagccgaggacggcgcggcctggggggctgcaggctcgagctggtaaaggcgcttcccccgcgggccgcacgctccttatttctttttttaaaactatttctggctgggcgcggtggctcacgcctgtaatcccagtactttgggaggccgaggcgggcggatcatgaggtcaggagatcgagaccatcctggctaacacggtgaaaccccgtctctactaaaaatacaaaaaattagccgggcgtggtggtgggcacctgtggtcccagctactcaaaaggctgaggcctgagaatggcgtgaaccccgtggggcggagcctgcagtgagccgagatcgcgccactgcactccagcctgggcgacagcgagactccgtctcaaaaaaaaaaaaaaaactatttctatcgaggcggagattacgttgccgggtggtctcgaactccccggttcagtgatccgctctcttggaactgccccctcccaaagcgctgcgatcacaggcgtggcctccgcgatccgcgttgctcgctttttaaaagggtggatttgatatgtgaattatttctcaatcaagctattacatggaaacgaagaaaaggggccgggcgcgatggttcacgcctgtaatcccagcactttgaaaggccgaggcgggcggatcacctgaggtcaggagttcgagaccagcctgaccaacatggtaaaaccccctctctactaaaaatacaaaaattagccaggcgtggtggcgggcgcctgtaattc

SEQ ID NO: 29623 - DNA, 1159 bp, Artificial sequence
  DNA replication origin
caccagcgcgcatgcgcgccccgtcccttccctccccccgtgctctgccccgatggttcggtccgcgccgggggcggggccagggcgcccgcgggaaatttggcgggaaccgcgcccgcctcttcctcccttccttctttccttgctttcgccgcgcactccgccgccatggagcagcgccgcgtcaccgacttcttcgcgcgccgccgccccgggcccccccgcatcgcgccgcccaagctggcctgccgcacccccagccccgccaggcccgcactccgcgccccggcctccgctaccagtggcagccgcaagcgcgcccgcccgcccgccgcccccggacgcgaccaggccaggccaccggcccgcaggagactgcggctgtcggtggacgaggtgaggggcgtggggagactgaggccggggagttgggggcggggagactgaggcccggggggcagggctcggggaaactgaggcggagggacgggggcggggaaacaggcgggggggacggggcgcagggaactctgggacaggccgggggatcctgggggcgccctgccaccactggggacttggctggctcctgagatgagcaggaggcactggggggcttgcaccgggatccgatgatggggctggaagtccagcttctctgcgaggccagggcaggggtccgacctggaaacggccccggaagacgagagcaaggctgtgtccccggccttagcacagaccaccatctacgggaagtcctaagccccccagccatgcccgtcccagttaactcagagcggcttctgatccttcggggtcctctgcagagccaggagcaccaggtcttgtcatgagttcacccttggggtccctcccaccaggtttccagccccagtacccccgaggccccagacatcccagcctgcccttctccgggccagaagataaagaaatccaccccggcagcaggtcagccgccccacctgacatccgcgcaggaccaggtgaggggcggggcctggggcagatgcgggagggctgagtggtgccggcctgcctgcctgcctgacggcaccgtgtcccctgatccccctgaaggacaccatctctgagcttgcgtcatgcctgcaacgggcccgggagctgggggcaagagtcc

SEQ ID NO: 29624 - DNA, 2886 bp, Artificial sequence
  DNA replication origin
ggagggtgcatgtggggccccttctgaccaaggactgcaggtggtcagggaaagggccagagctgtgagggggaagctgcctccagaggctgcaggtgtggaggggccgggcggaggctcaggggtggctccaaggagggcagagcgcccaggacacaccagtgcaagaggccagcgcccactgcacatctgaacagaacagatcagtgacagacacctctgctcagaaagctggggaggcagctgcagcaccaggcaattccaccctgcacgccccttcaccccgccctgcacgtaccagggctcatgatagtacaacagctgcccaccatcctggcacaggccacctccatgctgagcgcaggcttgcgttcggacacaaagacgctccgcagcacgcgggccagctcaggcagccgttctaagcgctgcagccgctgctcctgctccgggcaccgcgtcatctgtgccagctgcttctgtgcctccttggctcggatctgcagcaggtaccgggacctggttagtgggcagcaggtcaccaggcgcccacccgccatcactggggacgactcacccgctccagcagatcctgggacacccccttcagagcactgggagaggctgcaggcggggtggctggtggggtagccggcagtgctggcctgggagacccggggctgctgggcgcagcagagcgcagggccaattgactcaaggccttctccatctgcgggagggacaggttggactggagaggtcacaagatgcaacgtgcccctggctgtctgcccaggagtccccggtatctctcaaggcacaagttcacccagcacactgggtggtctgtgccggtcaatgcagtgtcccagtgtgcagcatcgcctgcccaggccaactccccacatggggctagtggcagagccaggcttagaggctgcagctggggacagagggcaaatgccaccaactctctggatccgccagccaaggaggaagccagatgaggcgtcaagctcatcaccaaggcttccacctcttaagcctggggtcaggctggcccacccacccgggagaaatgggctgcccaagcctcgcagtctcaccctgggtgaaatcaggttgcgggcccgggccagcacctcctgagcagtggtgagcttctccgtggcgggtggctggggcagcgcggccggctcgatgtcgggtacttcatccacgttgaagcgcgggtgccagcgggtcagctggtcctccggcaccaccatggcggggctcagggaggccaggaaggcctggggagaaggagtagatgggtgaccctgggcacatctgagacaagggcagactgcatgtgaggtaggcctgtgcttacgtcccagccgggccgcctcgggcaagtcactcagcctctgcccagtgctcagcttggagggagagcacaaggcctcccatggtccgcgctcgctgaacgccttggggacctcctcagtgcctgcggctgcaccctgagcacaccagccctcagctcagggtgaacccagcccagttccatcccgggagaagctgtgagtggcagggatgctccaagcacagggttaggtgctgaggcagtgctggtgccaccatcttcacacagcggggccgggggccgctcaccttgtggtgctccttgacatgctccaccagcttctggctgaagatctgccgtcgctgcaggaggcgcgaggccgtgagctggggggctgctccgtcagcctctgtgggacgagtccaggcctaagtccccaccaggccacccagccacccacccgtgaccagtcctgggccagatgcccagcacctcacacccaccctggaaactgtgcggctcacagatggggaaaccgaggtcccgcacccagcactcaccctgctccagcagtggctcgatggtgagctggtaatctgacctcctggtgccatccttgaaggtggggacactgcgctcctggcggaagcggtaggaggccgggtacacggttttgatctggccaacattgcactcctcaaaacgcctatgggaggatgggggcggctcaggaggcaggcccgggcccacccccaactccaggacagccacagcccacccccggccactcacctacgcatcatgtcctggacgccccgctggaccttggcaaaggtgggcgtctcggagcggttgtggagcatgcccacgatggtgtccatgctgcggaacatctccgccagcacctggtacttgtagggcagcacgagtcccggcaggccgggctgggccagggcatggaagcgctggtaggcgggcgccttctcgccactgtcagggagggaggagcctcatgagaagcagtaggcccctacccctccaacgccacagcaggcccctcggccagggagaccctccgatggggcctgccatgccacacacgatggctttcgcggcccttgcacacccaccagcactggcaccgttaggggtagcagtggtgacgggaaagcccggctccacaccccagctctgctgtgtccacgcagctcccccagggaagctctgccctctccccagcgcagtttcgtcagctctcaggggcagaggcagacaacacaccaatgcatcaggagcatttgaaacctgccagagtccccgaggcaggagctgccccccgcaggagggactgagggcacagcgccagcagtgcccgggacctttttctcaggggtctgggtccgcgccctggtgacctcaccaccaccctccctggaaggagcagacctgggcctctgacaggctcgctgggccacgcctgccaccaacccggcctttgccggggcctcgtggccgcccacccagcactcaccatg

SEQ ID NO: 29625 - DNA, 1301 bp, Artificial sequence
  DNA replication origin
gggatggcctgccacccacactacccaaccccatattgccacagagcccccttcacccccagccacactcccgatggccccccagggggtgctggatctggcttcccttccccaccagcagcaaggacagaggtgcccacagaaaccggtttaatgtgaatccaccaggtgagccccatgaaggggcccaccgcccgcagccagagaccctcgggctgtgcagcctgcagcccacatctgcctctggccctcaggggcgctggggaaaggaaggccaaagtgtatcatgttcataaaagaaaatgctggtgggcccaggccagcgagcttctgaagcccacgtctgtccacagtggcccccaggctcacagcccctcctcagcacgtgtctggtgggccaggcgtgcagtgatgtgggcgaggtccgcggccttgtccagcttgacgtaggtgtcggtgcggatgcggtggaggctgagccagtccggcagcagctcggagaggagcagcaggtgcttctccatttcccctgggggaggagaggaggacactgaggctggtgctgggccccagccctgcacgggcagcacttgaaaccagcctgaccacccaacctctgtgcctgcctggtcgccctcagggccccatcaccaggacttagggcagaggtggttctgatcagaggcccaggtctgggtggtgtgaacagtgaccggagagagccaggcctacagttgaggccctgtgaggaggcaccgagcatggaggccgccagcccatgaaagccctgaggcaggaggtgccctgtagcgtcaggacccctatgtgctcagggcctggtcaccagaggcctgggaggcagtggagggtgcatgtggggccccttctgaccaaggactgcaggtggtcagggaaagggccagagctgtgagggggaagctgcctccagaggctgcaggtgtggaggggccgggcggaggctcaggggtggctccaaggagggcagagcgcccaggacacaccagtgcaagaggccagcgcccactgcacatctgaacagaacagatcagtgacagacacctctgctcagaaagctggggaggcagctgcagcaccaggcaattccaccctgcacgccccttcaccccgccctgcacgtaccagggctcatgatagtacaacagctgcccaccatcctggcacaggccacctccatgctgagcgcaggcttgcgttcggacacaaagacgctccgcagcacgcgggccagctcaggcagccgttctaagcgctgcagccgc

SEQ ID NO: 29626 - DNA, 2557 bp, Artificial sequence
  DNA replication origin
gtcccgcccgtccccgcgcaggcgcgctcgggctgccgctggctcttcgcacgcggccatggccgactccgagctgcagctggttgagcagcggatccgcagcttccccgacttccccaccccaggcgtggtattcaggtgcacgcacaggccgccctcgtggcgccccgacctgcgggcctacggatgggagcgcgtggcccgcgacctccgggcgggcggggcgggaaccctcgtctttcgcccccggggccctgccctccttcggccccggcgtcaccaggcctgtccttgggtccagggacatctcgcccgtcctgaaggaccccgcctccttccgcgccgccatcggcctcctggcgcgacacctgaaggcgacccacgggggccgcatcgactacatcgcaggcgagtgcccagtggccgcatctagggcgcttccgcctctgcgcgcgccgagggcagcacgtgggctctgcgcgtctgcttgggggagggcctttggggtgcttcagggggcgccgggacgggcgccgtgcttgggtcgcccgggaagggttgtgagattgagcccccgaggccgccgcgctgtgcaggcgtccttcccgcaggttccgggtccccagcccaggacaggcgtgaccgagttgccgggtcagttggtctccctggagtgcccaagctgaatccacagggcccagctgccttgcttcttgttccttctgcgagctggtattgagcgcctgccacgagccaggccttccctggtgaagatcacggaatgcccacccagggaagggaggcctggaggcctccgggagagcccaagaggtggcccagggagaacagagtgttcctggccgtcttgcctctcctagggtgtgacagcccactccctggacactgccctgaggaaagcgccagctcttgctggagccacaacactgccagagctcccttctcacctcctgcaggaagccctccctgacctcctgccaggccggggcagggtttccctgagcgtcccccaaccatcacagctcaggccacctcgagagactccctttttagacagaagccctggtgcagagctgcctttgagagtaagctgaggcctgtcaggtttctaccagcccagttacagatgggctgctcagctcagagagaggggtggtgactcccctaggaacacacagctaagaagtggtcccttaaaagacagacccaggtctgcactctgacctggaagcagctccgggtaggtgatgggtaacattccttaaatggtgcatgtcactggcctttcagctgggagccaaccaggtaccccttgccaccggccaaccctggcccctggggattcccatgctgccgagtcactcctgtcacttaccctgacaggcctagactcccgaggcttcctctttggcccctccctggcccaggagcttggactgggctgcgtgctcatccgaaagcgggggaagctgccaggccccactctgtgggcctcctattccctggagtacgggaaggtaagagggctggggtggccagaggaagggcagggccaggccaccgtggccactctcccccagttctaaaaggccttcccaggcgtgtcaagtggagctgctgtggttacagtggccttgggagctcagagaggttgagacataggctgggctcacacagccaggtaacagcaaggtggggttggagtcagggtctagggtggcagctgccaagctgtgcaacaaagctgttttctgcgggaggctgaggaccacacaccacttcccactccaggctgagctggagattcagaaagacgccctggagccaggacagagggtggtcgtcgtggatgatctgctggccactggtggtaagggtctccccgcagccaactgctgtggctccaagggcctggtgggagtgggacaggacctcgctgtgtgacatgggatgcagcttactgttgtccagagggtgcctggtggccaggccgacaccttcctctccccatgccttcccctccccaacccaggggctggcctggagcacctgctctctgcagcccaggccaactggggacctcaccctcccatccccaggaaccatgaacgctgcctgtgagctgctgggccgcctgcaggctgaggtcctggagtgcgtgagcctggtggagctgacctcgcttaagggcagggagaagctggcacctgtacccttcttctctctcctgcagtatgagtgaccacagggcctcccagcccaacatctccagctggatcccagggaaatatcagccttgggcaactgcagtgaccaggggcaccggctgcccacagggaacacattcctttgctggggttcagcgcctctcctggggctggaagtgccaaagcctggggcaaagctgtgtttcagccacactgaacccaattacacacagcgggagaacgcagtaaacagctttcccacaagagccgtctcctgtcctcctgttccccagggcagggagccccaggacaacaccagacttcagctgtac

SEQ ID NO: 29627 - DNA, 1360 bp, Artificial sequence
  DNA replication origin
cttttcttcatttcgcaacttttttttgagaaggactctcgctctgtcgcccaggatggagcacagtggcgccatctgggctcactgcaagctccacctcctgggttccggccattctcccgcctcagcctcccgagtagctgggactacaggagcccgccaccacgccctgctaattttttgtatttttagtagagacgcagtttcactgtgttagccaggatggtctcgatctcctgaccccgtgatctgcccgcttcggcctcccaaagtgccgggattacaggcgtgagccaccgcgcccggcccatcatttcgcaacttttacaattcagctttggcctggcagttactgcagaagggaaaacccactcagtggaaggcagcccccaggagccttcggagggggaggccggaggctgcatgcggctgctggggccccggttccagggcgggtgggggacccatcgtctgatgccaaggggcgtggtaggggcggctgcctcgcagtgtgcggtggtcagggctggcaaggcctggggcctgggctccagacccctagggaaggtggaaatggaggaccctgacatcctcacgtccccggggaagctgccacatgagccggccccaccggtccaagtgtgtgagctacacttcagccgtccacgtccagcccaggaggcctccgccttccccttccttgttcctgattctgtctcccagatggcccgaggggggcctgggaaggcgtggggtgggggggtactggaggaggggcctggggagggttcaacacagaattggccctgtggcttccttcaacccgggctgttgggctggcgtgggaacagcaaggagccccgagtcctgcccttcaacaaccaatgtggcgctggcctctggaggaggccggccgggaggcagcgggagctgggcacctgattcttggcagctgctgagaaggtgtgaaaggaaaataaatctccggaccccaaaatcactcagccaagagaaaaatcaagctgggaattaggcaaacctgcctcccgttttatttctaaataacatagttacaatgataagaagctacacgcctccctcataattagcgtccagggaaattccttgtggacaaaggacagacggaactggaagtcatccctctggggctcccctgagacaaacgcttatatgattgccccgttcccttactgtttacataaaaatgcggattcactgggccagactcaatcgtgtattcagtggaaggctgactgaaccaatgtacgccatacacatactgatcttgtgtctccctaagatgtataaaggcaaactgtatccccagccacctcaggca

SEQ ID NO: 29628 - DNA, 1447 bp, Artificial sequence
  DNA replication origin
gtgagtagctgctgggattacaggcacgcgccaccacgcctggctaatttttgtatttttagtagagacggagtttcaccatcttgaccaggctggtcttgaactcctgacctcgtgatccacctgccttggcctcccaaggtgctgggattacaggtgtgagccaccacgcccaaccatttttgtatttttggtagagacaagggttccccaagttggccaggctggtctcaaacttctgacctcaggtgatccacctgccttggcctcccaaagtgctgggattataggcgtgagccaccgcgcttggcctcgagcagttttgatgtgtcccctgcccaggtcaaccccggaccccaaccaattggcctcagtgtggggaccacctcggtccaggtgggcagctacacagacgctccccaggaatcatgggaacttgggagatggcaccctcttgactcggcctctcagctctgaaggctgccattggagaaatgagaacttggtggggaggtcccgggtatgggggatgcagctgccaagtggctgagggcctccgagggccagcagtgttagaaagggcaggcggtcctcccaggagggcccaccctgagcttctcaactcatcaccctctcctgcagcttcagcctctcaagaagcctttcccagggagaagccagtccctactgcgctgctgggctcagttcagtgcggtgctgagcggagcccgcacccctccatcgcctgggtgtgtgtggacctcacagtgcagccttgcttagcggaagccttgcttgatgggagggcacttttcctggcaacagaaagggagacttatgccgctaagaggagccttcttggctgaaatgagtgcagtttggttctgtgtccccatccaggccacttctgtgccacgtcagacgccgcatggccctgagggcactttccggggacagactttggattctgggtgctgctcagggtactaaggacagtctccagccctaggcggcagcagggatgccgcatgagtgtccctgcccccttggccaccagagcaggagtgggtttgggtgaggaagctgctcccaaactccaggggcagcagaggcagccgcagggtgtgtttgagtctggatgggggatctgcatttctcaaaggccgctcagctgtcccagaagcaggggtccaggtggccacactccctctcctctgtgccagagacgccactgagcccctctcctggggctggcctggagttggcggggacagagggcagggaaggggtaaggagggcccccaggcttcacacgcgtgtctgtgcatctcccccatggctctgctcacggtggcatctgggcccctcagaccccagtggctcagctcgccaggtctgagttggcacttttccccctgcagagagcacaggtgtggcggtgggggca

SEQ ID NO: 29629 - DNA, 1227 bp, Artificial sequence
  DNA replication origin
gccaggcacccccgccccccgccccccaactaacggaggtggccctgccctgcccagtcctaaataaccctgcagggtggactgtccctgggcagggacaaggccatctgccctccatggtcctcactgctggtaggtgctcccgatggccggtgctctcctgttacatccgccggcccacgctgtggctccctggctgttcagagccaccaccttccttcccacggcacggcgggcacccagcggctcccacgctgcagccgggtctggccctggaaagaggcttcagctgggccttttcgcccgcacagcaggagcccaggctgaagtctgcagctgccgaggggccttcttcccgaatcctgcgcggcagatccaggggctgtgggcagccacgcccagcccgtgtaaacaggtgagcgacggcccaggggcctcgaggctgggctcggccatctccactgtgctcggtgggctctgggcacccaggagcgacaccgcagacctgtgtgtggctcgtttttgccgactagagcgagggccgcacgtgtcccatctgaaggagctgtgaagacctgccctgctgggacccacatcagctgtgctgggaaacaggcctttgcggccactgcacacgcgggatggctgggccgtccacatgccaccctatgggacccccaagcaggggacagaaaagctgctcctgagaggccctgactgctgcggcccccagggctggacaagacgacgacgcatcctttgtggcctgaacacagacttcagtgaaactttggaggcacgtctgtgcttgtgtttctggccgatgctggcgtgatgaggccgtttctctactggaggtgaacaaggcctggtcttgtcaggctgcacggaggtgctgctctgggtgggtgcctatgagtgagatcaggtctgatgcgaaggtctctggggctggcccagcatgaaggaggcacaaatgagaacctcgcaggtgggccctggggccgccgccactcaacagtgcccaccagcccacccgggacccaccgggcagtgccgttcctgcctcggtgccttcagagcccgggagtttggaggtcatcacagggcccctgcaaggagaagctgcccgtgtgggagtcgaggaccaggggaccccggaccctctcacgcgccctgctgtccctcagtgacttgtggggggcaggagaggggccttggagctcc

SEQ ID NO: 29630 - DNA, 1753 bp, Artificial sequence
  DNA replication origin
cggaggtgctgctctgggtgggtgcctatgagtgagatcaggtctgatgcgaaggtctctggggctggcccagcatgaaggaggcacaaatgagaacctcgcaggtgggccctggggccgccgccactcaacagtgcccaccagcccacccgggacccaccgggcagtgccgttcctgcctcggtgccttcagagcccgggagtttggaggtcatcacagggcccctgcaaggagaagctgcccgtgtgggagtcgaggaccaggggaccccggaccctctcacgcgccctgctgtccctcagtgacttgtggggggcaggagaggggccttggagctccccagtctcagctcagccaggcagaggcccgggtggccggctgtggacctgcggctgccctggtgcagcgttgttctggtccccgagtcgcttggctcctgcctcccgaatcccggacgccgccgcgtgtgctctgaggcacgagggcctcaccactgacggaggcggggaagcacgcctgcctctgccctgtgctggccacggttcatcctgggccccgggtgggtggctgcagccccggcaaagagacggccgcccacacaccagccacttaccatgaccgcccagttgcacacgttgagctggggctgcgcggggaccaaggcctcctggtgctgctggacgaccgaggtgatcctgctgagggcctcctggtactcggcgctggcaaagctggggacagagagctctggtcacacggctggggctgacagcgaaggacggagaggggctggcctggacaggctgaggctgcagagctctaacgggctgagaaccacagtgagcagtcactgggaccatgtgctcaagcctgcagcggccccgggcctcgctaggacaggcagcaggcacccgagccatcctctgccctcagactcacgggcaagagaggaaatgaaggctcagcaggccaagccctggcagagaggctgtgagtagagccgtcccatcctgtccctgcctgtgaccaggacccgggatatgtgggctggggcctgtgggtctccccagcactcactactacgtaaacatttacaaatatgacacacccttctttcattacaaaagcaacgtcatcccattgccaaaaagcaggaaatggaggggaacggcatctgcagttctaaaattccaatgcaagctgcggagtgtttggattcctttcatcttcacgaagatacgattacacggctcgacgaggtgccacggttcgcgatgtcagggccgcagtttgcgatgctgtgaatcttgggtccacggcgccgtcatgctgtgctctgaggacatctgcacagatgatgccttttcaccattttcaatcacttctaatatcgacaacatccacataaaaagacacctgccatcgctgccatagcggagatgcagggaggaacttctgcgagtgtggctgaagctggagtttctcaatgcccaggctgggagctgcgttgctgctggtggggacgtggaccggagcagccactctggaaggtggtgtggcagctccttacaaagctagagacggggttaccaggtgagtcagctcccctcctgatggcagcacctgtccaggcccagtaccttctgggaggtgagcccggacccactgaagcccagtcttctgccttggacgctcagcagtctgtgagaactggctttttgctccagaaccttccctaaaaatgaggcttca

SEQ ID NO: 29631 - DNA, 1327 bp, Artificial sequence
  DNA replication origin
ccaccagcctcggctcacctggggccactggagctggaagaggcaggaaggagccccagttcctccaggggtgcacagccctgagacccttggtttcagcctctggcctctggaaaagtgaggggcatctgcagtttcattgttttaagccccagttcatggtcatatgttgtgggggtgccgagatacagagacagacgcccccgggggactcgtgatcacccatgggggtgagacccgtgaaaccatggggggcctggagcttggggccttgtggagctggaggggctgtctgggagccccctgtgcccgcagaagtcactgaggagccaacagcccccccagctggaagcgccgtcccagggggaccacggggagcagattgcaggccccagttacacagaacaagctgctggccacaccggtgcccgccacaccccccacaggctggtcgctccagggaccacccgaggttaaagcctggatggcggtgccccctcgcgtccactgggcgtgattggcatccacaggggggtcctcagggccactgctccccgcctgttgcgtttgctggagcccctccagccaggccagagcagagacacagtcccacccaccacagccacccagccccgccctcacagctggagaaggcagggttatttcaaagcaaacccaggcagcaggcagagcttcccagagggggtcacaaggaggcccagctgtcggccatgcctttgagaaccactgtccctgaggtcacacacccatgacacagcctgattcaccgtgggctgcttctcagacacagacacacatgtcactttgccaggagcctctctaaattaaagacgggtggccggtcgccatggttcatgcctgtaatcccagcactttgggaggctgaggtgagtggatcacctgaggtcaggagtttgagaccagcctggcctacatggtgaaatcccatctctaccaaaatacaaaaaattagctggatgtgttggtcggtgcctgtaatcccagctactcgagaaggtgaggcgggagaattgcttgaacccaggaggcggaggttgcagtgagctgagatcgcaccactgcactccagcctgggtgacagagcaagactccgtctaaagaaaaaaagacgacggggccaggcatggtcactcacacctgtgatcccagcactttgggaggccgaggtaggaggatctcttgagccccaggagtttgagaccagcctggtcaacacagcaagaccttactggtacagaaaataaaaaattaaggccgggcacagtggctcacacctgtaatccca

SEQ ID NO: 29632 - DNA, 2250 bp, Artificial sequence
  DNA replication origin
ggccccgcacccgctcttctttcgggttttacccagcactgtcacctgcaagggccatcctgggcatcggtccccggcattgccgcctgtgagggccgtcctgggcatcggtccccggcattgccgcctgcgagggccgtcctgggcatcggtccccgggcattgccgcctgcgagggccgtcctgggcatcgttccccgggcattgccgcctgcgagggccgtcctgggcatcggtccccggcattgccgcctgcgagggccgtcctgggcatcggtccccggcattgccgcctgcgagggccgtcctgggcatcggtccccggcattgccgcctgcgagggccgtcctgggcatcggtccccggcattgccgcctgcgagggccgtcctgggcatcggtccccggcattgccgcctgcgagggccgtcctgggcatcggtccccggcattgccgcctgcgagggccgtcctgggcacagtcctcggacgagccccttggcctgcagcacccgctctgggaatgttagaggcatacctcgcctttcccgaatcaggaggcccaggggcagcagaaagagaattgtggttactgtaaaatccttgcccttcttgagtgtgtgaatctgtgtcagctccctgggtctgtttttgttttctgtgttttctcttgcctttcacatgttggtcctgctcctccctgtcttagggtttctgtagggattctgagcgttgtggctctcccttctcccagggcagggcctcccttcccgtccctttccctcccctcccttccccagcagagagtaggctgttaaaaggggctttcctccatgaaattagtggcagtccagatctgaggctggctaaggtgttttaaatacactcacctgcctcgcaaagaagaggggtacatgaaaacagggtacgtgaggcatgccagctacgcatctcgggcccagagcgggtggcttcacctcctccacaggatgcttatgggcccgctagtccttcagcgtttagccagcgccctgcaccatgctgagtaccagggacgctgctaggcacaggcagacgagacccccccacggcccccagttaggggctccaggacacaggcagacaaggcccctcacggccgcagtcaggggctccaggacacgggcagacgaggcccctcacggccgcaggtcaggggctccaggacacaccttccctcttctcattgcagggcattgatttctgccctgggcagaacgtttcaggggtcacaactcacaatctggaagaccacacgaagctgcccctgatcttccacctgggacgggacccaggggagaggttccccctcaggtgagtcggtgcagggcctcctggctgctgaggcagtgccagccggactcccccaaatgcaggctccacagggacagagccctctgcaccctgcccgccgcctccccttgcctgcatctgctgttgctattcatacccacacgtgcttggtggcctgccctcctcccagggtgcctgctgctgcccaccctggtggtctccccacttctgccccttctgggccaccatccacctggcccccagtgatgtatcccctactctgagctgcatttggggatggctgaggccagaggggaggggtccaggccctggggcaagtaggaggtacaaggacacaggtcagctagcaggaggaatggcagaaagccaccagccccagctccaccctctgctctctgggccttgtcctcaccccaccgaggatgccggagtctgcgccatcacctgccagttttcagggaagccctccccttaccctcaggagtcttgagggtcatggtcgccagtaccagactcacctgctggcagctccttaggggcgacacagaggccccaacacttggctggagaccccgccctggcttcctttttttttgtccgaacccatctccctgggctagggctacctggaggcttccccccctcaccccagcaggatgagcaggtccccaattcctgctcctggcctgggggtcctggggcacgtgcatgcctagtggtctccagcattcctgccctatcgagttggtcctgggaagacccaggagcatcaggggagtggcgtgcagaggcagaaccaggcctgagcacagcggttgctccctgcccaggctttctatgctccccgatgggcctgggtttgagtagggccggtgggaggcagcagagagcagtacag

SEQ ID NO: 29633 - DNA, 4344 bp, Artificial sequence
  DNA replication origin
tctttctgctgcccctgggcctcctgattcgggaaaggcgaggtatgcctctaacattcccagagcgggtgctgcaggccaaggggctcgtccgaggactgtgcccaggacggccctcgcaggcggcaatgccggggaccgatgcccaggacggccctcgcaggcggcaatgccggggaccgatgcccaggacggccctcgcaggcggcaatgccggggaccgatgcccaggacggccctcgcaggcggcaatgccggggaccgatgcccaggacggccctcgcaggcggcaatgccggggaccgatgcccaggacggccctcgcaggcggcaatgccggggaccgatgcccaggacggccctcgcaggcggcaatgcccggggaacgatgcccaggacggccctcgcaggcggcaatgcccggggaccgatgcccaggacggccctcgcaggcggcaatgccggggaccgatgcccaggacggccctcacaggcggcaatgccggggaccgatgcccaggatggcccttgcaggtgacagtgctgggtaaaacccgaaagaagagcgggtgcggggcctgcacagggtggggaggagccaaaacactcctgggcatcattgccctccagacactgccccacgagcagcttccctcctcagcctgggtgctcagccctcagccccagttctcacttccagtctttagactctccattacactaaatgattttcttcccaattaaggcagattagcagggggttcatatctcaagactttgatgctgggagtgggtggggctgagagagacctctcaggaggggctgggggatgctggagcgtaggggtcagcaggggccagaaaagaccgtggggagggagcaggaggcttgaggcgagggctcgtgggagaaagcctggcgctgacaatgctggggtagcctggggcggcaggagccccaggccctgtgcgtgtggcgtttcaccctcccacactgggggttgctgtggtgatgccaatgctgcggcccccatgtagcacctgggccaagcaggccacgtctctgtcgcctccagcctggggtgtgggggaggctcagatgccctggcaggatggagaggcccatgggggccacctgaccagggtctaggccacgcctgtagctatgccgcggggctactgtcatcacgcggggcaggaagaggtccctccctcctctccagcctgtcagctgccatgccctaggccacgctgaacgactgggggccacacagagaaggctgtggagggggtggagttcctgcctgtctcaccctcctgtgcctcccccaggacggtgctcaggggccacgtctggatagagatgggggcagctccgcctgcgcccacgtcccgagccctgtacctgtctgaagttctcccaggagttggtccaggtccagaagtgagccttgtgctgcccgagggtggccgccatcagcgtgtcgccacggtaatagaagataggcctgtgggatgggaggggaggaccatgtaatgacaggaaggacacgctggggccacctggaggctctgggctgcgtctgtcatcagtggctcatgcctccacgtgaggtcttggttgatactttacaaagatgattgaaaagtaaaaaggcccgcaaggtggctggggctggggtgcctgggcggccggggctggagctcctgggtggccagggctggggtgactgggtatctggggcgcctgggtgtctggggctggggtgtctgggcggccggggctggggtgactgggtgtttgggcggccggggctggggtgactgggtgtctagggtgcctgggtgtctggggcgcctgggtgtctggggctggggtgtctgggtggccagggctggggtgcctgggtgtttgggcagccggggctggggtgcctgggtggccggggcgactgggtatctggggtgcctgggtgtctggggctggggtgtctgggcaaccggggctggggtggctgggtgtctgggtggccggggctggggtgactgggtgtctggggtgcctgggtgtctagggctggagtgcctgggcggccagggctggggtacctgggtgtctgggcggccggggctggggtgcctggatgtctggggctggggtttctgggcagccggggctggggtgcctgggtgtccgggactgggattcctgggcagctggggctggggtgcctgggtgtctggggtgcctgggcggccggggctagggtgcctgggcgtcccctcattgctggtccttggcaaggctgggccagaccctggggagggtgggcagacaagaggataagcaggcggcacggggtctcctgaccatgttgggcctgcgagtcaggaacggggagtgggggacgcagctgggcaccgtctctccccacagtgaccaaccacttgtgccaggtctcgagaggggacaagtgagcaaaactccctctacccggccccagatagccggaggcggcagctgccttgggccgtccccaccttgcttcccgttgagcctttggaatcctcatcccttcaggaccacccaggaaacgtggtttgagtggaatggtggctgctctcagggggtaggaaatggactttggacactaaggatttggacagaaggtaagagctgggccatggacttggcagagcagcgacttggatggaaggaagaaggaagctacaggaagccatgaggcaccaaaaaccaggctgggcagggaacaggggtggggcagacaggggcagcgtgtgcccgggctacagacagggaacaggggtggggcgggcaggggcggcgtgtgcccaggtacaggcaggcaacaggggtggggcaggcaggggtggcatgtgcccgggctgcaggcagggaacaggggtggggcggacaggggcggcgtgtgtctgggtacaggcagggaacaggggtgcggcggacaggggtggcgtgtgtctgggtacaggcagggaacaggggtggggcgggcaggggcggcatgtgcccgggtacaggcagggatgaggcccctctcctggccttgccctccctcctaaggctttcttgaaagccagggcctcgctgtgcttggaccctcccaggatggcccctgccccacaggcaggtccccaggtcctctcgtctcaggcacccctgcctcctcctgccctgggcacgagcacgcctgtgtccagaaccaggagggctgctgggcctgggggttgcacctgattagcagctctgggcttcactacttggatcgggggaaggggccggggcaggtctagcaccaacctgtccatcagccggccctgcaggagggtggggaggaggttgaggccatcaatggccctgtcgctgggcggcgtcaggcccgcaagggccaggctggtggtgaagaggtccatgatgctgcccagctggtggctcacctgaaacacatggcagcaacacggtcagggcactctgcaccgacccgatggggctgggggccaatccctgggggggcgtgagccccgctgcccagctgggtctacagatatgcatacatgctcacacgcccacagcagggactgagcggggtcacaaggcctgtgagagacagaggagcctcaaaccaggcccaaagaccccagagccaggccacgccctcactccctggcacccttctctgcctctgtggatcagatgaaaggagaatcacagccctcccagggagatgcccctccaggcccacctgtccggagaggatcagcctcgctctaacactgaatgccctaaggccactgtgagccctgccccttaagtcagaggagcaggtggagaaaaaccagatgtggaggggcagctgaggctggacaggagcagctccgagtggctggggtggggacggctcctgacacacccagagagctccaggacaggcaggaggctgtctttcccgccgtgccttgacctccggagggcgtgggcactgctgaccagccatgagcagagcgtgccatctggcttccctcagtggccctgtctgcttcttgttttttgtttttgttttttgagatggagttttgttcttgtcacccaggctggagtgcagtggtgcgatctcagctcaccacaacctctgccttccaggttcaagtgattctcctgactcagtctcccgagaagctgggattacaggtatgtgtcactacgcccggctaattttgtacttttagtagagacggggtttctccatgttggtcaggctggtctcgaactcccaacctcaggtgatctgcccgcctcagcctccc

SEQ ID NO: 29634 - DNA, 996 bp, Artificial sequence
  DNA replication origin
cgagtctcatgccaacgtctcccagagctacacagttcctgagtctcatgccaacgtcacagtgttcactgagtgaccaccggccactccctgcaggtgcccccacacaagaaaccaaatggcccatccctaccctcagggggatggcgctcaggggagtggagggggcggcacagctgcattctgtcctaggggcaccccacaccacaaaggaggccgtgcccaccacccatgcttctcctgcacaacaaggcggtcactctcacagccactctgcccttcacacggagccgcagctgccttttcagtgaaccgtggggtctcttccaccttcagggtcctgggaacttggggtggcccaggagtcccatgtcagacaaaggctgccctgggcagggtctgagggaggcccagacagctgtagagaacaggcgcccttggcagttgccgcccccagtcccactggctgctggggacacaggggactgcccaggcatggtgggcaggagtgcaggatccacagccaggcgcctgctcccacctctgctccctagtaattgggggaccctgacagacgacttcctctctggcctcagtttcctgatgtgtagaatgagtggggaagaggaggatctggcagaacagcagccaatccctgggccttcaggcgcgcgaccaggccaggcaattgaggcggcagacacaacgcaggccgctcatcagcgaggctcgaaacagggaggccagcctgggtgagcagggggtggggtgggacacagccacagggtcctcaaaagtggaacaggcgccgggcgcggtggctcacgcctgtaatcccaacactttcggaggccgaggcgggcagatcacgaggtcaggagattgagaccatactggccaacatagtgaaactccgtctctactaaaaatacaaaaattagccgggcatggtagagcatgcctgtagtcccagctactcgggaggctgaggcagga

SEQ ID NO: 29635 - DNA, 2319 bp, Artificial sequence
  DNA replication origin
aaaggcagggaacagaacatctcctggagcctccagaaggagctggccccacgcacgtcttcactcagccccatgagccccatgttgactctggctgtcgtcatgtgtgatgttccagctgccactgggagccccccccatcctcgtggggccacttgaaggggatggctgcctctggaggccattgggagggcaaaagactaagaaacagtgaagaaacagcggtcgtttacaaacaccagactcagccccgcgtgttgatgggtatgtctggctcaagtgcctgttacagaagaccacacggtgtgattctcaaccgaggggcagcttcctgggccagaggagatgcagtgacagcatgaaggtggtcacactgagatggcagggcgcaccctcgcccagccaggacccaggccaccaccgaggtccgcaccccatgcggcagacagacaccaacggtctcgtgtcgggctgctgctgttctctgagtgtccttaggacactggcctgagaagatgtgctttgggggaaaaaacgaccgattctgtagtagacagacaggtttttaaacactcagcctgctctaagccccttctagaagctcatggtgcccaccagcatgctaaaggcactgataagtcctgcagggaagaaacctgtttagctccatttaactcaggactgctgcggtgactggaccacggatgtctcctcaccacacagtcattaccagcacccacgtgacacacggcagtatacgtggctccagtccccaccgagagccttcctgcctgtctgaccaagcacagcaagccctacacaccgagagccaccgagagggacctggttccgaggagagcggtgaggccgagcacggggtgcgtggggaggagagcggtgaggccgagcacggggtgcgtggggaggagagcggtgaggccgagcacggggtgcgtggggaggagagcggtgaggccgagcacggggagcgtggggaggagagcggtgaggccgagcacggggtgcgtggggaggagagcggtgaggccgagcacggggtgcgtggggaggagagcggtgaggccgagcacggggtgcgtggggaggagagcggtgaggccgagcacggggtgcgtggggaggagagcggtgaggccgagcacggggtgcgtggggaggagagcggtgaggccgagcacggggtgcgtggggaggagagcggtgaggccgagcacggggtgcgtggggaggagagcggtgaggccgagcacggggagcgtggggaggagagcggtgaggccgagcacggggtgcgtggggaggagagcggtgaggccgagcacggggtgcgtggggaggagagcggtgaggccgagcacggggtgcgtggggaggagagcggtgaggccgagcacggggtgcgtggggaggagagcggtgaggccgagcacggggagcgtggggaggagggtggtgaggctgagcatggggtgcgtggaggctgagcacagggtgcgtggggaggagagcggtgaggatgagcacggggtgcatgggggaggtggccagtgaggggcgcacacaccctgggatggctgcaggcctggacctgctgcccggcagaccggtggacgctgactcacctggcctgcagtgacgtgccctggccaccatgcgagggcaggctccctcatccctccttcaaacgtggtctgcttcccacacagaaaggggccgttgctgccacctgggagagaggggcccttgtcaggccactgggaccagatgtccccaggccctccccctccctccccactgagtcactgagactggtcatagggacaaagggcccggccaaggcactctggctggagtgcatgatccgagcctcggggtggctctccaggggctcatctgagatgccgcggctgcaaagtctcctggagaaagtggggacatcatgcccactgaggaaatggaaacacaaccatacggtgtcagcaagactcagagaggtacactcccgcagcagaggccctgggtgccacgtgcgcagctgccgactggtgcttcccgaacgtgaatgttcacaagcctcccggtgtttggggtacttaaaatgcagccaacttctggcctccccatggttctgactcagtcagtcacggtggggcgtaggaatctgtgtttctgacaagcccccaagaccggattttggtttctgaaccatcacttgtgggaagtggtcacggggcaaaggccatctcaggtgactacaccatccctggctcactcccagacatggaagaagggggtggg

SEQ ID NO: 29636 - DNA, 1117 bp, Artificial sequence
  DNA replication origin
aggggccgggctgcctccatgaagatggactcctgcccccaccacagccctgtcaagtggttcctgggatggagcttcagcctttcccccgctcggcactgatgaatgcctgacccatccccagcgccaacaaacctgaacccgcctcttcccagaccacgcgggggggggccctgcagcctcttcccagaccacacggggggggccctacagcctcttcccagaccacgctgaggggggccctgcagcctcttcccagaccacgcggtggggagagccctacagcctcttcccagaccacgctgaggggggccctgcagcctcttcccagaccacacggggggggccctacagcctcttcccagaccacgctgaggggggccctgcagcctcttcccagaccacgcgggggggccctgcagcctcttcccagaccacgcgggggggggccctgcagcctcttcccagaccacgtggtggggagagccctacagcctcgtcccagaccatgtcggggggcgcctacagcccagtgtgctgcggggattgggggcttcagagtttcaagtgatagaaaccagcacagctgaaagccaaaacagaagcataggctccctcgcgccacgtcccaccagatagctcccctgggtgagcctggctctcgtgcaggccctccggacagctccatctcccgcccactggagtcagacccacgagtcgaggcccccaacagacccatgtgtggagggctacaggcagctcccaggaggcagggtgctgggtggggggagggtggtgttggccgtcattccccatggggagcccgggggggcccacctcgacgccagcacccacaaccaccagccagcaggggcaagggtcccagcgacctgagtcttcatttctaaatgatggaatgtttcataccaacaaatggcatgtttcataccaacaaatggtatatgtacctatttgtaacaagatgagaacccacacacccagcacccagcacaagactagaaacagaacatcccagagaaagaaagcaggggagggggctgggcgtggtggctcacacctgtaatcccagcactttgggaggctgaggcgggtggat

SEQ ID NO: 29637 - DNA, 1487 bp, Artificial sequence
  DNA replication origin
gggaagaggctgtagggccccccccgtgtggtctgggaagaggctgcagggcccccctcagcgtggtctgggaagaggctgtagggctctccccaccgcgtggtctgggaagaggctgcagggcccccctcagcgtggtctgggaagaggctgtagggccccccccgtgtggtctgggaagaggctgcagggcccccccccgcgtggtctgggaagaggcgggttcaggtttgttggcgctggggatgggtcaggcattcatcagtgccgagcgggggaaaggctgaagctccatcccaggaaccacttgacagggctgtggtgggggcaggagtccatcttcatggaggcagcccggcccctgggtgaccaggtccaggccacactcacagggctgctcggggtctggggtgccggcccccacctcagcagggacaccctgctccaccggccctgctgtttccatgcggcctccaaagcctccggcctccggggtcacccttcgggaggcgtcagcctcttccaagacaaaccctctcccctgtgtcacctcctccccacccccaagttcaaggtcactcctgcttccaggttagtcctgggccagaagggccttgctcgaggctcggtgacatctgctcctcccgctggacccagagggacccttcatgctctgcccaccacagaccccgtgggcacagccggtccaggcactcttcgctgacacgctggctgtggggaaaccgtgagaagtgacagcgagcactcaccttgttcgggggcggaaatgagggcagcgccgttgtccgacgtgaagaagacgaaggtgttgtccgcgacgtgcaggtcttggaggagctccagtatcttcccaatgctgtcatcaatctcccggacggcgtctccatacctgcaggatggtgacaaaaggcatctccatacctggaggatggtgacaaatggatcaggcagccaacggcatactgtgattcacggagttcattaaatcataacttcacagaccacagtgaaactggccggcctcttcccagaagaggaatggcctcagttcaagttcatgtggcttatgaaggacagagccagcacccccaccacagccctcctctgctgatcccaggccagtggacggcttcaaaggggtggggttgctctggcctttccataattggcctaaatgccacggtactgagtgtcccatctctggagtcaagcacagctggggcctccagcgaggtctatgctccatggagccaggactcaccgccctcgctgactggtgcccaagaagggtttggaggcatagacgggtgcgtgcgtggcgtcgacagcccagtagaggaaaaaggggtggtgccgtgcctgtctcttaatgaagtccagggcttcctatggagagagccacaccgtcgtcctccagcctcaggccgacctcctcatgcctcccacggtccccgtccccacacgtc

SEQ ID NO: 29638 - DNA, 2958 bp, Artificial sequence
  DNA replication origin
tcccagcagggtcccctctcagggcagtaggggtgttgtcagccatgactcagacttccctgaggcccctcacctggactcaaaaagaggctgcttgatctgcatgaagccacgcgggtgtgcagggcagggacttgagtcccagagggccgcggacactccctgctccaggtcacctgctggtgagtgccaggccccactgctgctttcggacaaggacgttgagctgacagcttaatttgtgtagcgtcctgcccatgtgcttcccctgagcaaggcctttgtgctgcggacgtggaagcacgagtgtcccctgtggccgggcggtgacctgcggacgttggcgcacgagtgtcccctgtggccgggcggtgacctgcggacgtgggcgcacgagtgtcccctgtggccgggcggtgacctgtggacgtgggcgcacgagtgtcccctgtggccgggcggtgaccagcggacgtgggcgcacgagtgtcccctgtggttgggcggtgacctgcggacgtggacgcacgagtgtcccctgtggctgggtggtgacctgcctggggtgttcagggatgtcggggtgctctagcaatgggcccaagtgctgaagacccaaaggaaacagcccggagttggcagccaagggagctctgaggtcacagagaggtccaggcgtgcttacctgagagaggagatggggagaggcagctcgggaggtccagggtacagaggccatgtccagggaggcagcagaaatctgctgtggtgaaatctgcctcggggaaatctgcgtcggggatgctgctttcaaagccgtagctgcagaagaactttcctcagacgacacgcaactgacgtgagacccgcccacggccgtgcctagaagccatctcataccacctctcctgcagcccgttctgaagagcagccgcaagctggattcgttccaggacaggacaggctgcgcaaggaaacccggacagctggcctgggggccagggcgagtgggcacagaggtgtggcctgcagggctgctgtgggccggaggatgagattaggtgccaccagagggtgggagcacaaggtctgcgggggattgtcagaaggggagtgcgggacggggtctggaggggttcccacaggcctggggtgtgatgcctggcgatggccattcccagcaggtgaaccccggtcccaggagagcggttggtggaggtcaccagtgtggccacactgtcacgttctcttgtcgtcactctaatccctgcctctgccagggtcctggggatgtgggtacagctggcaggccccggggctcccgcacggcacacaacgccccgcccagtcgtcatcctggggccattgccctgaactgggagatgagactctgagcgcctcggtgtggagagacccagtaattacctggcaggaaatattttctgccctggaaaacccagaggagacacacttgggttcgaggcatgacccgcaaaactctcctgggagttcagaaaacgtggaaggaaggagccggggccacgaggggcatgtcaggcgggttccaggcggctgggaggctcctcacgatgcaccacccttcaccgtgcagggaaccccggccgccgccatgcctgccgccctcggttgtgcccagacgctctgcagggtaggcgggcagtgccagcaccctcctcgggtgaggccttggtcttttgtccctgccgtgcccaggcatagcccatactcagtgctggagggtgctcgtcttaccaagaattttgtgaaggtggtatctgttgctgctcagaacttccgagtgtccccacgtggggtccctgaagtgtcctgggttcctgtttccaggcatctgggtcacaggccccagttccaccccctgaagcacggatttgatgagtggtttggatcccccaactgccactttggaccttatgacaacaaggccaggcccaacatccctgtgtacagggactgggagatggttggcaggtaatggagccccaccccttcccctcccacgtcctgaactgctgtgcccggcgtgcctgccccccgcctctagcactggtgggctcaagtcgccactcatgagggctggtctgtccctgggtccccgggcaccgagggctttggtttggtggcttctgtcccaccaagttttgccccagagcctatgagactcctgcctggggtttcccaccttttcagggtcgtagatccctgtagctgtcctgagagaggaaggcccccagcagagcgagcccacacggtctgccctagctgtcagggtactgcccatgtggtctacgggtggggaggccggctgtgctccagacatccagggacatgggcaggacaggaggtgggatgaaacccccactgggagccacaccaggagcaaaagccgctgtccagacagagccgtcctggtgcccgggcgtgggggcagcacctcttgacacggcagtgccgggtccgggaccctcatcttttgtgaattttattttgcttaacttgactcttcttggcggaagtgctcattcattacatgacggtgaccagaagcagcaccagcttgctgcctctttctagatagagccccgtggaggtgtgggagtcgcaccacgcagcccccatttgaagtgtgcagttctgtggttggcattagtcacaggctgggacaaccagcactgtagctgcttcagaacgagccccatggcctgagcggcggctccccagccccagccgagtgaccacagccgcctcactgccttcaccttggtgtcgtgccctcagccccattcccccatcttcccatgtggcaggttattgcagcaccggcctcagccaggtcatcagatgcaagaccgtgccctgggggagcgagggatgcgtccagcttggttgttccctgagtggacatttcatttccaggct

SEQ ID NO: 29639 - DNA, 3417 bp, Artificial sequence
  DNA replication origin
ggtgaggggcctcagggaagtctgagtcatggctgacaacacccctactgccctgagaggggaccctgctgggatagggacccccccacctgactgagcagccgctgtaggacccagcccgggccatccagccactgcaccatgtgcgggaggagcctggggctctgaggtctgcctggctcctgctcccactccttggggtcccctctctcccgtcgacagctgttcaggagcctcgaggcctctatggagacccactccctgtctagctctggccaccggcaccaatgaccatgcataggaggccgctgggcccaagacagagctgccaggccaggcggagagctctgggtcactgtggggcttgtcacttggagaggccaccggctcttcctcctgttggcacagtactcacgcgctccagtggccctcgggggctgacttccgccatggcccctggcactggctcagggactatgcaggctgcgtggggcccaacctccctgtgtgaggactctgcagctgctgtgcccatcagctctgccctgtgctttctgagagctcagctcggcaggctgcttcctctcatctgaagaatgatgaagtgctccctagacagcctctgggtcctcctcatccagtgatcaagctcagcaaattcctggctgccatgaccatctacatccaaggagcatccatctgaaggggaccggcaggagccacaggcagccgactggggatcacagaggctgggaaagcagcaagggcttcctggaggaggcggcatgcggacctgacaggcggggaacgctccaacaagtggagagaaattcgggacaggtgactcctacccaaccctctaggctcactcaggcgtcccagggagtaaaagaaatgaaacatcctgtgcgcctaaaaccgcagcgtgggggctgtgtagcacccaagctctcatcagctcaggatttcatcaactgctaggctgttactctccttcctggtggcttctttgtggtttagaccagagctttcaccatccaacaggcccctagggtggacaggcagctcctccgccacagctcctgtgtgtaatgacgtggcccctccaaggacgacgtggcaggaggcagccggggggcagtggtggcgggtgctaggggctgtgactcgagggatgacggtgacaggcctgcggagtctgatgccgcaggatactcgcggccgtgggaccagcctggtgacctgagatcctgctggcaaggtcacgctggcctgcacagggacgctggagacacctgaacacacccagaatcagctgccgtttcccacccaagacaccctcctcatttggaaacttgtggccatgtcccttggaaccaaggccaggaagtggatggagcaggacgcctgggcaggcgtggccaggagacttaccacttgccgacaatcttgctgacgtagccggccttcttcagaagctccggcaggagctgctccgagtctgggatgccgcccacaatctcctgcggtgtgtaggctggaagagcagcgctgggtgagccccgaggagaccccgagaagctgccaccaaccccatcctaacaggacactgggggctgcgtccacacatcctaacaggacactggcccctcggggtcaaaggctgtgcctgggggctgcgcgtccacagggcatggcacttcccaagatttttccaggcacccctcagagccagtgccatcaccagagggtggggacggggcagactccgtgccccccagcgccttccttgggactcctgcccaccctcaggccccaccctgcctctcaggccagcctcccacctgcctggtctccaggggtctctggaatatgccacgtgatgctgcactgccccacccctgcctcccccgtccttccctttcctcaaatgccactggaaatcccacttcccctgtgagatgcccctggggagcccatccaaacccctcaagcacagcgattccagaacattccagaactgccgctgatgccacagccccggcctccctgtgggtgtgcggctcacccgcctggggagtgggagcttctggggtgggggtgccggctcagctccttaggccagactgggcaccctccgctcagtccccactgggccagggcagggaaggaagccagctaggggggcctgcacttccacctaagtcccagagacccaggcaccagcggtaccccacctgcagcttgccacccgagtcccggagacacgggcaccacccgtagcccacctgcccaaccctgcaccccaagggtgtccctggaggcggtgggcagcctaccgtttctggcatgggcgttggtggtgtagaagccattgcggatgggtagccgtcctgtgagcagtgccgccctcgctatgtggaggtgacagaaacagaaactggataagaagggtgtggctcagaccccgggcgtcaacaagagccccaacgagtagacagacgcgtgacagacgaggcacgcgcaggtttacaaggggctgccacgcctgtcaatccccgttagcgtctccaccacctgggtggggcacggcacccattccactgaaagacgcgtggcccttgggccctgcagctcagcgttgtccccaagaccccgcctcctttcgcaggctcctgggacacccactgggcgtgcaggtccacacgcccccatcctcgagcaccagccccgtgccctgccttctcctcttcctcacgatcaacaccacatgtttctgtctccagcaggagagactctccccagggagggagggagtgggactcctgcttcccaggtaccctgagacggagccacactgcagcacctctccccaggcggccacagcactcgactctgggaaacagaacagcagccaccaacaataccgcaacttcgaccctgaaaacccagcaggtgccgcaccccacatggcacggagccgggctgggatttgatgagaaaggcctgagcccacctgccaccctccctgcagtagtaggaatagacaaggttgatgcagccgcccagagtcagggctggaaggacccgggaggcctcggcctgttgggctcaccccttcctgggggcgagggccccgctgacttacatggcgagcacagagggttggcagaatagaagtttgggaaaagcagcccttctgcagccatccggtccaaattcggggtctctctggagggctctccatacaccccgaggtcaccccatcccatctgcagggaagagcacggggaggaggaatgagcgccttctgcaggtgcttctggcctggggagctgcccatggtgccaagagcgtgtcggggaccgtggaagccagcaccaccctgtgtcccagccagcggcagagctcggccaa

SEQ ID NO: 29640 - DNA, 1187 bp, Artificial sequence
  DNA replication origin
cagatgtagtgagctaagatgaggtcacgctgggccagggtgggccctcaatcctatgactgggcccttagagacgcagacatgcagtagagatgccgggtgaaggccgaggccgagactggagtgacgcagccaccagccaggggacagcaaggaccttcctggagagcctgagggggaggggcccggctgacaccttgattttgcacttctggcctccagaatccggcaagaatccatttccgctaaggccacctggcctgtggtaacgtgttatgtctcaggaaactcacgcacgtaccgcggcacactacccaaccatcgaaaggaagggcaccccacaccgcgcacggccctggaaagcttcatgtgagggaaggaagcagacacaagggccacacaggctgtgatttgctcattaagcctccggaacaggccggtccgcagaggcaggaggcggctgagtggctgccggggctgggggtgggtgctggggagggcctgctgatgagtaccggtttcttcttgggatggactgtttggaagcaggtagaagggatggaggcaccacgctgtgaatggactgtgcccgagtggtgcacgttaaggtggctgtcatggtcaattttacgttctgtgtattttacaataaaaaccccaagcaggaggacgggtgagcacagggcaggaagcacggaggctggggtgatgccaggaggccggggtgatgccaggtgtgatggcaccagcacagcaaatgcccacggcaaactccggaggtgagtggcagcggcggtgttcactgaaaacttcttcaaattttacagtgtgtattgttggaaaaaagtgcttttaaacaggcagtgggccaggactttgctctagaaggagaaggggagggcaccgcctggggctttggctctcctcggatcctccagccgtctccctgagcgcccacctcagcaggagcctggtagaagccaacactccgaggcccctctgtctggcctgtcttccttccttaaggacatattccctcctgaggtgctccaagcaccaaccaagacaccagtgaagtgactgtgcctgcctgggcccctgccctctacaggccgccttcagcagcttcggcagcacaaacacacaacacctgggaaagacaacacattctaaacacaacgaccaag

SEQ ID NO: 29641 - DNA, 749 bp, Artificial sequence
  DNA replication origin
gacgtgagtgcgggcggtgggacggggcagggccggggtggggcggggaggggaggggcggatggagggaggagcgaggtgggggaagggcgggcggggtggggggagaggtgaggggaggccccttggggaaggggggaggccccgcgcggggaggaggagggggaggggacggggggtatccccgtgcggggagggggaggcccctcggggagtggccgcggggtccaggcgtggggtctcggcggtcaccgatcaccacacgcgctgccactgtgctgcatgaccgggacagcgtcctccctggcaggtgggtggccggcgtgctaccgggccctgcctcccccgtctgacctttcccgccctctactcttgggaaaggtgggcgcgcagcgtggcctccccaaagggaggaagaggctgctcctgccgccctgcctgagagctgcgtcgccctaggaatcactcccgccacctcgggccgccgggtccccccgctgggctccagtcttacctgacggctgtctctgtcctctggagaatgctgagcgaaggtcaggtgtccctaaggtctgaagaactgaaaggctggaatgtctcctggtgggcaagtgcggggtcaggggtcacagccagcctggaggcctccttccctaactccttgtgggagccacctggagactcaggaatgagcctgcctggggcatgggtcaccgtgcaggaccccagacacacctgggttgaaaccc

SEQ ID NO: 29642 - DNA, 928 bp, Artificial sequence
  DNA replication origin
tcattctctatgccgcagtgggcactgccttcaggggatcccagctaacctaaggagatttatgtgttgtttgcaaagcagcagcagtagggtgggcggaaaagaaaaaatgaatcagaaaaatgggcctgagcacagcctgccgatcaagcctggcacctgggcacgcctctcaccttctcctggaggccactctgcctcagcccacctctaactctgcatggctcacccaaatacagcaccctcaatactggcttttcttcaccttgacagtgacccttttactaaacccttcaagactcagctcaaattcccttcatctctgcatttctgaccattggaagcccagaattaacagcttctttctcggtctttcacacaccaccatttaccctgtgtgtgttcagcactgggtcctgcacaaatacagtgaacaagagtcctcgctaccctcgtggggagtgatacctagtcaataaacccacaaacaagcaaatgatcatcttggccaagagggaagcccatgagcagcttagcagcagccaccgcccagcagggagcggtctcgagtctggtctcgggagaccctggctaggaaatgaaggctccgtgcagcaggagcgtgtgggcagccacccagctcagtcttagccttcagaaaatgctttccagttgaaatgtatgtgggccagtaaagaggatgggagctggggagaggtgttccgcgtgcaaaggcccacaggtgagagggcagagcatgtccagggagctgcagaattgtttggttggagcggagagtgccaagggttatggggggaaaggatcccagagcaggttattcagacagcatcctaaggcaacgagaagccactgcagaggtctcaggcagaggcgtgacaggatccgatttgtttttaactcggctccg

SEQ ID NO: 29643 - DNA, 1343 bp, Artificial sequence
  DNA replication origin
ccagcttcctattccctgtggcagttttatcttctgtggaaacgcagagtcgctgagcgtggggctacgtaattctcttctctacccccaccttccacatttcaaaatgtgcatttggtgactgccaatcagagattcaaaggaacgctaccacttgccttttatccgccctcccttttctttccttcctgtgttcccctcctgcccgctctttccctttaagtataaaagtctccaaaccctctttgggtttttttgtttttgttttttgagacagtctcactccgtcgcccaggccggagtgcagtggcgcgatctcggctcactgcaacctctgcctcccgggttcaagtgattctcctgcctcagcctcccaagtatctgggattacaggcgcccgccaccatgcctggctaattgtttttgtatttttagtagagacagggtttcaccatgttggccaggctggttttgaactcctgaccttaagtgatccgctcacctcggcctcccagactgctgggattataggcgtgagccaccatgcccggcctccaaaccctctttggaaaaagcagagcacagatgttgcctgtggcttcgtgtttctttttcctgggtgcacccttaaccttggcaagatacacctctaaactgattgattgagacccatctcagacaccttctggcttttacagaggtgagaacagactgggtgcaggagcctgggttcccaggctgtggcagcctccatgtccacctgctccccgagcccccagcccaagatggaggaagggccgccctgcgtgggtggtgcatggtgcagcagtgcagctccagcctaggccacgccctgtctctctctcctcccccagtcccaaattcccaggaatcccagccccactggctaaacaccggggtgcagtcacagagaggatggcctcggcctgggggtaggagctgtgcagggggccccgtctcccaccaccaatggcaggggtaagagccatgcatgaccccctggccccgagtccttcacagagtgggtgggagacggcagcactggagatgaaggccagagcagactccagcagccgcggtggcaggtgcagagggaggcgcaagggcggacacgggtcacctcctgctgcaaccctgcatgggtgaagccaggtgcagacaccaccggatgcccactgaattccgccacagtaactcacgccgtcactccccacggagaccccgccccacaataactcacgccgtcactccccacggagcccccgccccacagcagaataattctggcctcatggaagtggctcccacctaaaagatgaccc

SEQ ID NO: 29644 - DNA, 799 bp, Artificial sequence
  DNA replication origin
gggagagggcggccctgcagcgtcgcggccctgccagggaatgtgctcaccctggcgccctggtcggggaccctgggcaggtgtgtgggccgccacccagtgtgtgctcctggccccggccacccacctggagctccaggtggccccaactggccagagctgttgcgaggtactggtcccacctgctcacagcacctgcagcagaattttatctgcccctgcaggtgtctggagcagtcctggactgcgctgggtatggaagaggctgccgcccaccaacaggttcccttagggcaacagctgaggtcatggcaggagcaacccttgtcactggcacacgacggggggcagctggtgccactctggggtccgtgggtggagagggtggggtgggatggagggacggctgtgtgggtggccagaggacacacagaggacacgcatgtggggcgcgtgggggtggaggggtgggtgggggggaagggcgggggctgggggtggggaaagtgatctctgggatactggacagatggggcagaagaaaacgtgatgagagagaagaaccagtcactgggggccgggtggcgccggcacgaggacggaggggccggcatgcacatggctgggatggatggggatcgatgctggagtcaggctttggtgtcagcttgaggatctatttggaaaaactggcaaacagaagccctttaggcccatcttgatccctgtcactgtgtcgtttgggtgaaccccccatccccgccggctctcccgccagccccccatcactgaacctctc

SEQ ID NO: 29645 - DNA, 868 bp, Artificial sequence
  DNA replication origin
gtgagtggctgtatctggagcatggcccgagggctgtggggctttggagtttctctcttctcacctggtgatgacgtggctgggtctgaatggcttggttgaggcgtgtgttggggattcgggtggccagacccagccctgactggcccctctgcccccacccagagctgctggaactgcgggcggaaagccagtgagacgtgcagcggctgcaacgcggcacgctactgcgggtccttctgccagcatcgggactgggagaagcatcaccacgtgtgtggccagagcctgcagggccccacagccgtggtggccgacccggtgcctggaccgcccgaagccgcccacagcctgggcccctccctgcctgtgggtgctgccagccccagcgaagccggctctgcggggccttctcgccccggctcccccagcccacctggcccactggacaccgtgccccgctgaccccactggcccctggcctgccggacacagcaccgtgccaaccccacccagctccaggcccaccggatgctgtgcctggcctccgatgcctggcctgccagacactgcgccccgcctgacctgggggagccgaccaattagtcactgctgctactgcccctctccgaaagaagacacagaaccaacaaaaccgcattcagtgcacctgcctcagctacctaatgattccgcgcggagacctcctgacaacgtctcttcaagcatcctcagaagcctcgactgagctttagacagcagagcagatgccgcaggcgcggcggctctgcccacctctcttttcctctctgtctgtctctccccctctgtcttctctatcctctctctctctatgactatcacacac

SEQ ID NO: 29646 - DNA, 906 bp, Artificial sequence
  DNA replication origin
taaagctcagtcgaggcttctgaggatgcttgaagagacgttgtcaggaggtctccgcgcggaatcattaggtagctgaggcaggtgcactgaatgcggttttgttggttctgtgtcttctttcggagaggggcagtagcagcagtgactaattggtcggctcccccaggtcaggcggggcgcagtgtctggcaggccaggcatcggaggccaggcacagcatccggtgggcctggagctgggtggggttggcacggtgctgtgtccggcaggccaggggccagtggggtcagcggggcacggtgtccagtgggccaggtgggctgggggagccggggcgagaaggccccgcagagccggcttcgctggggctggcagcacccacaggcagggaggggcccaggctgtgggcggcttcgggcggtccaggcaccgggtcggccaccacggctgtggggccctgcaggctctggccacacacgtggtgatgcttctcccagtcccgatgctggcagaaggacccgcagtagcgtgccgcgttgcagccgctgcacgtctcactggctttccgcccgcagttccagcagctctgggtgggggcagaggggccagtcagggctgggtctggccacccgaatccccaacacacgcctcaaccaagccattcagacccagccacgtcatcaccaggtgagaagagagaaactccaaagccccacagccctcgggccatgctccagatacagccactcactgggccattttgcgggacggcatcccactaccgtgtctcacgctccagcccacccagataggtctgcgctgtgctaactggacaacgacccctgcctcctctccaggaagccctcctgagctcaccaggctccaaaaccgcaaaaccaaagg

SEQ ID NO: 29647 - DNA, 829 bp, Artificial sequence
  DNA replication origin
ctcccggtgcacacggcaggcctgagaattacgatgcttgtgcccgtgcacctgggaggcaggcgggggcagaggaccctccgcgacccttttctgccttgtccacgaagaggggacagggagagaccctttccaggggagccccaggactgtcccttgagatagggcggatctctatctgaagcccctgtgtgcatctgtgcctgggccagccccggggtgggaggagatggagccccatcgattcaggggtctctgcaccggccatttccacgcctgctctcagctagggagaagctagaccaccacaggcacaactctcacagagctggcactgagaaggaaacaccaaacgcagaagtgaggcgtgcagtttcgggaggtggaagtgtgtggggagtggggctgtggaggcctcacggcaggtgacacctgagcagatgccgggaggaatgaagctggccacgcaggcatcgggggagcgggcccagcggagggaccggcaggggccagggcctggagcggggactgtgcctggcagtgcctagtccgcagggaagctgctgctgcagtggcagtgagggcgaggtggggtgggaggtggtaccagaggctttggaggccaaatagggacctgggcttctcccctagggcaggtttgggcttcccaccccacagcccaaccgtctgtgagagatccagccaggccccaagaagaaatatgctcaggctttgtgtggcatctcctacctgctctgcccacaggctttttgtggcatcccccaccccctctgcccacagggatgcctagggcacaactcaccctacg

SEQ ID NO: 29648 - DNA, 1003 bp, Artificial sequence
  DNA replication origin
atgcagattccgggtgcgcccctggctgaccaggccctggggtgggcctcgcccttgccctgcaggggtgcagtgcctggggagccgctgcggtagagtgcaagctttgacttgtgacaccacgtgacccagctttgcacacacatgcctgggatgcctgtgtttatttgcatgcacttgtctgcacaggcatgagggccatcaacgtgtgtctgtgtgtgcacagatgctacgtgtgttcagctgcctacagccccatcaacatgtgcctttgtgtgcacagatggtacgtgtgttcagctgcacacagcccctgtccccaggttgtggccacgcgtaggaagtccagagacccatctgggatggcccatgtgaccgccagccctgcccatgtcctttgcagaagaggccgtgaatgaggtgaagcggcaggccatgtcggagctgcagaaagccgtgtcggacgcggagcgcaaagcgcacgagctcatcaccacggagcgtgccaagatggagcgggccctggccgaggcgaagcggcaggcctccgaggacgccctgacggtcatcaaccagcaggaggactccagcgaggtagggccacccggccacgctgacacccatcccctgcctcggctcccgtgcggtcccacgccacccccatgaggattctgagcctccacgtggcatcagcacagttgtcacgggcatcctgcagcaggcacgccatccccgcccacactgtgctttatcagcacagagatcccacatggttcagtgaggcgtcctatggatgtccccgttctgtagttccagaaactgagggctcgagagggttggcagcttgtctgaggtcacggccttgggaagcggtggggccaggactcgagcccaggttggctgatgctgagatggagtttcactcttgttgcccagactgaagtgatcttgttgctgtggcatgacctcggctcattacaacctccgcctcccgggttcaagc

SEQ ID NO: 29649 - DNA, 1331 bp, Artificial sequence
  DNA replication origin
caccaggcagaacagtttcgcttgagaaagaggcacctttttcactttgtaggaaaacacgggctggtctgccaggaagcctggagctcagagcgtctggtgggccagaggctcggagctgggaggccctgagggtctctgcttctccgcctcagcgacgaatgctgacacaggagaggcccaggacacacacggctcccagccgagtccaaggtccacagctccaatgccccccgtgcccgggcactgccctgggtgcctgagccagaccttgtccgagggcacctgggcctccccccagggacgcacacactcacgccctgcactcagggcccagccagggtggggagggccccagcgtgggaggggcagccgcgtggcccatcctgtgtgacgccggcccctgtttcagacgtgcctcgcgagttcctgccgaggaccctcaccggctacgtgcctgaggacatctggaggaaggctggtgagtgggggtgcaggggcctggccagcagagctgtgggaggccagggccccagatgcgcctctcaccggctcagctttgaagagcttctgtctctctctgggggctcaggctacaaggctttctgcattccgctgtgtggctcacggagaggtcagagtaggttcacacttagggcaggacagctgctacctgcgcctaccaggaaacggaccggtggccgcccagcagaataaagtgggtcctggacctgcacacccaggagggcacgcagaagcgcacacactcggagcctgggcgcgtcaggcacgcggggccagagtccgggcagaatggggtcagaacaggggcagacgtggagctgagcgctgggcaaggctgtggggacatttgctcatgccgtgggaatcagccttgggggaggggctggggcagagccagatatgtgggcagcaagaggggttagggttggggttagggttagggttagggttgggcagcggtaccggggtctccagctggcctcagggtctctttcagtggtggagttgaaacatggcctccccagctgcgtgggcagtgctccctggaggctgctctgagcctaccccatcttagcacagatcaggatctgtgtgtggctgtgtgtgggtcggggagcatggtcttcagaggccagccaggttaaaggatggcaagtgcggtgaggataacagcagggtctggggtgacagcacagagccctggacgagggggcttcctgggctgcgtctgggtggggccagaggtgaaggcggaacggcagagttatccaagtgcttcaggtcagcagcagctcccccggctcgcg

SEQ ID NO: 29650 - DNA, 1685 bp, Artificial sequence
  DNA replication origin
ggctctgcctcagggacctggctttccgcctgggctccccttccaaaaagcatgagggcgaggggcgaggctgacaacagtgctgggaggggtgctggccccatgcctggcgacccctcctgggacgtgctgcaggatggggtgggtgggttctgaggagcccagttccgggccgtccccgaacacgtcctgcctcaaagaggcctcggcactgcttttgcccacacttcttgcaagactcaggatagactctgggaagagccagtgagcagaaagtaagtggagggaagcaaggcccgccatgagggttttaggaatcctcctccctgggcctctcgagatgcctgggctgcgctgacagctgggaggaggggggctcaggtgaaggacccagccgctgcgcagggacggcgcaggccacacaggagggcactgagctcaggggcgcccacacagccctgctgtctccagcagccccaggccccatggggcagagccatggccgtgtttatgcataggcatacaggtgtggctgtgtggggacatggctgtgtgggtgtagctgtgtgtgggcatggctgtgcgtgggtgtggctgtgtacatgggggggttgtgtgcatgggtatggctgtgtgtgtgggtgtggctgtgtgtgtatggctgtgtgtgggtgtggctgtgtgcgtgggcgtggctgtgtgcgtgggggtggctgtgtgtgactgcacgggcgtggctgtggctgtgtgggcgtggcttgtgtgggcatggctgtgtgcatgggtgtggctgtgtgtgggcatggctgtgggcgtggctgtgtgtgcatggctgtgtgtgcgtggctgtgtgtgtgcgtggctgtgcgcctgggcatggctgtgtgggcgtggctgtgtgtggacactcacgttgttgaggtgcttccactcttctgcccactcacgctctgtgagcttgtggtcgatcacttcttcctgccgggacccaggcaccactgtggatgggggaggtgcacgcttaggtcccacccacagccagtctctgccctattctcccagaccccgccctctgctcccaggccccacccgtgggctgtgcccgctggggacgatggacagggtaaccgaagggctggttgacttggtgaccgtggaggatgcctgggttactgagccgcctggggctctgggccgactgctcttcccctgcaacacggcacacgcctccaagggagggttcagtctcagtcccattctgcagctgaggaaactgaggctggttaagaggatgtgtttgcctgtggtcaccaggcagggagcggtgggggtggggtgtggaccgaggctggctggagctggagcagtgtcctcagccactggccgggaaggctttgttagactaagcgtggcctgaggatgcctcagtgccaagtcacaccatgacctggacctgccttagtccgtgaatcaatgggtaacctcactgggaggagctggtctcagtcattcgcggcagccctctgcggtcacccgcaggcgcccatgactccgatgaagccacgccaaacaccacccaaccacgtggcctcggcacccgcctcctgtctctgcctgtgaacaccgccagccaagccgaggccagggctctcggaacacgctggctctgaggcccatcctattcg

SEQ ID NO: 29651 - DNA, 968 bp, Artificial sequence
  DNA replication origin
cttgctgggccctgcattaactcccccaggccttggactctgagagttgggactctcgtctggcccaggtgacagaggaggaaactgagaagcagagagccacgtgactcacctgtgggtggactgtgggaatcgccaagctcggatgagaaccacgtgggcagttccaggcccgaggccgcccaccccggggggagaggtgggttcagggcccaggacaggcccctctgcagccaccgctctgctccagggggaatgccaggcagggggaaggggtctcccgagctcaggtgcacacagctgcccgtggtgccctgtgcccacatgctcaggtgtacatgtgggcgcatgtgtgctcctgtaacacgcgtccacgctcccgccccaccgggctgctcaccaagcggccgatggcgctctcgtagctcccgggggtctgggtggcggtaggcatctcggaagtggtgggccatggctatgtcctccaggcggtagtgcggcggcggtgtgggctgcggtggcccgttgctggggctgtagcgctgggcagggttcagggtgcatggccgtttgctgaggtgctcggggtgcagcgggtcgcggtctgacccgttctctttggtcctagccccaagagcaggtggggcgagggcagtggacataggatgaaccggggacagaggtgcaggtggggtgagaggcagacaggcaagggcagagagaaagaggacacgtaagggcgagacagaaacacggagcaaaacaccagccccgggaagcccagcccggcgcccccactctctgcccctctgccggggcccatgccagcctcaacccctgctccagctgcatggcatcctggggcctggtggtcaaagagccggactcgctgctctgggaacgaggagagggatacaccaggcttccgtaactggagaccacctgccccttgggcagcagcagcacaa

SEQ ID NO: 29652 - DNA, 1046 bp, Artificial sequence
  DNA replication origin
agccggttcccgaactgaccaagaggaggcccctggggaggggctgatgagggagggaggatgtttggctcctcagacctcccgggacctcgtttcccagctcatgctcctgatgtcctcaacagatggccggttggcccctgttcagccatccaaagagaaaaacaggccggcagccggcactgctcgagggcctggtggatgcactcgtggggaatggggaggcgctggcaggagaaggcggcgtggcagctttgaaacgcatgagaaagttggggaattggatttatttacaaatgcttagaaccgctggctctcccaagtggcctgctgctgggccctggtccagcatgctcagggtccagcacgcctgtccgccctcccgcggcagctctgggaagactttggggaaggcacccgaggagcccggcttgcggcccagcagtgccagcctggagccaaggacgaggcggcgggcgccgcgggtacacacaggcgtcaaaggcagggtctgcatacggatcccgtacaccgggccgtccttcggccgcatgctgcggagtctttacccgcacacgtgggtcttgaggccgtcctcaccaaggctggaggatcacttgagcagccacagaacgtgggtgtccacgtcctaggtccacgctccatcaaggccaaggctggaaaccagcgggaagggaaggggaagctgaacctcagggcttcccatcagggctggagcagacacactgcaggcaatcccagctgggtttcactcccagctccctcgtgtgagccgcctgtaggcccagggctgcctccccctctctgagcctgcatttccccagctgtgttgggtcatgtggtgcctgctgggcagggcgggtgcaggcgggaagaccaaccatgatctgctgccccttcgtcctctcgccttctccagaccacgccatgggagggagctgggtgcggtgggaaagccccaccctgggagtccaggatctgggctcaagtcccacatgccccacatcgccgtgtggcccaggtga

SEQ ID NO: 29653 - DNA, 857 bp, Artificial sequence
  DNA replication origin
aggggtggggtgggggaagggtgtgggtgggggaggggtggggtgggggtggggtaggggtggggtggggtgggagggggtggggtggggtggggtgggtgggaggggtggggtgggggctgctccctgggtgggacagtgacagtagggccagggttctggcttgtatctgagccacaagacctggaagcaggactggccgcaagatctttattttttatttttgaatcctcctggcctccccctagaagcgccatgtcagagaggtgaacagacttcatgtcccactggccccgggccccgggtgggggcacgaggtgggctggccctgagctccagctaccccacacaggccgtgggatcccctgtgtaccaaggggagactgaggtggacacggccctcacgagagccgggccgcgggcggcacctgctggggcgtggccgggggacaccagggcctgaccagacgtcatggacaggggccgtaggcctggtgggggcaagggtggggatgctgcggcgtttctctgcctgaccctgatcctcagttaagcaagggtggctgaggctgggggcatctgttggtaataagcaggcgcactgtgtccccaaagactgggaggggtggagtccgcagcaagttaaaagaagggaagggaagggccgctaacgaactgcaaacgacgccagatgggcccaggctcctgccactccagaagcttctcttttgtcaccatctgggagcatgagcacagcagggcgtgggagggggcggaggaaggcgggaggagggatggagcgatagaggagggagggcaggaggaaaggagggggtggtgggagggagggaggactg

SEQ ID NO: 29654 - DNA, 2296 bp, Artificial sequence
  DNA replication origin
ctggccacgcactcgcgcctggcgtgcagctcctggacagtggctcttgtcatccactctgtgatcttatggatggcaaagttggtgaatcccagatcccggagcccccacagcaaggagcaggggtgacaggaggggctgcgttagggtgcctctgtcgcatctgacccccccaccaaggctctgaggctgggggagccgcgggggtgctcgcgtgtgcccccaatcctcagctggggacacgtgtgcggtctaacttaggaacacacctgtcgtgggaatgaaagcgcttgtgccggggttatttttggcgtctctttagctgctgagactgcccagcagcgcgggagggagtgcgcgggcaggcgagggcgagcaggccgccggaaggaccaggcacccggggcaaggctggtaagcgcacctaagggagggccaggcccaggctggccggggcggtgggcaggggccccggcgtgcactgtggcgcgtctgagaagctgctggaaggtccacagtcctgacgacagtccctcgtgttctggagaaaccagcctcccgctgcagtgaggtctcccatggtgacgggccatctcctggcctggctgggtgaccgcaagtggctatcctcagtcttgacggggtgtgtgtgtcacagtccaccgtgtggccacatggagctcaccattgagagggaaactcggcagcgcggtggggtcctccggacagaggctcagaaggcgagagaccaggggctcggtgcatcctgtgtcagcgtccactgtccccccagaagagggaaagccccagaatacgacgccgttatcggtgccgcgcgctccagagggccggtgcgtccatcctgagcccaggaaggcgctgctaagatcgttcaagccaggggcgcagacaggctaccccctgtgcaggttgcccggttgaggggagcagccgctcagaacagcgtgtggaggttcgcggccccagcaacagagatgtctcaatcctgcagcccccccgtagggaaagtctgaggccacgcgtgcactcaaggttttgtgccatatctgacctgcgattagtggtttccagaattccactaggtgtgggggctgtttattgccaacagcctcacacaacacccgacccataaaaccagtcaggatggagcaaccctggggggctgacttgggcagcgcaggagaggctggggaagcccaggtcaggcctgagcgactctggctggggacacacagtacaaaggaggtcactgccatgctgtcctctggtccctggagccccacttggaactccaggatgggttgggagccatttgcaaatgaagaaactgaggctaggcgccgagtctgactcacagggcacgtctgggcctggcggccggtcctcactcctaaccagggcagcttcccccagccctcgagggcagggccgtgtctgtctggacttcctcaccacgctggtgtgtctgagggcctctgtagcatcccccgccctcctggcctcccacagcccctgcagtgggtatctgtgaggcccaggctggagtgagagcagagtgagcgctgggccccgggggaggcagtcgtgggcacacctgttccccccgctccaccaagaacatccagagcacagggccggcctcccccctgtgccactgtgcccagcgctgtttgctcggtgtgtggggcctgccggggacgggaggcaatctgggggagccgggctgccctgctgtgtgtcttcggttcctcggagcccatttgccgcatgggatgtgtgtgataaccgcgcagcctgtgtgcaggtgtagagcccagcccgggccacagcacagcttcctgacccgggcgcacttcgcaggtgccactagaccacgggtcgggaaggtgggagcctcaggcggcttctgggaaggcggagtggaggaagctgatggcggccacctaaaggttactggagggacacttagagagggcctgacccctcagaagggccttgttggaggtacgggctggtcagtgccctctggagggtgcggccccttccagtccaggcctgcaggagcgggtagaaagggaggcctggcctagccggagccccagctgtggggacgcagcccagaaaggggggccggcatgtaggtccccacgtcccatgttccctcccgtccagacagaggccacaacactcagcaggggtcacctcccaggggccaggtcaggatgggcagggctggcctgatctgaagggtacaccaagaccccccaccatccag

SEQ ID NO: 29655 - DNA, 2000 bp, Artificial sequence
  DNA replication origin
gcagcttctcagacgcgccacagtgcacgccggggcccctgcccaccgccccggccagcctgggcctggccctcccttaggtgcgcttaccagccttgccccgggtgcctggtccttccggcggcctgctcgccctcgcctgcccgcgcactccctcccgcgctgctgggcagtctcagcagctaaagagacgccaaaaataaccccggcacaagcgctttcattcccacgacaggtgtgttcctaagttagaccgcacacgtgtccccagctgaggattgggggcacacgcgagcacccccgcggctcccccagcctcagagccttggtgggggggtcagatgcgacagaggcaccctaacgcagcccctcctgtcacccctgctccttgctgtgggggctccgggatctgggattcaccaactttgccatccataagatcacagagtggatgacaagagccactgtccaggagctgcacgccaggcgcgagtgcgtggccaggcccatcacagaataatggctgtgaaaaggacagccctgtgcaacagaaacaacgcacagttgttctgctgccctcgttcttagagccgggagtgccacgacagccacacctgggccatgctgccaggctggctggtagtgatggaccggagtctgtctgatgggctcaagcatggctgcactcagtggttgacaaaaactataaccaccacctggtaagagcccatgctccctgaacgcccgccatgggccacgcacgttgacagaaacgtctgctggtgactcaagtctgctgagctctcagcatgtgcccggccccaccatctgacggctcctggagatcaccattggcactaggggccatgatgacttccattttacaggtggggaaactgaggcacggggggtggtacctggccaaggtcaccctggcaggaacagttgcagctgggactccaggtaggtggggtctgccctagcaatagctgagctacaggctggccagggacagtgtctcgcccctcccctcggcactcgcagtcagccccattggccatgttttgctgctggggaaggagagctcagagaggctctgctcctgcctaaggccccgcagcttggagcggagggtctgtgggatgcagcgacccggcggctctgccctcctgcgccctcttctccctaaggaggcaagaccaacacaacagaggcaatgctgagggtgcggaggccggggaggagagctgagcgcccccagggcagcagtgttgggccagctgaggatgctgcggtgaagacctctggggaggcctgcggtttttgttattttacttacagagacagaccatagaccattttaagcagccatgaaaacggccgtggggcagcgtcgcaggcccgtcctctcgatctgtaagcaaaataagaagaacacgctgtcaggaggggcgtgggcaggagactctgccctcaggggcgcccgcggccaccttttcctacttctcagagtgatttttggtgggggcgtgggcaggagactgccctcaggggcacccgggccgccttttcttgcttctcagagtgatttttgattttcggaggggcctgggcaggagactctgccctcagggacgcccgggccgccgtttcctgcttctcagagtgattttctgacggggctctgtcaccacctggggccaggccactcccctctccgagcctcagtttccttctctgagagtgggtgatccctaagggccgttctggcagcactgttccggagtttacaagaaccgcggcttctctatgagcaggggcggggccccttgttttcatcgtcctcttcccagaaggcccctgtgaccccatgagcaccatcctcagggacctgggccgaagccgcgtgtcctaaaagcgacctgagactcggcttggagtctctgaaacaaagccctgggtcggcactggaggaggaagcaccaaacaggaagaaagat

SEQ ID NO: 29656 - DNA, 1289 bp, Artificial sequence
  DNA replication origin
aggtgctgaggtcctgcccaacatctcagggcagtggcgcctgggctctaaccggcccctggtgctccaggcaggagtggagcagtccccctctgctgggcctgtggggagtggtggggggaggaagcagccagtaaacagccacaggcctcgcggcacctgctgtcccctccgcacagccgctgacctccctcgcacagggcgccctgctcctcctggccacccgcctgtccggaggctgatggctgggcacacgtgtggccacagctgtgggggccatcaacaccgcctggctgcagggccggtggccagtccctggtgacaaccaaagaaggtgaatgtggcagggtgttcctgtggtgggggtgttcccggctgggggggggggcgttcctgggggggcattcctggggggggcgttcctggtgggggcagcccttccagaccaggctgcccttgggccagcgtgggttgggcatgcccagaagggagcaggcagggatgtggccgagagcttcaaacgccaggctggctcgggggacacaggtccaggacactggggatgccccctgtttggactttccaaagccctcccatggaggcggctacatttgagccacgagacttgaataaaacagaagtggatgcagagagccccactggggagctggtgccgggcgctggacgggcgctcgtaggatggacggacatgccacatttcctaaggtggagagggtggccaggagaccgctgggccgtcatgccacggcgcaaggagtcaccacagccgtcacccaacaagggctcatggccaccacctgcgtgctcacggccaccacctgcgtgctcgtgacactctggatcccgaagctagagcagacagtgccctgccggcgccctgagcagtcggggacttcatgtggttccctttgggcagaacaggaggctgtccctttacttcagaggcctggacagaggctcactgcaggaagatccttctcggtgctctgcagatatcgacgactcattgcatcctcaccgagaccctctgcggctgatgctgccatcagcccattttactaggacggaccaggctcggagagatgaagtcatctacccaaggtcacaccgcgagtgtgctgcgggccgggatcggaaccacgacctggtgttgcccccacagggccaggactcggcaggactccaaagtctccgcttgtcatcaacacgcttgcctccttttaggcctcaaggtacttgcaaagaggcagcaggtctgggattcaaac

SEQ ID NO: 29657 - DNA, 829 bp, Artificial sequence
  DNA replication origin
ccccccaggatgcagctcgcccagggtagccttcaaaggaaggcccccagaggaaatgcctctttgggttcccccagcccccgcttaggggctggaggagagcaaagatggaagtggggtgagtggagcgccatgatcagggcgggcctgaggggaggtggggctgaaggaggggcggggctgaaggaggggcggggctggaggggcggggctgaaggaggggcgggactggaggggcggggctgaaggacggtggggatgagggggcggggctgagagctagtctgcggcaggtgggaggggctgggctgcccagctgcaggacaggtgctttctgcagacatggggggctggttgctcagggcaggagacccatggctgccctggacacccatttccttggcgctggctgggcagggaggcaccgtgggtccaccccacagccacagcaggaggctgagtcctgccggcctggcttcctcgggcaagccacagcctctctgtccatttccttgcctcttcaaaggggatggagatgaggccgtgcgcagcaggggggtccagcactctccgccatcactcgaaatggtggctattattatcctcctctatccctgcacccccaagcagtgtggggagtctctggagctcccaccggcccacagctccaccaaggccaactgcaggctcctctccaggctaagacaccgctagacaggggcagcctcgtccttcctaggtgcctggcttcccaccccattcccctttgaggccctgcacctcggccacaggccatttctactccgcagacccacttcgaggctcggag

SEQ ID NO: 29658 - DNA, 1241 bp, Artificial sequence
  DNA replication origin
gaattctccagtctgatctcaactcagaggagggacagctccttcaggagctccacaagcagcatggaggggggagcgtggaggggggagcgtggacgggggcagcgtggaggagtggaacgtggaggaggggagagtggagggggcagcatggacgggggcagcatggacggggagagcgtggacggggggagtgtggagggggagcgtggagggggagcgtggacagggggagagtggacgggggagcgtggacggggggagcgtggaggggggagcgtagaggggagcgtggaggggggagtgtggaggaggagcgtggagggggagcgtggacgggggagtgtggagggggagcgtcgacgggggagcgtggacggggggagcgtggagggggagcgtggaagggggagcgtggggggggagtgttaagggggaagtgcagagaacgagcagacacgtgggctagacacagggtgggcgggcgccctggtgggctgtgtggctggtcacctcagtcagaatctcgccctctctgggccactccctgccaccttcccctctcaggagcgtcacggtgccctctatccattaggcatgtgtgcgtgtgagtgtgcatgcatgagtgtacgtgggtgcatgggtctgtattcatgtgtgtccatgggtgcctgtgtgcatgggtgtgtgtccgtgtgtatatgtgtgcactcgtgtacacatgggtgtatgtgtgcatgtgtattcatgcatgtgtgtattcatgtgtgtgcatgggtgtgtgtccgtgtatgtgtgcactcacgtgtacatgtgggtgtgtgtgcatgtgtattcatgcgtgtattcatgtgtgcgcatgggtgtgtgtccgtgtacatgcacttacatatacatgtgggtgtgtgtattcatgtgtgtattcatgcgtgtgcatggctgtgtctgtgtatatgcacttacatatacatgtgggtgtatgcgtgtgtattcatgcgtgtattcatgtgtgtgcatgggtgtgtgtccgtgtatatgcacttacacatacatgggggtgtatgtattcatatgcgtattcatgcgtgtgcatggctgtgtccgtgtgtgtgtgcactcacgtgcacatgtgggtgtatgtgtgcgtgtgtattcctgtgtgtattcgtggggtgggtgttgcgtgtgcatgttgtctggtaagggctgtgtgacctcagggatggctgcagaacactccg

SEQ ID NO: 29659 - DNA, 960 bp, Artificial sequence
  DNA replication origin
caaaagctaccaatacccacagctgcatcgtccacgcaaaagctacccatgcccacagctgcatcgtccacgcaaaagctacccatgcccacagctgcatggtccaccataacaacaatgggggcaacaacccacgcgtccatcaacggacacacaaaacgtggtctttctgcacagtgcagtgcagctcagccacagggaaggaggctccccactaggctccagtgcggggagccacgaaggccccgagctgacaaagccagacacaagggccacacgtggccccgtcaccttcatccgcggtgtccagaacaggcaagttcacagagatgcaggagcgggggcagactgagggctgggggtggaggagcgaggagatggggagggggcagactgggggctgggggtggaggagcgaggagatgggggagggggcagactgggggctgggggtggaggagcgaggagatgggggagggggcagactgggggctggggtggaggagtgaggagatggggaggggcagactgtgggctgggggtggaggagtgagtggcagtgggagtggggtttcctttccgggtgatgagcacgtgtgggagcgagctggcggggggcgtggcgttgcattgtgagtgcactaagtgctactgaagtgacactataactccacgatgcttaaaatgataaacgttatgtgtattttcccacaattaaaaaaacagcggggagactgagacaggcagctcatgacctattaacctgcccctgccagggacccatccacgttgctaacagcccaggagtgatgagtggagccaggctgcctcttccctgagtttgggcaccttaaatgtgagaggggctcagcctccctcccaggggccctgctcctgtcaactggggccaacttgcaggcaggtagcggaggcactgctgtgactccagccctggctctg

SEQ ID NO: 29660 - DNA, 1622 bp, Artificial sequence
  DNA replication origin
agggcggccctgggagaggcagaggtggcggcggccggtctggggaggggggtccagagctccctcctgctcctctccctcctgcccgggtccccggcgctgccccgcaggctaaaggtggtccgcgctgggggtcctggaccctgcctggcatgcggtccctggggtcctgacggccgcgggcctcggcacagccgggtggcagcgatggcgcgcacagcctttgggaagcgtccatctgtgttgggcaggccccgagccaggctgtgggaacagcggggagggaggtgtgagcctctgtggagggacagatggctggaaacgcagccctagacggctgacttcacttacgtggagcagaaggcggccaggctggtggcggcgactcagagccgctgggctccgaacacactgcggggctggcgctcccccgcccctgcgtccgcccgtgtgtgctggggccgcggccgggctgtgcccacccctcattcaccctgtgggctgaggccggctgacttcaggcccattccagggcccaggaagaaaaacctttcccttgaaaagagagcacgtcgcgtgctcctgtgggtgggggcttgtcggtagctgtcaggcttgtggccccagccagggtgcggcttctgtgcgtccggcccgggtgtgcgtttcctctcctggacgaggaacaggaggttcccagggcagccacctcggcggacgggtcggccggggataaggggcgggggccggtttttcggtacctggcattgcccttcaagtttctgagaggttggggaaacttcttgaggctgggactccactgtgtcccccagacctgaaggggcgagggctgggcctgagcgcgtccgaccctcacctgcccctggcatcgctttcgcggcaggggaggaggcaggaaggcccagcccacagttcctgggcacgttcttccgtggagggctggctctgtgtgcctctggggtcgggctgtgtcctttgcccccgctccagtctgggcgttgggagtcagatacttccacaggggccagacaggcggatgctgtgcaagccggagctgccgggagggtcctgttctgtgcggccgacagcaccgtgcctggaaaagccatgctatttgggaccgtcctgctgggcaagcggccactcttccacactgaaagggaaacagaaaggaagaagcgcccagagcaggaggaacagatgtggcctccacccgagattggggctcagggagggaagagagtgtcgcatcaggatcagtcttccggcaggctccatctctcctgggatgtgctgggatcctctagtgacaggggagaagggaagttcacatgagtggttcgtggtgctggggccgtgctgtcaccacctgtgaagccagggctggtgagtgggagggctttccccagacatcgccttccagaaccctctggggctacgaagccacacaccagccgcccgagcccccctgagctcttcccctgccgcccgctatctgcgtaattcagttaccacctccaggaaatctctctggtttggctccacgtattttcatttctgcatgactggaagaaattaatttttctccctacgcgaggatc

SEQ ID NO: 29661 - DNA, 974 bp, Artificial sequence
  DNA replication origin
agagtccatgaagccagggagccaggatggataaatttcgagcataaaatcggtaaccttaggcaacacacccaccgcatggggactcgcactgtactgtggggtgggctcagaactccccctccattccacaaggactgggctgagccacatgggcaagcaccatgttacgcacagtctgaaaacctccattccacaaggactgggctgagccacatgggcaagcaccatgttacgcacagtctgaaaaccaggagaatgaaggtgcttggcgtttgtgtcacaattttcacggagtctggctggcttcagacagcacttcccacagccaggagctggaggaactggctgggccacactgcggttagtgacccagctgaccagaccgctgcccaggggctgcaggaggacatggtgctgtcctccccctcacggagcccccgttctgggtttccgtccccttcctctgccagctcaggtgggtagagccaagtccatgagagggacgaggggtggggggaaaaggcccgcggcacaaagctggaatgggccatgtttcgcacgttgccatatttttatattggggattggggacctcggaccttcacatgcaaaatttatgcgaaatgagaggcaaaccaaggccctgctgctctgaaggtctggcctcttgtgtctcctaatggtgacccctgggccccccagccgcttgtgtctaaagtaagagcacgtgtgcgttggggcaggaaacagggaaaaggcgccaattttactaaaatgtactaagcaggcaaatgcgccagacacgccacaaagtactttagggaaaggcaaagcgggcgggggagggggcctgccggcagagaaagtgcggagagggcagagcagcggctcggggcgtttctgcaggtggacatgaaacgcacgatatgcaaatgaatgcaaagtgtatgcaaatgacctggccccgggac

SEQ ID NO: 29662 - DNA, 1014 bp, Artificial sequence
  DNA replication origin
ttttttttttgagatggagtctcgctctgtcacccaggctggagtgcagtggcgtgatctcggctcactgcaagctctgcctcccgggttcaggccattctcctgcctcagcctcccgagtagctgggactacaggcacctgcaaccacgcccggctaattttttgtatttttagtagagacagggtttcactgtgttagccaggacggtcttgatctcctgacctcatgatccgccggcctcggcctcccaaagtgctgggactacaggcgtgacccaccgcacccggccgtggtggtttcttttaagtgaattgagctcctgcctctacagacagcgacacactgggagctccatgggcacaccctcgagctccctcctccacggctctgccccctcccgagccctgagtgtggccctccgaggtcctgctcgcccgtggtctgtctcccgcacaggtgacgctggccttgtcggacagactgcagacatctttcacatagggctggtagtctcctccttaaatgtcccctcgaaatgcccaggagctgtgacttggccgcatccagggcaagaaaccagttcttggataaggcagcaggaagtcggtgtggctgagaggctcagcctctccacctgtaaaatgggcgttccgggagcatccgcacagcacggggggaaatgcagagacggtgcccagctctgtgccagctactgccaggaccatctgaccaccctgtgaccgctgggctaggcgtcaggctgacccactcacagcactaaaggaagccctcctgcctgcgatatccctttcttctctaccacgccaccacagctctcctgagtagggaggaggggctgcggtggggcaggtgcagcgcctgggttgtggtgtctgatggctgcagtggtatcttcagtgccttcaggtctgtcactcctcaaatggttgtgagcaccctgtgtaagtcagagatgttgcaactggtcacttaacacccgaagcctgcggtc

SEQ ID NO: 29663 - DNA, 2658 bp, Artificial sequence
  DNA replication origin
ctgtgaggccagtagaagctccgcgttcctctaccctccaccctccgggagctgctgggctctgagcctgggggagcagggtcatcctgggctcaaagagcagagagccctgagacccctggggaagagcaggcggacacgctgtgtcccggggacccggcgggtgggtgaaggtctcccgcccaccctggcacaggccatgagctccgtgtgcgtggggttctcccgtgatgcaggtcttcgccctccgtcacacgcgtgataaacaggctctgactcagtttcctggccattctgtctggaggctctacatggcctcgggctggggccaggcggctgccctccacggctctcctggcagacaactgacatggagtctttcccaaagcctttgagtctttcccaaagcctcagggagcaggaactcggcaggcctgggggttggcagccctgggcagggtcgggagccctgggtggggtcaggatccttgggtggggtcaggagccttggctggggtcaggagccttgggcggggtcaggagccttggctggggtcaggagccttgggcggggtcaggagccttggctggggtcaggagccttgggcggggtcaggagacttggctggggtcaggagccttgggtggggtcaggagccttgggtgaggtcaggagccttgggtgaggtcaggagccttgggtggggtcaggagccttggctgaggtcaggagccttgggtggggtcaggagccttgggtggggtcaggagccttggctgaggtcaggagccttgggtggggtcaggagccttgggtggggtcaggagccttgggtgaggtcaggagccttgggtggggtcaggagccttgggtagggtcaggagccttgggtggggtcaggagccttgggtggggtcaggagccttgggtggggtcaggagccttggctggggtcaggagccttgggtggggtcaggagccttgggtggggtcaggagccttggctggggtcaggagccttgggtggggtcaggagccttgggtggggtcaggagtcttggctgaggtcaggagccttgggtggggtcaggagccttgggtagggtcaggagccttggctgaggtcaggagccttgggtggagtcaggagccttgggtgaggtcaggagccttgggcggggtcaggagccttggctggggtcaggagccttggctggggtcaggagccttggatggggtcaggagccttgggtggggtcaggagccttgggtagggtcaggagccttggctgaggtcaggagccttgggtggggtcaggagccttggctgaggtcaggagccttggctggggtcaggagccttgggtggggtcaggagccttgggtggggtcaggagtcttggctgaggtcaggagccttgggtggggtcaggagccttgggtagggtcaggagccttggctgaggtcaggagccttgggtggagtcaggagccttggctgaggtcaggagccttgggcggggtcaggagccttggctggggtcaggagccttggctggggtcaggagccttggatggggtcaggagccttgggtggggtcaggagccttgggtagggtcaggagccttggctgaggtcaggagccttgggtggggtcaggagccttggctgaggtcaggagccttggctggggtcaggagccttgggtggggtcaggagccttgggtggggtcaggagtcttggctgaggtcaggagccttgggtggggtcaggagccttgggtagggtcaggagccttggctgaggtcaggagccttgggcggggtcaggagccttgggtagggtcaggagccttggctgaggtcaggagccttgggtggagtcaggagccttggctgaggtcaggagccttgggcggggtcaggagccttgggtagggtcaggagccttggctgaggtcaggagccttgggtggagtcaggagccttggctgaggtcaggagccttgggcggggtcaggagccttggctggggtcaggacacttggctggggtcaggagccttggatggggtcaggagccttgggtggggtcaggagtcttgggtagggtcaggagtcttgggtggggtcaggagccttgggtgaggtcaggagccttggctggggtcaggagccttgggtggggtcaggacccttgggtgggtcaggagacttgggcagggctgtaggggaagggggctgtcagagtagatgggtggccggcctatcatggtggtcagggtgcctgttgtggtcaggggacctttcatagcagttggggtaccatcgtggtggctgggggagcccactgtggtcagagggctatcttggtcagtggtgagatttggggtcttcagaggaggagtgggagctcctgggcagttctctgactggcagctgtagaggggccatgaccacacccaggcatgaaggaccaggactctagatgaaagagcttcctgctaggtagccactgtcctgacatggtgtcagctgttagaggccgcctgccctcatttgcccagggcaggagcacagcccacctgctctgtgggcatctctgtccctgtcctcaccagcccaatgcaggtgacaaggcccatggcagccccaaa

SEQ ID NO: 29664 - DNA, 1245 bp, Artificial sequence
  DNA replication origin
gagaagcacagtcgccgcccagcagcccagcactacctttggagggagacaaactcgctcccccagggccgggggctgggggcctcggtgtggcctttggaaggagatgaacttgctctcccagggctggggcctcagggcctcagcgtagcccaggtctgcgctggctctgggctcttcccgctgcaggtgtgggtcccccgtgggcagctctcacaccacaggcctggctccctaggggtatggtcagagtgggaccctgtaccgcctctgccgcccttttccctttgcctccatggagcgggcctgagttcccagagggctgattcctctctctgccccgacccctggcaaccctgtcagctgctcattcacctaatagacaagtgctgtgtgcccgggctgtgccgcaccaacccagggccaggattcagaggggaacagagaggaagccccatcctcgcgatgccaaggtcccagcagctggaggggcagcgccctgctgattgacgcgctgaatcgtgtgcccccgtccttactggcaggcacgccacatgtgctgtgtgccatgtgttcaggtctggcctgggcctgctgtgtcctggtctcatacacgctacatggacagtcacatgagcagctgctgtggccgcggacgggtggtggggacagggcatgaccctgttgggggagcagaggggtctccttgcgggagagagttgaagtagtcctggcgatgatggtgggctcccaggagaggtggagggaacacgcatgcacgcccagggctggaggcacgtgggtgttcagggcctgtgaggaggcccgggcaccaaggcagcacccagcgcttacagagcctgcaggtcttggacagaggtgcaggcagaggcaggaggtggcatgggtcataccacctgtaaaagccaggcgcagtagagaatgttctagaaataaatgtgatgctgcgattgcctgagagggaacccaggtgcaggagagggaaggtcccggggaaaccctccttttcctcctccttcctcccagcagctgggaaaggcgatggagagaaaacgggagcagggcagagacggtatctgggattacaggaggaaaggtggctcattgtttaaaaagatcattaagcctgtcatcccagcactttgggaggccaaggcaggcagatcacccgaggtcaggagttcgagaccagcctagccaacatggtgaaactccatctctact

SEQ ID NO: 29665 - DNA, 1677 bp, Artificial sequence
  DNA replication origin
ttctgcaaactctctgccccgcagggacctagccccctgggttgtagaagcaggattcggggcctgtggctggcgctgcgcaccaagtatccttctaaaccaaaggctggacacaggacccttggcaatggtgccacatgggccaatttgcagcctctaaacattgattaaacagtctcaaaaactgtattttctagcatacctaatatgttaccagtgtttggcatctggtcttatgaaaatctgcacatttagctcacttgatttatagaaatgctgccttaaaaacaaagggcagaactggtcctcactgaaaaacaatctgcccagactgatgtttgtcagatattaattcaaataagcatgttattaaatgatccaaatgcctcactttgaattctaattgtgatatagatggatggatgtgtgggtgggtgggtgggtggatggatggatggatggatggatggatggatagatgggtgggtggatagatggatggatgggtggatggatggatggatggagaagtgcataggtggtgggtggatggatggatagatggataaatagatggtgggtggggtaggtggatggatggatagatggatagatggatggatggatggatggatggatggatggatggatggataagtggatagatggtggatggatggatggatggacagttggatagatggtgggtgagtggatggatgggtgggtggatagatagatggatgaatagatgggtgactggatggatagatggtggatggatgggtggatggatggatgagtgggtggatggatagatgggttggtgggtggatagatggatgggaagataaaaaggtaaggaagcaggaaggaaaggtcaaagtatatttttcaaatcttaaaaacatagttcttatacacacatacagtaagcatgtgtgaaaggtgtattattccgcgatgagggagccagtcgggcagcccaggtgattcagaggggacgagggacattaaagaccccatgaagaaggaaagccacacggaacctgacgagtgggaattagtgaagtgcaatctttcttcagaacaacaagtagcttgcaacttgtcagttttctgcaccctaaccctaactgaagcctcaccagcagtaaattaaaagtcaaaagaggccactgggcccttggcagcctggctaacaccaggagggccagaagtcaacgtgattttttacacctttgggtctgtggtttccgaacaggaggcaggcagggcatggggcctgccccaggttttcactggtgggtcgaagccctgtcatcagactcatgctagagagaggcaacccatgaattgggggaagagcaggcaggagcagcacacagctgaccccaagccgtgtttgcagaacaatctggaaggtgaagacccacatatggattcctttaagccgatcggcccaggtatgcagatggtcttgtgtgcgtggccctttaaagacccccatagagctgtgccacctacctcacaggtgcagggctgggagctctgggcagctctctgtcctctcctcactgcagacagagctcttctctttctcaagatgcactgcaagcgagatgcagagtcccctaagtcaccacgaagagacagaggctcagagggatgaggaac

SEQ ID NO: 29666 - DNA, 1694 bp, Artificial sequence
  DNA replication origin
ttctttatagaaaggaattcctgtaggtccagtgtccccagcccggaaggccaccccacctgggggcggcgagatgggatcaaggggttggggggacctagctcagaggcttagccaccccacaccccaccacggcttcctcatcggtaaatggggcaatagcagtccccgtctccggcacatctgtgaaaactgaacaggtggacgcatggcagcacttagggtgtggaaagccgtccccaggcatcctgccccgtccccgtcgctcccaggcagtgtgtctcgcacagttacagaaaaggcatcgaattctcattttcctttgcaatttcctctctcgacacctgcgaggctgactgcattgagcatggtgctgcctcgtgtcggggccgagtggcacctcgggggctgggggggtggcatggcgctgcctcgtgtcggggccgagtggcacctcgggggctggggggtggcatggtgctgccgcgtgtcggggccgagtggcacctcgggggttgggggttgggggtggcacacaccagcgcactgttctcagcttccctatggagagaggttgagtgcgtcaatttcccgtgctacaaacaatgcttcaatcaaggatgctttccctcgtcccctggggcccacatggtttctccaaggcaaacacaagacattggccacagggactagagtgtgatacgaagttctcatcctgggcttccagagtccagggtgggtgtgggccctatcccggcttcctgggggaaatgagcgcctggtctctgaggggcagcagtgggcgtgctgcatccgacttccatctgggtggctctgcaagccaggcagggccagggcacgggagtcactggagacgccccccaccccaacccacccagctcgtgttcagaaaggcctctgtccagcgcaggtgttggtgatggcaggcagtggttctggaggtcaagagtgtccattgctcctggaggaattccttgtttgtggaaaccagggccggcctccaagggaggctgggaagctgggcgctgggcagggcctggcaccgggtgcttctactgcttccactactgagttcatgggaggccagaggttgattgggcctggtcctcgtctggacatgggtttggtggtcaccccaggtgggatgagggtgtggcaggggaggtagcccagccatgctgcacaggtgggagaggggccgggaggtctgtggactcgcgatcccccgctctgctctcctctgtgggcactcacaggggctgccacccccctaccccggcacaggcctcactcctgccaaggaccagggtaaaatggcagccctgttagctggctgctctggagtctgtccctagagacggcctaatgtggccaagatgtgtttcaggaagccgtgctgtgactcaggtcggggaagtcctgggactgtgcaggccagtgagcagagtgaccctcagagcagagcgacccacacaaaccgggaaagcccactccgtccagaggggccccaccttgcagctacgagaggaggcgaggtctgctttccctggccaaggagtggcccagggggaactctgtatgcacccatgctctgtggggtctctctgttcctgctgccgaatgggcccccgtcccctcccctgacatcagcccacagaggagggaccgggcac

SEQ ID NO: 29667 - DNA, 786 bp, Artificial sequence
  DNA replication origin
tcagccccatgacccgtcgaacccacagaatttcagtcactttagtcatggtgcgaaaagaaggatgcagaaagcttaaaagtttataaactgaacatgtgtgaaaatggtgacattctggaggccacagagcgacctctcctctttcccttctacttcctacctctggctgcaagggagggtgggcgcctccacacagctcacgccgacccccgctggacgcgctgctccggggcagggggcgtcctgagttccccggtgccctggacaggaaggggcagtgtgagggctgagccgcgacgagcccccaggcagtgtgcgcctgaccctcacccctgtgctctgtggctgatctttaaccccccaggagaagccaggtcgcgggagccacgcagggcagcacgccgtccccgtccccggcctgctccttccttccctcttctttatagaaaggaattcctgtaggtccagtgtccccagcccggaaggccaccccacctgggggcggcgagatgggatcaaggggttggggggacctagctcagaggcttagccaccccacaccccaccacggcttcctcatcggtaaatggggcaatagcagtccccgtctccggcacatctgtgaaaactgaacaggtggacgcatggcagcacttagggtgtggaaagccgtccccaggcatcctgccccgtccccgtcgctcccaggcagtgtgtctcgcacagttacagaaaaggcatcgaattctcattttcctttgcaatttcctctctcgacacctg

SEQ ID NO: 29668 - DNA, 1063 bp, Artificial sequence
  DNA replication origin
catgttcagtttataaacttttaagctttctgcatccttcttttcgcaccatgactaaagtgactgaaattctgtgggttcgacgggtcatggggctgagttgggaccatgtgaccacagggctttgatgaggaaccccccataccgcccatgctggggcccacctggaggaaataggcccagagaggcacgccctggtgagaggccgaataagggtggaccacaggggactgccaggggccctggccgcaggactgcccgtcccagctgtctctggccctggggaggggctcagtagggaggggcgggaagcacctggcagtttcagtttcgccaggaagcggctgcctgctgtctcccttcccacccgccgcccggagagccccccaggtggggacggccccttgcactgcagacgaggaagccccagctgaggggccgcaggacaagcctcacggctcctggcagtggggacagagccaggcccagcctcagctgcgtctcaggaggacctggggtgggagaagcccctgggggccgagagcagatgagggcagatctgactggcatcttctgtcacctgctggtgaccttttagaacacgtggtcccaacccttggtctagaatatgctgccgtgttggaggggcagaagcagctgagacggctgtccgtcccccgcctgtcagtccgtctgtctggggctgggggtgtcaggacaacacccaccactgcaggcccccttgggaataagcggcaagaagcttcggggtccagtttgcaccgagcccctccagcggggacgcctctttcatttctgcaccctgcgcctggcacggaggggtgtgcggtcagcgggtgggggctgattgggtgacttgcagtgacagggtggcgaggccctggacctgagtgccatgtgacccccatggaccataacccctctgagctccagggtctgcagcgctgcaggcctcacacaaatcgggggccaggagcctaagatctgctctctaaatctgggagcccagccagagcaagccctcagcagacccagccccagt

SEQ ID NO: 29669 - DNA, 800 bp, Artificial sequence
  DNA replication origin
gaagtgttgccgggtgaaagccgggaagggattgccgtctgccccttccctccggggccacagggcctgagttcctgggaaaactgtggagccagtccctgcctcagcaccagcaggatgcacacagccaagtaacaactgaaggaccaggagcacggaggcctcgcctcgcctggagatggaatagactcacgccttccagggctcagcaccctcctgggccagcaccgtctgctgagggccctgctgcaagcaggcaccagagcccctgtctcgtgcagccgacgctgggggccgggggatgagtagtacgtaagggggcagctggtttttctcatggggtgacagattgaaggagaggaacaccgagggaaggaggtcggtcgggagggggctcctcggcgagggcatagcacaggcacgggctcgggaggcttgtggagccgccaggcagccggggctgtgagtgccggaggccgacgcggtggggtcgggccgggagggctgggccgtgggtgtgcgcaggtgtgatgtggctgacgtgttttcatcaactcaattttcctttttttttaaagacacggtctccctctgtcatccaggctggagtgcaggggcgcaatcttggctcactgcaacctctgcctcctgggttcacacgattctcccgcctcagcctcccgagtagctgggattacaagcacccactaccacactcagctaatttttgtatatttactagaggcagggttttgccatgttggccagactggtctcggaatcctggcctcaagtgatcc

SEQ ID NO: 29670 - DNA, 1639 bp, Artificial sequence
  DNA replication origin
tcggggcaggaggggcctttccttccttcctaaaagacctattagggcctactggggttctttcggtgtccaagacagcccctggtcctgctctctgggaactataggagacacgttccatcaacatggcccagcatgtggggcccatagggcagttggggaaactgtccctgggtgggcagaggggccctaaggcaggctttggtgaatctgtaggatggccagagaactggaggagggtgagggggcagtgggggagatgacgccatgtgggggtgggtgaggaggccttccttcaggcagggtgtcttatgtttgccttctcttctagcatgtaggaacccccccacccccaacacacacacccttcactgctggatgaatagatgaatgaatagattgatgaatgaatgggtgggtgggtgagtggatgggtgggtagatgatgggtggatgggtgggtgggtggatgagtgaatgggtggatggatgggtggatagatgggtgagtgggtggatagatgggtgagtgagtgagtgggtggatgggtgggtggatggatagatgtgtggatgggtgggtggatggatagatgggtgaatgggcggaaagatgggtgaatgggtggatggatgaatggataaatgggtaaatgggtgggtggatggagagatgggtgaatgggtgggtaggtagatggatgggtgtgtgggtgaatgaatggtggatgggtgtgtgggtgggtgggtggatagatgggtgaatgtgtggatgggtggatagacgggtgaatgggtggatgagtggatagatgagtgaatgggtggatggatggatggatggataaatgggtgaatgggtggtggatggatagatgggtggatgggtgggtagatgggtgaatgggtggatgggtggatagatgggtgaataggtggaaggatggatggataaatgggtgaatgggtaggtggatggatagatgggtggatgggtggatggatggagagatgggtgaatgggtgagtaggcgaatggataggtgggtgggtgaatgtgtggatggatgggtggatggagagatgggtgaatgggtgggtaggtggatggatgggtgtgtgggtgaatgaatggtggatgggtgtgtgggtgggtgggtggatagatgggtgaatgtgtggatgggtggatagacgggtgaatgggtggatgagtggatagatgagtgaatgggtggatggatggatggatggatggatggataaatgggtgaatgggtggtggatggagagatgggtgaatgggtgagtaggtgaatggatcggtgggtgggtgaatgtgtggatggatgggtggatgaatgggtgcgtggatgggtggatggatgagtggatcagtgaatgggtgggtagggatggatgggtggatagacaggtgaatgagtggatggatggatacatgggtggatgggtggataggtggatggatgggtggatgggtgggtggatgggtgaatgggtggatgggtggatggatgggtggatggatgggtggatagatgggtggatgggtgaatggatggatggatggatgggtgaatagatgggtgcatgggtgaatgggtgggtaggtggatag

SEQ ID NO: 29671 - DNA, 895 bp, Artificial sequence
  DNA replication origin
gggcagctggcacggtctcgccccacctgacagatggcagggcgggcagcagccagcgaggggccggcaggactcaagtccgacccccgcagacacccctgggggccccaccaggcagcgcccccgctcgaaggcagtacaggcgggagaggggccatatggccccggctcccagctcccacggaggccgcatctcccagctgctctgtgctgaaaacatttacatccaaatacgtcccagcgcgccgtgtttttgcctcaagccagcctgggagtctgtcgtcgccacctgggaggccccggtgcccagattagggaaggccttgccttccagggaccccacgactgaatccgcagtggctccgagatgctggccggggctgggggcaggaggagctttgcacgtgcggctggtcctgcggggagcgtgcctcccagagcttgacccacgcctgggccatgcgggctgccccgagttgcctctccccttgaggccctccccgccctgcagtcatgccgcacgcctcacccctcccaccgcacggctttgctcccctgtctcatggtctgctttgctgtctgtccctggtggtgaggtcagacccccagcctcgtacagggaccagcagccagctcccagcgggcccgcaggacacgtgtgtgccatgcacgagacactgagtgggtgggaaggggattgctgggagccaggagctcccgttgccctgcgtggagccgagtgggtgggaaggagactgctgggagctcccgtcgtggagtgggaccatcacccagtgctgacccctggcttcccatctgcaatatgggaccggaggataagagcgggtttgcgcccctgtggccctgcacgcaaaggcccatagcccagggcttg

SEQ ID NO: 29672 - DNA, 1006 bp, Artificial sequence
  DNA replication origin
aaaagcatcaatttatagacccaagaagttcagctaacttcaaacaggataaatagaaacacatctgtaggcacagcacagtcaaactgctgaaaactgacgaaaatgtggaagaagccggagaagagggtggccagaagtgccaaatgctgctgcctcctcatcaaaaaccagagggcggagggcggagggcgggggggggcggagggaggagggcggagggaggagggcagagggcggggggcgggacagagggaggagggaggaggtaggagggcggagggagggggcggggggcagagggcggagggagggggcggggcagagggaggaggggggggcggggcagagggaggagggaggagggcggagggagggggcggggcagagggaggagggaggagggaggagggcggagggcggagggcgggggggcggggcagagggaggagggcggagggcggggggcggggggcggagggcagaggagtgaaaacaatgagccgcccccaccgctctgaatccagcaggaaatcctcagagtgaaggtgaaggtgaaataaaagcgctctgaagtaaatgaaactgagaacatttgccgtcctaagagccgcatgacaaaaacatgctaaagctgcgtaatctgcacaagataaggaactcactgacgggcagggtggcgacagcccatgtgcgaccgtgcaggtgaacaaggcgcctgtcctctcctcgtcatctcttttaaagggcaaatctgcaggcgtgtgtgtccagcatcatgagcttcgtggggtctgagtcatagaacgtgtgaggacaggagcgtgaggcgtgggcgtggggagggaaccgcactgctgcaaggggcttgggtttctcatcaaacggcgccacatcttcagatgtctctggaagccgaattgagactggatttgggtgtgtgaagatgtttaggaccagcacgtgtgaagggaagcaggcagggctgacgtgtggtgcaggcccc

SEQ ID NO: 29673 - DNA, 792 bp, Artificial sequence
  DNA replication origin
ggagggtcttgccgcccaacagcaatcccagcccgcctgacccacgcatcctctccccagtgatccaggccaaatagagtatggagcccacccctgggggatgggcaggcccagttctctgtcttcttcatagacagtgagtgctgaccagaggccacaccagggcagaagctggatggaggcggctaaggtggctttaaaaactgggactctgagtattcgtgggggctgcatgttggtcaggaattgttattttccagaattctctctgaagaacaggaggtgctggaagctggcagagcacccatgtggctcctcgttagaaggagaaaggtcgaggctggaaagggcccctccccactccctgcaggtgcggaggctccattccccacaaggaagcagtgggcgtggggtcacctccgacatcgcgatgaggctgcagcaccactgggccacacaggaggcacagcgtgggtcactctagcggccttgagcgattccgggttggaggaggagggggcacagacagaggagggggcagcggaggaagccccgggcatgggagaggccccagcccagggacggaggtgtgtgtgggtgcagggaacgtctggggactggtccatctggagggatggcggacacgtggcagcaagagagaagacagacggcgcggtctgcctggagtccgctttcaaggttggtgctgctcagattgctcctagaagcacagggtaccccgtctgttccttcagggtcacctttcccacggccctgtccttcccggaaaga

SEQ ID NO: 29674 - DNA, 2925 bp, Artificial sequence
  DNA replication origin
ctgtctgtgccccctcctcctccaacccggaatcgctcaaggccgctagagtgacccacgctgtgcctcctgtgtggcccagtggtgctgcagcctcatcgcgatgtcggaggtgaccccacgcccactgcttccttgtggggaatggagcctccgcacctgcagggagtggggaggggccctttccagcctcgacctttctccttctaacgaggagccacatgggtgctctgccagcttccagcacctcctgttcttcagagagaattctggaaaataacaattcctgaccaacatgcagcccccacgaatactcagagtcccagtttttaaagccaccttagccgcctccatccagcttctgccctggtgtggcctctggtcagcactcactgtctatgaagaagacagagaactgggcctgcccatcccccaggggtgggctccatactctatttggcctggatcactggggagaggatgcgtgggtcaggcgggctgggattgctgttgggcggcaagaccctccactcgacacagccacggcttccgtgtgagtcgggcaagtcctccatgtggtgactcagggatccaggctgcaggctgctgagatctgaagccacagcttctgcatctccagggaggaggaggagtgctgacagcacggccgggagatgtgggggccaagtgtgcttggggagcaccatgctgcccggctgccacgagtttcctgggctcagcaccctgggagcctcctgtgctcggctcccgacaaccctaagctgctggcactccacctcattcctgcgctgggggaaattcctgcgggtggaggctccaggctcccggctgcagactcggagtggattgagtcctgccatctgcccaagaggggtcacagccaggtgggggtccgtgtgtgtcctctggctgagtatcaaagcaccaacactctgggggccatgacagtggaagttggggctctcacagcctgcagcggtgagctgacatcaaggtgcgggcagcgctggcttcctctgaaggcgctgggagcccttcccgcctcatccagctcccggggctccctggctcgtggccctcactcccatctctgcctctgtccgcacgcagctgccttccctgcgcatctgactccatcctccttctcttctaagggtactggccgttggatttagggcccaccctacccaggacgatgtcatctcaagatccttcacttaagttttcctgcaaagaccctttttctgaataaggttacatttccaggctctgggttttaggatgtgtccactggcaacatgaaactggggagctggggggacagaggagctggggagacagaggaactggggggacagaggagctggggggacagaggagcctgggggacccaggagccggagggacagaggaaccggggggacagagcagccggagggacgcaggagccggagggacagaggagccggggggacagaggagccggagccggggggacagaagagctggggggacagaggaaccggggggacagaggagccggagggacgcaggagccggagggacagaggagccggggggacagaggagccgggagtacagaggagccggggggacagaggagccgggagtacagaggagccggggggacagaggagccggagccggggggacagaagagctggggggacagaggaaccggggggacagaagagctggggggacggaggagccggggggacggaggagccgggaggacagaggagccggggggacagaagagctggggggacagaggaaccggggggacagaggagccgggaggacagaggagccgggcggacagaggagccgggaggacagaggagccggggggacagaggagccggagccagggggacagaagagctggggggacagaggaaccggggggacagaggagccggggggacagaggagccggagccggggggacagaagagctggggggacagaggaaccggggggacagaggagccggggggacagaggagccggagggacgcaggagccggagggacagaggaactggggggacagaggagccgggaggacagaggagccggggggacagaggagctggggggacagaggagccggagccggggggacagaagagctggggggacagaggagccggggggacagaggagccggagccggggggacagaagacccggggggacagaggagccggagggacgcaggagccggggggacagaggagccggagccggggggacagaagacctggggggacagaggagccggagggacgcaggagctggggggacataggagccggggggacagaggagccggagccggggggacagaggagccggggggacagaagagctggggggacagaggagccggggggacacaggagccggggggacagaggagccggggggacagaagagctggggggacagaggagccaggctcagtgggggtcagggtgtaggctccagcccctctgcccatcccatctgctttgccagccccagtttcgctgaattgtctcatgagcgtgttctgacccctgcctcacaggaggggcggcacggcaaggcggtggatgggccaggccccgggtcagctcggcctcggcgaggctgagcaggtcacgtgccacctccatcctgcgttctgctttccatcacgagctacagcaggagcaaggtggccgtgaccgagaaccccttggaaccccagtttcgttgtctgagaggaagataactgcatctctcgcaggatcaggtggcagcagaagagacggtggacgcactcaaaaccatcccgttcctcgactggggcgggctgtgttgtgcacacccggcccggccccacacccaggcc

SEQ ID NO: 29675 - DNA, 892 bp, Artificial sequence
  DNA replication origin
agccaggctcagtgggggtcagggtgtaggctccagcccctctgcccatcccatctgctttgccagccccagtttcgctgaattgtctcatgagcgtgttctgacccctgcctcacaggaggggcggcacggcaaggcggtggatgggccaggccccgggtcagctcggcctcggcgaggctgagcaggtcacgtgccacctccatcctgcgttctgctttccatcacgagctacagcaggagcaaggtggccgtgaccgagaaccccttggaaccccagtttcgttgtctgagaggaagataactgcatctctcgcaggatcaggtggcagcagaagagacggtggacgcactcaaaaccatcccgttcctcgactggggcgggctgtgttgtgcacacccggcccggccccacacccaggccccacacccaggccccaccatcaggggcacccagctggcatttggagtggagccctcagagggggctgggctgggactgggatcccgggggagaagcgaggagagcctgcatgggagcagcagaggctgcccagggaggctgtggggcttggatctggatctggaggggagaatcactggggagcacccccccaccccccaacccggcaacggcagccaggaagggctggaagcagacgggaacgaaagcaggagatggaagataggagaagataggagaagagagcagatgaggccgggaccgagggggagaggctgcggtggggaaaggaggtgctggggagaagggaagcccagaccgctacccctcacccccttttccccagcctggccgaggggcaggggccgcaggaagatgtaagcgaccaacagccttgccttgttgcaaagaaaatattccctgaaagac

SEQ ID NO: 29676 - DNA, 915 bp, Artificial sequence
  DNA replication origin
cgttgcggtgtcggcccagctggcagagacaagtgctgaacacacgaccacataaacaactttgctcctgcggggaaggaggtgagctggtgccggagccgcctcagggccctgtgaggaggaggccattcctgctgaggctgggtcagccaggccgccactctgcctgcgtcctccatggctgcaatgccctccatgggaagcccaggccaccgggtctggcctcctttctggtctgggcttgctctgctcatggcctcacatgagctgcaggccccctggagccctcttcctccagacgtccttgcagcccgcccacctccttcaaggccttgctcaactgccacctccccagagaggactctgggaccagcccctccctttaatgcactcctccttgcccacacataggagcaggtgccacgggagcgggtgccaggagagcaaatgccacaggaccaggtgccacgagagtgggtgccatgggagcaggtgccaggagagcaaatgccacgggtccgggtgccacgagagtgggtgccacgggagcaggcacgtgtgtccacttcctcccccactccttcctcaggctgaaaacagcaagtggagtatggcaggcatcgctccagggctgtcaggagcagtggggttggatgcaggggtgggctgggaggtgggatgctgaggcaatcgggggctgggccagtcagaggtgagtacaggggagggacctccaggcagagggactggcttgagcaaaggcttcgaggtggaggttttaggtgggtgaggagcagaaggccaacgcgggtggctgaggagagggcaaggaagaagaggcaggagtccaccgccagtgccaaccaggggcctcggggcaccgctccaggagcaaccccagagtgcatccacctc

SEQ ID NO: 29677 - DNA, 2016 bp, Artificial sequence
  DNA replication origin
ctctttctctttctctctccctctctcttcctgattcttttccctttctctgcctttccttttctcccaacacctttttccttccacctggctcattcgtggggctcaggagtgggggaaagtgatgtttccccgcaagatgagggttcagcaccatggacagaggagctgccctctaagaacttccccagacctgtcacagccatgtggagactccaccccacagcctgcaggtacacctgtccattccctgggcagacccgcccagtgcgacagggctgtgagctggacacacccacaccctgtctctaacccgtgtcgcggcccgtgaggtcagcacggcggtccccacttgacagatgtggacctcagagtaggatatgactcactcagggtcccgaggaaaagaggagcaaggagttcaacccaaggccaggtgtcatgggtcctcctgcaaagatgaggtgggtgtgtcagggtcctcctggcacagatgaggtgggtgtgtcagggtcctcctgcaaagatgaggtgggtgtgtcagggtcctcctggcaaagatgaggtgggtgtgtcagggtcctcctgcaaagatgaggtgggtgtgtcagcgtcctcctggcaaagatgaggtgggtgtgtcagggtcctcctgcaaagatgaggtgggtgtgtcagggtcctcctggcaaagatgaggtgggtgtgtcagggtcctcctgcaaagatgaggtgggtgtgtcagggtcctcctggcaaagatgaggtgggtgtgtcagggttctcctgcaaagatgaggtgggtgtgtcagggtcctcctggcacagatgaggtgggtgtgtcacgggtcctcctggcaaagatgaggtgggtgtgtcacgggtcctcctggcaaagatgaggtgggtgtgtcagggtcctcctgcaaagatgaggtgggtgtgtcagggtcctcctgcaaagatgaggtgggtgtgtcacgggtcctcctggcacagatgaggtgggtgtgtcagggtcctcctggaaaagatgaggtgggtgtgtcacgggtgctcctgacaaagatgaggtgggtgtgtcaggggtcctcctggcaaagatgaggtgggtgtgtcagggttctcctgcaaagatgaggtgggtgtgtcacgggtcctcctggcaaagatgaggtgggtgtgtcacgggtcctcctggcaaagatgaggtgggtgtgtcagggttctcctgcaaagaggtgggtgtgtcagggtcctcctggcaaagatgaggtgggtgtgtcggggtcctcctggcaaagatgaggtgggtgtgtcagggtcctcctgcaaagatgaggtgggtgtgtcacgggtcctcctggcacagatgaggtgggtgtgtcagggtcctcctggcaaagatgaggtgggtgtgtcacgggtgctcctgacaaagatgaggtgggtgtgtcaggggtcctcctggcaaagatgaggtgggtgtgtcagggtcctcctggcaaagatgaggtgggtgtgtcacgggtgctcctgacaaagatgaggtgggtgtgtcaggggtcctcctggcaaagatgaggtgggtgtgtcagggtcctcctggcaaagatgaggtgggtgtgtcagggtcctcctgcaaagacgaggagggtgtgtctgggtcctcctggcaaagatgaggtgggtgtgtcacgggtcctcctggcacagatgaggtgggtgtgtcagggtcctcctgcaaagatgaggtgggtgtgtcatgggttctcctggcaaagatgaggtggatggtggacactgacccactctggagacctggactccctgcagtcctttacacaccagaaccccgggctgcctctccatcggagcctcatcctgtgcatgaggtgggtctcacagaaccagcctctgggcagcccaggtgggtgtcagagcctctgatcccatgtgagggtgaggtagatggctcagccaagtcccctgtgtccactgggaacccactcccaa

SEQ ID NO: 29678 - DNA, 1345 bp, Artificial sequence
  DNA replication origin
ccagtggctcacttccttgcagcccctaaacagagagacgtgcctgagcacccccctgcactgtaaaactggtatacagaaggagtcacataaagaatgagatgggatgaaaagacacacaaacccaggtgctaatgtttttacttcctgcagcccccaagatgcgttcacctctgcctgatttacttctctacctcatgggattgtgtcctgcaagcccccaagatgagttcgcctctgcctgcagcttcacaatagattggaaacttgaggtaaacatgacctgtgttttactgttgtgcttcccaaaggctagcaaagtgccagtgcatgtggcaccagctcagcaaatacctgtgcatggatggacaggtggatgaatgggtgggtgggtgcatggaagggtgggtgggtgcatggaagggtgggtgggtggaggaatgggtgagtgaatggatggatagatggatgggtggatggatggtgggtgggtgggtgtgtgagtgggcagatagatagatgggtggatgggcagatgaatggatgggtgggtggatggatgcatggatggatggatggatggatggatggatggatgggtggatgagtgggtgggtggaggagtgagtgaataagcagatggatggatgggtgggtgaatgggtggatggatggtggatggggtggatggagaatgggtggacggatggatagatggatgggtggatgggtgggtgagtggacagattgatgagtggatgggcagatgaatggatgggtgggtgaatgggtggatgggtggtgggtggggtggatggaggatgagtggacagatggatagatgaacgggtggatgaatgggtgggtggatgaatggatgaacgcatgatgggtggggtggatggatggatggatggatggatgagtgggtgggcagaagagtgggtgaataggcagatggatggatgggtgggtgaataggtagatggatggataggtggataggtgcatgtgtgggtggagagatagatgggtggatgagtgcatgggtgggtggatggatagatgggtggatgagtgcatgggtgggtggatggatagatgggtggataggtgcacgtgtgggtggatggatagatgggtggatgagtgcatgggtgggtggatggatagatgggtggatgagtgcttgggtgggtggatggatagatgggtggatgagtgcgtgggtgggtggatggatagatggtggatgagtgtgtgggtgagtggatggatagatgagtggatgagtgtgtgggtgggtggatggatagatgggtggatgtgtgcgtgggtgggtgga

SEQ ID NO: 29679 - DNA, 1602 bp, Artificial sequence
  DNA replication origin
ttcaccctcccccaaaggccacctcctcattcaccctcccccaaaggccattcaccctcccccaaaggccacctcctcactcaccctcccccaaaggccattcaccctcccccgaaggccacctcctcactcatcctcccccgaaggccacctcctcactcaccctcccccgaaggccattcaccctcccccgaaggccacctcctcactcaccctcccccgaaggccattcaccctcccccgaaggccacctcctcactcaccctcccccgaaggccacctcctcactcatcctctcagggtaggatttcaccgtgggagctttaggaggacgtgaacacctctgcagtgattttgatgtgaactgtggatggagacccccattctgggctttgctgccacatgtgtgggtgcatgtgagatacacagtgtcagacacatgctttcctgagcagggcccatctctgggaggattcagaagacactgtggcccttgggggttgcagatggaggggaactgactatttttcctgctgtgctggctgttggctgtgctggctgttggccatgctggctgttgaccgtgctggctgttgaccattctgggtgttgactatgctagctgttggccgtgctggctgttgactgtgctggctgttgaccattctgggtgttgaccatgctagctgttgaccgtgctggctgttgaccgtgctgggtgttgaccgtgctggctgttgaccgtgctgggtgttgaccgtgctgggtgttgaccgtgctgggtgttgactgtgctgggtgttgactgtgcttggctgttgaccgtgctggctgttgaccttgctggctgttgaccgtgctggctgttgaccattctgggtgttgactatgctagctgttgactgtgctggctgttgactctgctgggtgttgactgtgctggctgttgactgtgctggctgttgaccatctggctgttgaccgtgctggctgttgaccgtgctggctgttgaccatgctggctgttgactgtgctggctgttgactgtgctgggtgttgactatgctagctgttgattgtgctggctgttgaccatctggctgttgaccgtgctggctgttgaccatgctggctgttgaccgtgctggctgttgaccattctgggtgttgactatgctagctgctgaccgtgctggctgttgaccgtgctggctgttgactgtgctgggtgttgactgtgctggctgttggctgtgctggctgttgaccttgctggctgttgaccgtgctggctgtcgaccgttctgggtgttgactatgctagctgttgactgtgctggctgttggctgtgctggctgttggctgtgctgactgttgactgtgctgactgttgactgtgctagctgttgggcttggtgttataggcatgtcttccctatttaacatttacatttttttaaattaaaaatgatgtcttctctaggcctctctaggccctacctccaagaatggggtttctgctcagcgatgatcctggagtgttaattggggcagacaggccctcctcagccccctgctcctgcgtggagttcgcctcccc

SEQ ID NO: 29680 - DNA, 1364 bp, Artificial sequence
  DNA replication origin
ccagaatggtcaacagccagcacagtcaacagccagcacggccaacagctagcatagtcaacacccagaatggtcaacagccagcacggtcaacagccagcatggccaacagccagcacagccaacagccagcacagcaggaaaaatagtcagttcccctccatctgcaacccccaagggccacagtgtcttctgaatcctcccagagatgggccctgctcaggaaagcatgtgtctgacactgtgtatctcacatgcacccacacatgtggcagcaaagcccagaatgggggtctccatccacagttcacatcaaaatcactgcagaggtgttcacgtcctcctaaagctcccacggtgaaatcctaccctgagaggatgagtgaggaggtggccttcgggggagggtgagtgaggaggtggccttcgggggagggtgaatggccttcgggggagggtgagtgaggaggtggccttcgggggagggtgaatggccttcgggggagggtgagtgaggaggtggccttcgggggaggatgagtgaggaggtggccttcgggggagggtgaatggcctttgggggagggtgagtgaggaggtggcctttgggggagggtgaatggcctttgggggagggtgaatgaggaggtggcctttgggggagggtgaatggccttcgggggagggtgatggcctttgggggagggtgaatgaggaggtggccttcgggggagggtgaaggccttcaggggagggtgaatggccttcgggggagggtaagtgaggaggtggccttcgggggagggtgaatgcccttcggggggcagttagggcaggaggctggggtccccccgatgggatcagtgccctcaccaaagaggccaagggagacccctgggagtgcacagagtgaaggcgtcacccacagccaggaagagggccctccccgccccgtcctcggacgctgatggcagattccagcctccagaacagtgaggactagatccccgtggtttcagccccgcagcctgtgatgatttgttacagcatcctgagcaaagacaatcaccgaggcaagtttttaaaaattcagaagactggccccacccccacaagctgcatccatcccagtggatgggtttgggcagagcgggttttttgttgttgttgatgtttttaacttcgtagacaatgttagtattcagccagtgctgagagccgcacgatgcaacgcagccctgcagcttgctgtttcttgctgtttctcctgtaagatagctggttctgcttcactacgattctcccaaacaccagagccctgatcatacttaacccacagccagctgtgcctggggaagactctg

SEQ ID NO: 29681 - DNA, 912 bp, Artificial sequence
  DNA replication origin
tttttgcccagcctggagtgcagtcgtgtgatctcagcttaccgcaacctgcacatcccaggttcaagcgattctcctgcctcagcctcctgagtagctgggattgcaggcatgtgccaccataccgggctaattttgtatttttagtagagatggggtttctccatgttggtcagactggtctcgaactcccaacctcaggtgatccacccacctcggcctcccaaagtgttgggagtacaagcgtgagtcactgcgcccggcctatttatttatttatttatttaaagtatcaaacagcagccatgagttaggctctggggatacagagaaattgctttgccctcaaaaagctctgagatggtagagtgggggaaatagaggaataaacgagtggcatccactcaggaccctgcgtggtgtgagcttgccggggaaagcctggtacaggcagggaagacctggaggaaggcagggaggctgagctgtgaggtcatcgggagagggccaggaaggggcacgtccatgccaccgggagagcatgtggaagggccccaggggccctgcgaggacagttttgagggtgcacgtggtgccctgaggatttggggcaagggctggcatgggagggtgaactcgatgggatggcagtgaggagcagcaggaggttccaggccagggcagggtgatccagtgtgttgtttctgtccagccaccgtggctggacaggccagaggagagggggtgtgggaggcagtgggcagctgggagctcttccagagagggggtcatgggatgaagcagaggaggtgggctctagggggactcaggaggtagaaggggaagcagaccccctccccacagccaatttgctgttccaaagctgagaccaaggcccgagggcacccaggg

SEQ ID NO: 29682 - DNA, 761 bp, Artificial sequence
  DNA replication origin
aggttggcagggggacagtggggtgatttgtcagccggggtgggtgtcctgacgctggcagggggacagtggggtgattcctcagccggggtgggtgtcctgaggccggcagggggacagtggggtgattcctcagccggggtagctgtcctgaggccggcagggggacagtggggtgattcctcagccggggtggctgtcctgaggccggcagggggacagtggggtgattcctcagccagggtgggtgtcctgacactggcagagcagggctgcattcacagacctctcctcctgtccttggcacagcaccccgggcagcaggtgggaagcccccatctggcctccacctggccctcatggagcagatagggaaagaggtgtggagggtccctcagtcagctgaatggtggagggcaggatgagggggatggggagagccagggtttcctggtggggctgcctgtgtgtggcctcagcgaagctgggggcctgggggtgggggcgggagcaacagtaaggacctcggagccacagagggaggacagctggaagaaggtgacctctgagcaaggggctcgagagtcccaggcagcgccgttcccaccgcccccgttccagaattttccatgactctccattgccacctcctttcgtctcccggcctgacatcccccagaacagccaacgtcactgtctcctccaaatcccgcactgccttcacctcccagctcctctcctctcattggtgtggtggcgtc

SEQ ID NO: 29683 - DNA, 1151 bp, Artificial sequence
  DNA replication origin
gggaggagcgagcacctaggcactgtgagaaggagaaatggcagaggccaggctcctggtggggcctgggtggagggtcggtgtctcacttgggctcgcagctggggaatttccaggaaggggctcttccatctggctttccccaaagcagccccagcgggcttccctccagtcctgggggcaggggcaggggaacagcctctgtgacttccttgctctggattctttgttttaatccctgtaaatttacatccttatttaaccctaaaaagtagaagcagaaagggaagttgaggctgggtgagtctgtcggctctctggggtgggatcccatacgtgtgtgtgtgccagtgtcaggcatgcagggggtgaggctgggcacgggaatgggcagctcgcagccagcctgggtgtgcagggcgagtttgccgggtggaggcagccggccagtcctgggtctgtgcacggctggccagaggcggccagtgtgtgcgctgctggcccacatgaatccatgcgtgtgtgcatgtgtgtgtgtgtgtgtgtgtgtgtgcgtgcgcgtgcatgttcctggggtgactcccaacagctcccatcccctccccgactcagtaaggcgctcccatttttctgacatttgtgcgcctcacgtaccggcaagaagtaatttacttagaagaaattaaaagttcatgttaatcgcgcacactgcagtatgcaaatgaggagcgtattaagctcactgatgcagagacggagccctcatcagcacttaaccctctgcacgccggcccctcatcagcacttaaccctctgcacgccagcccctcatcagcacttaaccctctgcacaccggctccccttctgcacagggtccaggccttggagaggcctccctgttctcaggcggaggggacgagctatgtctggagccctctctgagctctctgcagatgtccatccggcatgtgcacggcaccctggggagaggcacagggtctgaaaccctctcagctccagtccgaggccatgggtggtgacgctttggccaggccctgggctctctatggggcagcctcctcaagactcccaactggcctgaggccacagcagagaatccccaaggcctaacatgccgtgctcaccacag

SEQ ID NO: 29684 - DNA, 2314 bp, Artificial sequence
  DNA replication origin
accaacgggtcagcccccaccctgcacttctgtccacacatcgtggcgacctgctggtcaccggccacgcctggcacacaggatgtgctcagtaaagcctgggctcgtgagtgccacgcacaagttcaacagaggaagctgcagagcaacggctacgcaggccaggacgggaggcccggggaggccaagggcatgctgaggccaggacgggaggcccggggaggccaagggcatgctgaggccaggatgggaggcccggggaggccaagggcatgctgaggccaggacgggaggtccggggaggccaagggcatgctgagcccaggacgggaggcccggggaggccaagggcatgctgagcccaggacgggaggcccggggaggccaagggcatgctgaggccaggacgggaggcccggggaggccaagggcgtgctgaggccaggacgggaggcccggggaggccaagggcgtgctgaggccaggacgggaggcccgaggaggccaagggcatgctgaggtctaggtgggaggcccagggaggctaggggtgcccggaggtctgggcgggagggtggtgggaataccaatagctgagctgctctgcaagtgctcacaggcacccacggggggccagccgagcacaggagtttgctgctgccaggaagacaccgacgtggcccagaaccaggaaagctgctgctgccgtgagatcagggctggtggggccagacagcggcaggggccgaggacactcctggtcctagtgctgggaagtcggagccaggcgcttcctcagtcccccaacctagccaggctcccaggccagccccttgccatggacgcctctgctagacgtgaggacaagaggcactgctgccatggggccctttcctgggttcagcccagcatggttgagatgtgtccctgtggtgtcagagaaaaggagggacgtgcggttcagtaactggcccagagcgcccagagccgcacagccagtgacagatgctcatggactaccggcctcctcccgtccctcaggggattgcaggtgtagggaaagggcattccccggggcaggggaactcgagtggagggccggcactctggagaacttgaacccaggccgactcggttgccctcccacctgagccgggagtaaggttgcgccaaggagcaggcgtgacatcagctcaaacaggaggggagggaaggagccccagcgccgcatccccccttgcccaggcctccctgggctcctcctgcacaggatggggtgaggccaggactgagagcagcctatgggcactgaccggagtccagggagcccagcactccctccatggtcctcgccgtccgactgctgggatccacttggggtcagtgcccagtgggcctgagagcccctagggcagaggacagacccacccccgcatcatgcccactctgccacacccagctgggggaacctggactcgcagctgcccctccgagctgtgggttcctgaggaacaagggtcagaggtgacctctccccctcacctgttcctttggagactgtgagataaaactgaatggattcagaagctgaaccgagggcagaggccaagaggctacaggatgagtggggccccggtgtgtgtacgtggagctgggctgtatgggatgggtgggggacctggtgtgtggacatggagctgggctgtaggggatgggtgggggccctggtgtgtggatgtggagccgggatgtggtcaggctccccagctgcccacaagggacagtgccattaggcggatgctgcccttggggaatggctttggggtgtcaagaggatctggctctagcccttgctcccccaggccagccaggctggttccctctgtggggcctggacatcatgggctggccctggagtggctgccgccttccatccatgaaccagcttcatctcactgtcattaaaaacccaggtgtcggctgggtgcggtggctcatgcctgtgatcccagcactttgggaggccgaggtgggtggatcacgaggtcacatcgagaccatcctggctaacacggtgaaaccccgtctctactaaaaatacaaaaaaattagccgggcgtggtggcgggcgcctgcagtcccggctactcaggaggctgaggcaggagaatggcgtgaacctgggaggcggagcttgcggtgagccgagatggcgccactgcactccagcctgggcgacagagcgagactctgtaacaacaccaccaccacccaggtctgacaggtgggggaaatcacacgaaaaccagcaccc

SEQ ID NO: 29685 - DNA, 1151 bp, Artificial sequence
  DNA replication origin
ctgagcacatcctgtgtgccaggcgtggccggtgaccagcaggtcgccacgatgtgtggacagaagtgcagggtgggggctgacccgttggtcacagggcagtcagcagctgagcttagacttccggaacccaggtctctgaacccacagcccgtgtttgggtcacagtgtgctgctgagatgggagcgggtggaggcgtgtggctggggtttcccaggcgtgtggatgggcgcggggctggcctgccagggtgcagcgatgggcgcggggctggcctgccagggtgcagcgatgggcgcggggctggcctgccagggtgcagcgatgggcgcggggctggcctgccagggtgcagcgatgggcgcggggctggcctgccagggtgcagcgatgggcgcggggctggcctgccagggtgcagcgatgggcgtggggctggcctgccagggtgcagtgatgggtgtggggctggcctgccagggtgcagaccccatgcatctggttgctgtgaagctgctggggggagcaggaggggtctgcaccaggtctccaggctctgcggccgtcatggagagagcttgaggttgctcctattcactggagacagccgttgtggggtcttcaacgctgaggcccgtgggctcctgggtgacctgtgtggggggcatagattagccctgagtgggcccaggcatgagggcgtcttggaactcatctaacccaggtggcaaacaggggccgcccgactgccagggagaattgacgagcagtggcgtcctggaattcccgtgaggtggcgggagaagattctatgattgatccgtcatgcctgccgtggctcaggatgggaccggcctctcaagctacagatcaagaaactgagaagggagtagcctaaagtcaccatgagagtggccaggtctgggccggcctggcctccaccccgcagagaccatctcagctctgctcgctcagcctcgtccccgcctctgacatccttccattcccgctcatggccctctctgtctgccaccaccctccccgccatgggtgcttaaagcccccggcagctgccctcccgtcccccaacatggcccttcctgacatgccagcccctcccagcagcagagccttccctgtcctgaagaag

SEQ ID NO: 29686 - DNA, 752 bp, Artificial sequence
  DNA replication origin
tggggatggtggtgatggtgatagtgatgatgatggtgatgatgatggtggagatgatggtgtgatgatgatgatggtgatggtggggatgatgatgatggtgatgataatgctgctgcttgcagcgtgagtggacttggatcagtgtgtggatcctcccaggacttcctcggaagtgctgggcacacatttccaaaaggagcctccttctcatgtgcagctacaaatagcatgtctagcagattgggggctgcctaaccaatcctttcatcagcgtccccatggacaggtctttaagaaagctaaggtcaggaccaggtgccatgggtgctccagagatccagcacaaagctgtgtcctgcaggtgtttagagacaagtgggaaagacatgctggactttgggaatgttaagcgtccatgctccacaagaataaaagaggcctcatgaagcttcacaagagcagtggcccagggagcgaggggagagacagaaggctgggcagaggcagtcggtctggacagggccctgagactggttacctgagacagaggtgaggaagaggacgtgccaggagagggccccatggtgtgcaaactgagggctcctgtgtcgtgtggtaggaggtggctggaagaatggggtaggacaggcccccacaggcaggaaggttgggtttctccagtaaatgcagagcgaggccctgtgagaaagggttccagtctggcccgtcttagctttcagagtcacggc

SEQ ID NO: 29687 - DNA, 1878 bp, Artificial sequence
  DNA replication origin
ggtgacgtggtggccgttggtggccgtcagggcagggtggccactcccttggctcttcctggctcctcgcccaccttgcggagggagcagcctcatcctcagggctcggacaccagctccacctcgcggcgccaggtcactccatgcaggaagaggagctggaggctatgaccgccggctctgtccccaacacctcgtctccccgatgcccgggagttgtcacctgcgtctccagggtcagaggtcatgcataaccaacatggggctcttcaagcaagggaggcgacagagacagcggggtcagcacagagcaagtgccggcaaccgctctctagcaggagcctggccgaggctctgttccaccccgtcctcagcctgaggctggcctttcacgtccagttgggatgccctctggccctcagacgtaggtcaggactcccggactgtgcccatggcaggcaacaacccccggggtcatcccgccagactctcggccagccctgctgtcttgccagccgccgtgtccgcacaggagccagggttggcactcgatgaataaacgcctttcaagagaagaaacgcagggagctgggtgtggtcaccgtggcagaccgttgggggaggcggggggctgggcaggggacagggtggccggggctggcgtgtgtcccaggggacctggcaggggaaggtacgcccaatcaggaggctcctcgatgtgacgtggatccgtgtttcctcttcttcttcctggtggtttacgtaagagggagagcaatggggacgggcagggacagagctgcgggctgaggttcctccgttcggcgaagccccttctctctgcccccgcctgctctgggctttcttggctatgtctgctcctgacaggagggatgtgtgttgccaggggtgggggcttggcgtgtgtgcgtgtgagaatatgtgtgtgtgtttaaaatacaaaaaaaaaaaaaaaagaagcgtgcctatactcagccgcgagacgctggccagcctccatccgtgccaactcccctccgagctggcactggggactccggaggcacggggaggaggaaggtgcgggcagcttgcggtgaggatggacgcgtgccaccgacgtatgccagcggctgcagggggccaaacgcctatccacaaaacccaccgcgatcgctggcagccgtggcgggaggcggcagcagttggcagaggtgccagggagggccggctggggcaggtggatcctggcagcagcagcgcaggtaaagcgtgcgggctcgcggggtgtgggcgcctggcatctgcgtcgggtgccagaggccggggccggatcttggcctggctctgggttgcagggcgtggcagcatcagggagggctgaatcccgcagggttctgggccagcctggtagaggacggctcctctcggcttccccagcgtcgccctggggcctgtttccagctgtgcttggcccttcgtcctccagggagctcggttgggtgggctcggtggggccagcatggggtcggccacatcacctccgcctgatgccctgtgggcccccagggccaggtctcctctgcccagttccgtatagtcccccagatggtccccaaatgttggtcgctgtccccatgcgtgggctgcagggctgtatcttggggcccagggctcctaggggagtgcgtctgccttccctctcgtcttcccggagcccccgccccacctcttgctcccagcctggcttggtgcctcagagcctgtgcggaacgatgggacagacgccaaacgtgtggtagcaggagtgcgggtgacggtgcagcaagcccagctgctgagggtgggaaggagcccgaggtgagggactccccagca

SEQ ID NO: 29688 - DNA, 1483 bp, Artificial sequence
  DNA replication origin
aaggcccgtgtggtggaacagagtgaacccagggaggcagcaggggccgggttccagggcaaggccacaaggtcagctgagtagcccaggcccctgacctccccaatcccagggttaggccgtacctcccagagcctcctccagcctggggcctgggaatgcccaatgcagaggaagacccaggggcctgaggtcagaggttgcagcctaaatgcaaactgtgaccaggagcagcctgggtggcacagagggggcgtggcctcgagggcgggatggggcagggcccagggtgggacctgtcagacacgggctgggaacaggtgaggggagtgacagccacagggcagatgccacaggcagctccccgttcactcccgcagctcccagccatgccctgggggttaactccccgttcactcccgcagctcccagccatgccctgggggtcggctccagccctgtgttcctgccgcagggcaccgggaagacgacgaggttctggggagcagggtggccgcaggagccccagccacgcaatctgaggttctggggtgtccagggtattgaggcatctcagggccgagtctcgcggtccgtcccggagggtgttccttgcttgtccattgtggggcattccagggctttctgaagctgaggttgtccttggttggataaaaaaaaagttaacgctgtgaagagcattgcggtgcctgaaaatgcccagaagaggcttctgccaccaggcgaccagtggccagggtcggccgccttcaggcgagcgggtgtgagggggctggtgacccagatgcaacctgtcctggcccgaggacccagcgcatggaggggcagggagccatcctggaggggcctcactcagtcctccagcacctgcccgcccttctccctgcaccgcaccgtccacgagtcacagggagacgggccccccagcacccgcccggccttctccctgcactgcactatttgcaaggctcggggagatgggccccccagcacccgcccggccttctctctgcactgcaccatccgcgaggtgtggggagacgggcttgggttgtcttctagggtgacgtggtggccgttggtggccgtcagggcagggtggccactcccttggctcttcctggctcctcgcccaccttgcggagggagcagcctcatcctcagggctcggacaccagctccacctcgcggcgccaggtcactccatgcaggaagaggagctggaggctatgaccgccggctctgtccccaacacctcgtctccccgatgcccgggagttgtcacctgcgtctccagggtcagaggtcatgcataaccaacatggggctcttcaagcaagggaggcgacagagacagcggggtcagcacagagcaagtgccggcaaccgctctctagcaggagcctggccgaggctctgttccaccccgtcctcagcctgaggctggcctttcacgtccagt

SEQ ID NO: 29689 - DNA, 1280 bp, Artificial sequence
  DNA replication origin
acgggccagtggccaacacctggccagacgggccagcagcctcctgccagggccctgggctaacagctgaggccacctgcacccaggaagtttcgtagtgattttcaaggtctggttaccgaaagggcgaagggatgctgggcactgggggaaatgctgacctccagcctccacccccacggtgaggagcgtgaagccccagggtgggtggggagattccttgcaaaggtggccccgtccctgcacccctcacccctgctgctcccccacgaggagtgggaacccctcatccatgcccacacaggggccctgctgctcccccacaaggagtgggaaacttgcagttttccgggagggactgtgcaccaactccagcttaggcctccaggggctcagccccagctctccaaagcttccatcgccatggagacagcaggatcagcagagcagggggagcccatgagggcatggctgtgtccagcctggagcgaggtagggcagggggtgaggggtgaagcccggggcccaggcttggcggggtgatgggaatgaggcaacctggcccaaggacccaaagctgatggagacccacagacaaggggaggttgaggagctgcagggtctcctggtggtggtgggggtctgggaccacccagcctcaaaaaggctgtgagaatcacaggagtgtttgagacaccccacaattaaggggcatggcggggaccaagcagggtcccagagcccagagcagagacggtgggaaggacgggctgtggacgaggatgggttctgacaagaggagggtgacagagcggggcggccatggcggcaggagggctgcaggggcaggggagggagtgaggtcagtgggagctggggagaggacagggcgggagggcttgaggggctgctgaaggtatgcactgaggcctgcagagaagccaaaaaacgctgggttttgggtgcccccatagaaacacagggcccaaagggaaacggggagcccctctctacccgggacccgccctcaagggtggctggatgaagtgtgtctgggggcttatggtggtggtcacgctccaggcccatcctggaccggggattctgggcccaggaaagctgctggagcctgtggtcacctttgacccctgcggcctggctgctcctgacagcatgagttgattcaaggacaaagccaggacccctggcttggagggacagtcccacaacccctgggtcccaggctggcacacgtgcctcctgggccacccccacctgcc

SEQ ID NO: 29690 - DNA, 1558 bp, Artificial sequence
  DNA replication origin
cctaccaggccggttcccctgcggaagctcccagtgaacacccgaagcctctgccacacccctcagtcacagcccccgagaccgggtaggtttgcctgtgagctgggcgggtgccccaggagggcagacctggactccagcagcagaggagaagagatgtggcgccaggggggcaaccagtggagccacagcaggcaggcagatgttatccagaaaagcaaacccaggcagagtggtgggcagcatagctcaaatccaggcttttcaccccaagtccagaatgttctgctttgaggcagagggagcaggcgaggcaagggtgctggcgggggcgagggtggcgttggggggttgaggacggcggcgggggggtgagggcggcggcggagggttgagggcggcggcgggggggtgagggcggcggtgggggggcgagggcggcggcagaggggtgagagtagctgtggagggttgagggcggtggcggtgggggtgagggcggtgggggtggtgagggcggtggtcaggggtgagggcgacagtcggggctgagggtggcagcagtcagtggtgagggcgctggtgagggcaagggtggtggtgcggggtgagggcggcagcgggggtggtgagggtgctggtggagggcaaggacggcggtggggggggcaaggggggtgggggtaagggccatgccccttgctgcaccgagggaccctggcacaccttggagggatccccctcccaccagccagcagcacccctagggtgcccggctgtccctgcttgagtcctgtagactctggcccatcaggggccacatgtggctctgctcagcctgggggacgagctcatggtagacagggaggggtacgggcaaagacgcccccaaactgcccgcatggggagagagcctagctggtgggtgggatgtgtggctggaagatgtgggctgcaggcaggccccactggtgcagctggagttcaggctccccagagccagattccagttgttgagtctccccctgagaccttgctccattcccaggcagaccctcccaccctggcccacttatagatgcccttcaaggtacagcttaaatctcgcctcctgcctcagacagctcgggctgctataagaaaggaccacaggcttgagggcttatacacagcagacctctctgtctcacagttctggaggctggagtccaagatcaaggtgctggcatggttaggttctggtgagggcccgtttccaagctgcagatggccagattctcgctgtgtcctcgcatgacgaaaagagggctggtagctctctcggctccctttcatgaggggagcggtctcattcacgagggtccaccctcatgacttaatcacccaccaaaggccccacctgataccatcactctagggataaggatttcaatatatgaatttggggaggacagaaacattcagtccactgcacctcctgcataattccaactccttccagtgggggtgcaccctgtgctctgaactcagcctcttcccccaatttcgtgagatactg

SEQ ID NO: 29691 - DNA, 1430 bp, Artificial sequence
  DNA replication origin
cccagagcacatttgtctcgagtaccaggggcatctggattcaatcaaaacgacagctgcgcagtctggccccggccattccagagtgggcgtggaggcagccagtctgctgcagcacagccatccttgtaccccctccccaggtcctgctgggcccttggtgcctcggtgtcccttcctacacggctccccactgtccccgaggagccagccagcccccagcacctcctgtccttgtagaccacagagtacgaggaaagaaacgcgtagagccagctccggccagcgacagttgagactgatggtgcctgagtgggagagagaacaataaacccggaactgaggtcttttccgagacagcactgggcttagggatttacacaacatgaccccattcaactccacaagcccataaagaggggccctgacttccctgctttacagctgaggaaagtggaatgggcaggtcagggtgtggtggccccagctgggagcactttcccctgccggcccaggaggtaggaagagagcggagccaggaacaccgcagcagagcccaggacacccgtggggtccagagtcgggaaaggaaccgggagggggcggcagaggtgcggaggggagaggggtgttgaggcctgggctcacttgctctgtgatctccaggaaggccccggcctcactgaagctgagtttactcatctgtaaaatgggatgaacgttggcaccaaccgcatagggcaggaggatcaaatgagaaggtcgggagggatgcaggcccccgcgcagccaacgccgtgtctgtctttcctctgtctctcgcggaggctgggttggctgactggagaagagaagctggggagagcagccggacccagtgctcacccggctgccctgacctccaggagcatttcccggaggatacaggcgacctcgctcctgttccatctgtggggacgagtaagcaatgtggtggtggctctgcccagagtgagcactgtcctggaagcctgcaccctgaggctggttcccgatggttctgccttccccaaagcggccgttcctaccaggccggttcccctgcggaagctcccagtgaacacccgaagcctctgccacacccctcagtcacagcccccgagaccgggtaggtttgcctgtgagctgggcgggtgccccaggagggcagacctggactccagcagcagaggagaagagatgtggcgccaggggggcaaccagtggagccacagcaggcaggcagatgttatccagaaaagcaaacccaggcagagtggtgggcagcatagctcaaatccaggcttttcaccccaagtccagaatgttctgctttgaggcagagggagcaggcgaggcaagggtgctggcgggggcgagggtggcgttggggggttgaggacggcggcggg

SEQ ID NO: 29692 - DNA, 1086 bp, Artificial sequence
  DNA replication origin
aagcacctttgtgagcaaacactgccaggcagatccgtgttttcctttaatcaaatgaaaaggtgtgacccacacgcccccagcagtttccagggggctcattaagggagatgtggacagaatccgtggcggggtggtgattcccacccagcctctgccagtttccagggagctccattaggccagaggtgtgaacggaatcaaggaaggagggtgattgagtcagggagcgggggagattggatcggggaggggatgattgaatcggggaagggagtggtgattgggtcagggaggagggtggtgattcccacccaacctatgccagtttccagggggccccattaagccggaggtgtgaacggaatcagggtgggagtgactgaatcagtgaggggggttggatcagggagggggtgactgaatcagggaggggggttggatcagggagggggtgactgaacaaggaggggggttggatcagggagggggtgactgaatctgggagggggtttggatcagggagggggtgattgaatcagggagggggtttggatcagagagtggggctactgaatcagggaggggtggtgtttgcatcagggagctgggggtttgtgattcccacctggcctctgccagtttccaggggcctccagctgggaggatttcctccgggaaaggctgggggtggacgggggcaccttggggcaggctgagctatgcccacattgtcaggcaaggaggtatggctggctcctggaagggtccacggaaaccacgcacctcttgcagaggctgcagtggctgcagacgctgtctgctcaccggcgaaacatccattccctgagcatctgcttcaggggctggggatggagatgctaaaaatgacaggagcgagaaagagtagcagttaatattcaccgacagcctcattggcctggctctcgactcctcaccgcactcctgaggtgggagctgttactaccccctcgtagttgcaggggaggggcaaccgggaggaggaacacagggagctcccggctggaagcaggagcgggctgagcagtcaggaccaagacatgc

SEQ ID NO: 29693 - DNA, 924 bp, Artificial sequence
  DNA replication origin
gcagacgctgtctgctcaccggcgaaacatccattccctgagcatctgcttcaggggctggggatggagatgctaaaaatgacaggagcgagaaagagtagcagttaatattcaccgacagcctcattggcctggctctcgactcctcaccgcactcctgaggtgggagctgttactaccccctcgtagttgcaggggaggggcaaccgggaggaggaacacagggagctcccggctggaagcaggagcgggctgagcagtcaggaccaagacatgcagcatctcacccattcgggggcccccccgcccaaggcccctccccagggcacctctcctctgaggatcggatcctgaactcaaagaacaggcgagagggccacagagagccccaggagcagtgagtccctggggctcctagacctccctagctcaaagccctttcacgtgggggccagctccccgccaagccaaggcccggaggctgcagtgggcagtgccacaaggctgagctgggagccaggcaagagttctctttggaggcagctgcatccccttccatggggtcctgcagaccttctttccgcagagttggggatcccagtgcacagataacttcgtgtgctgatttttaagtttgaggttctcattcaacattagaccgtcatacacaattcccacgtttctatttggcgtcatgattaatggctgcagagccgctcttatttggccatctcctgattcactaaagtctgtgctgggatatccaggctgtttcctgatttgtggctgctgtaaaccaccctggcacaaacatcattgaggatccagctttgcagatcatttgttctttatgaaggagttggtctggtgttgcatgcagaaaagtttggttttcagcagaggggggtgtcatttgttcattga

SEQ ID NO: 29694 - DNA, 918 bp, Artificial sequence
  DNA replication origin
acgggacgggcgggacaggggaacacgcgcgcccggaacccgccgccacggcgccgcgccggggggacgcgcttgggcgacggacgcgccgcgccggggaagctgttgggcgccggaactggtccggcccgactcacgaccccgcgggacccggccggaacccggcccgaccccggcgcgcgcgcggcggaggacgaggaagagttgtggcgaggcagatcctgccccgtggccgcggccgtctcgtaggtgcgggcggcggggcccacgggaccgcggcggggtcggccgggcgcagagctctcgggggcgcgggctccggcgcccgcccctgggtcgcagctgggcttgagccgtggcccgtggcgcggtcgcttccccgcgagccgcctggggccgggcgtcggccttcccgggacgccgagcctctcgtgtccggtggggagcggggcccccgcgcggggtgcggggagagaagctgtgcggacgccgggcccggtgataccgtcgagccggcggggtccgtgttcaggcatcctcagaacgaatcgtctttggttgtgtttggaataaattcacttccatttctcattgggcttcagaagtcacccttgaagtactccccgttttagttgtttgctgcgtgcaccttgctgggcgcgtggggcacaggttcacagccggcctagcccctgagggcatgtagatctatgagcaagcaatggagacgtgcggccggccgtgaagtatttggaaggtactgcaggcagcccattccctggagagagggaaggtttaaaggggtgaggcccggtgcagtcaggagttgatgttgctgtcctgagtctaaattccaccaggcaggccaggtgcagtggctcatgcctgtaatcccagcgctttgggcagcagaggcag

SEQ ID NO: 29695 - DNA, 1064 bp, Artificial sequence
  DNA replication origin
gtagcagcagcaaaaccatgggctccggtggcctcacagaaaaggggcaagggaacggcaaagagagcgaagcggttcagacatgtgccttggacaacccggaattctctccaggaacaaaggtgccgcttccctgtgcacttcctggggactgggaggagcgcgcggcagccacagacacacacatcccactggaaactggatggcagtggagccttcagttcctgcagtgcaccctccacgccacccctccctctcacaaaaagaaaaaataccccacccacgactctgctggaggtgcgggcctgtgatgcgtgtgaagactcactgagccacacgtgtgcgtttccagttagtgaaccacacctcaacagccacgagggaaaagaaacgttcccacgcctgcaggttcatgggagagtgcagagcaaacacgcccctgggtggcccaaaagaccagcttgtcctgggagggaggggtttatccagggagctgggaggggaggagcggggctgagaggaaaagcagcagaacgtgccccaggcaggaggcctcacagggctgcccacgaaggcagagagactgcataggagaggcaggcgccgtgggacatgtgggcagatgaagcaggagcaagcgggtcagctcactgtcctcacccttgtccttcagacgccatgacagagagagagagagacggacaggagagagagcagacagacagacggagacaaagacagatggagagatagagacagatggagagacaggagagatagagaaagagaagacggagagacagatgaagagcgatggagagagacagagagaagacagagatggagagtctgacaagagagacagagaagacagatagatggagagatggagagagagagacaaagagagacagagagagatagagagacagagtgtgacagagagagcgatacagaatccaggcagctatcgacgtggaagagattacagatatacatacagacgggtagagagagagagagacagttagagaggtagagacggagacgggtagagagagagg

SEQ ID NO: 29696 - DNA, 1108 bp, Artificial sequence
  DNA replication origin
gtggcacgctgggcctggcctgccctgggcccctcatacatcactttcccagttacttcccaaagcctcacagctgcccacagattctggtgtcattcccacttttacacacttgctggccagggagggctggcgccttgccctgatggccccggggctgtccacgatgaggggacctgtgtgtgcccggcacacgacgggctaaggcaggatctgccctatgtccccaggaggggctgtcctgaactctgcatggcaggtggaccacactttgtactggctcatttattagacacccatgatttgctcagtgtatccatcccacctgcacagtctcaacgtggctaaaatcatatcttacactggccggggtgggggcagagcccaggtggcgagacgtgtcccgccggcacacgcagggctgccgcagcctcgctctgcctgtggtttaggttgctggtgggacggcagaggctgctcatggagtgcggccctggcgatgtggcgtcagcacgggcatgacctaggggcagagcagacgtgggacttcctgtctatcccggggcgtgaggcctttgccctggcctgcgtcaggggagtgcctgaacgcttatcatgtctgagtccacgctgagatttccggcacttcaagggtcagcatcgagggtcagtgcagtgaactctgcaatccatggggcgtcccggcctccagacgcttggtgaggggctgtcggtgcccggctcggtcttgctgatcctgctgggcctgtccacacctggggtcctgcaggcgaagccgggctagtgtggtgtgcggagtgtcacctcgggagttctctgtggttccaggtatgcagacgccccgaacctccactctggtcagaaacccgtgtcaccactatggggggtgtggcggggccagcttcagccccctttcttccatcctttctcctcctttatgttttgcttctgaagatttttaaatgggggtgaaacccgcataacacatgacttcccatttcagtgcgcggcacggcggtgttccgcacacacattgcacagccccccacttcccctagtcagaactcccgcacagcccacgaccgcc

SEQ ID NO: 29697 - DNA, 1391 bp, Artificial sequence
  DNA replication origin
atgccagccgctcctgcctcccccacctgcctctgtgcctacagcccgcttctgcctcaagatcacacagcgggcttgtgaggccaggggtctccgctgctgctcaaggagatggcaaaggtctgtttcaggtaactcctctgacggccacaacgatgtcttcagacgtcaaaggtctgtctcaggtaactcctctgacggccacaacgatgtcttcagacgtcaaaggtctgtctcaggtaactcctctgacggccacaatgatctctgcagatgctctgactccacgtgccctcgctcagagacacacgcgcacatttgccacctggggcgagtggaaggtgacgtggaggtgggcacctctgccgggcagatgcgggagcagcagcagcagcagcccctcctgggggcatccaggggtcaggagaggggcggtagggcagggcggcatccctgcaggggtgaatggcgtcttaggctccagccgggtgaggaaacctgataaccgaactccttagagaagagccagggatcccgggaggaccaccaggagcttgtggggaaggactgaggggaagagccccaggtctcgggaggaccaccaggagctcacggggaaggattgaggggaagagccccgggtctcgggaggaccaccaggagctcacggggaaggattgaggggaagagccccaggtcccgggaggaccaccaggagctcacggggaaggattgaggggaagagccccaggtctcgggaggaccaccaggagctcacggggaaagattgaggggaagagccccaggtctcgggaggaccaccaggagctcacggggaaagattgaggggaagagccccaggtctcgggaggaccaccaggagctcgtggggaaggattgaggggaagagccccaggtcccgggaggaccaccaggagctcacggggaaggactgaggggaagagccccaggtcccaggaggaccaccaggagctcacagggaaggatggggagaggggagtggggggctggagaacccccagactgagaaattctgctcggagcgagaagggagctgggcccaggtggccccatcccccaaggttgaacatcagcccagcctcccaggccctccacgtgctcatgggcaccactgccgggcactagcttacttgtcaccctgtctgaggcgtgttggggtaggagcaagagtccgctgcttccagggcccagctggggctccatgtgtccctgggcaccccagaaccctctgggtctcagccgttgggttcttacatctgggccagtggcaaagggttaaagggaccttgtgacttagttgggactcactggcctcaagaagcgaaaatcagagggacagcagccccagc

SEQ ID NO: 29698 - DNA, 957 bp, Artificial sequence
  DNA replication origin
ggcctcaggaaacttacagtcatggcagaaggcaaaggggaaacaggcacatcctacatggccggagcaggagggaggagggaggagccacagagtgagtgagggaggagggagggtccacagagggagggagggtccacagagtgagtgagagaggagggagggtccacagagtgagtgagggaggagggaggggtcacagagtgagtgagggaggagggaggggccacagtgtgagtgagggaggagggaggggtcacagagtgagcaagggggggaggggccacagagtgagcgggggaggggccacagagtgagtgagggaggagggaggggtcacagagtgagtgagggaggagggaggggtcacagagtgagtgagggaggagggaggggtcacagagtgagtgagggaggagggagggtccacagagtgagtgagggaggagggaggggtcacagagtgagcggggggggggggaggggccacagagcgaggagggggtgggaggagccacagagcgatgggagagggaggtgccacgcactctcaaacatgcaggtcttgtgagaactcactcactagcacgagaacagcaaggggaaaatccacccctgtgatgcagtcacctcccaccaggtcgctcctccaacagcggggatcacaattcaacatgagatttgggtggggacacagatccaaaccatatcgttcctccctggcccctcccaaatcttacgtcctttttacattgcaaaatacaatcctacttcccaacagtcccccaagtcttcactcatttcagcattaattcagaagtccacagtccaaagtctcgtctgagacaaggcaagtccttttcacctatgagcctgtaaaatcaaagacaagttacttcccagatacagtgggggtgcaggcattgggtaaatacaccagtgccaaaagagagccgc

SEQ ID NO: 29699 - DNA, 948 bp, Artificial sequence
  DNA replication origin
ccattccaccaacaccaaggttccttctggaggctcctgggagaatccattttccgcctcttccggcttcgggaggcctctccttggctgggggcccctcacgaagccagtagtggcaggccagtccccctcacgcccgcctccgccatggcctccctcttccactcagcaggacggaggtaccctgtgccctcgcgggtcacccagggcagcctccctgttgagggagctgatgtgccgtccacagtcgcaggtccccgctgctgtgtgaactcacaggtcccagggtgaggaagcggggtcttcggggcaaggaagcggggggtctttgggtgaggaagcggggggtcttcgggtgaggaagcggggggtcttcgggtgaggaagcggggggtcttcgggtgaggaagcggggggtcttcggggccgtcattctgccacccacagatgggagcctcctcatgaggcgtccggcctcagtggcagctggagagccacaggggctgtggggtgcccagcagggcgggctcagtactgcccgcaggaccaccctgcagttagggcgactcagcggctcacagccttctcagttcagttcctatcagctgaccgaggcggccccaccccacctgcccttgccctaggagctggggatctccatccagcaagactgcgaaccaggccacctctgagaccggctgccacagaccacatgctggccctggctgcccgctaaggccaggggacaccctccttgagactcccagggtgatgctcagctcctgaggaccgagcggcctctgcatggcgctccgtccccatccctccgcctctccagatctgcctggctcaacgcacaatcatcctgggccctcccagccttacctggccaaaccgtggccttgcccacctgcctggaccattccctcctgattgggtgcgatctgc

SEQ ID NO: 29700 - DNA, 1113 bp, Artificial sequence
  DNA replication origin
gagaggacagacgtccggaactgggtagagatgggccgtgggtgggatctgctggggacacagacccacgcagcaggggagaggacagacgtccggaactgggtagagacgggcctgccgtgggtgggatctgctggggacacagacccacgcagcaggggagaggacagacgtccggaactgggtagagacgggcctgccgtgggtgggatctgctggggacacagacccacgcagcaggggagaggacagacgtccggaactgggtagagatgggccgtgggtgggatttgctggggacagagacctatgcagtggaggagaggacagacgtccggaactgggtagagatgggcctgccgtgggtgcgatctgctggggacacagacccacgcagcaggggagaggacagacgtccggaactgggtagagatgggccgtgggtgggatctgctggggacacagacccacgcagcaggggagaggacagacgtccggaactgggtagagacgggcctgccgtgggtgggatctgctggggacacagacccacgcagcagggaagaggacagacgtccggaactgggtagagatgggccatgggtgggatttgctggggacacagacccacgcagcgggggagaggacagatgtctggaactgggtagagatgggcctgccatgggtgggatctgctggggaggggagcgttcgcatggtgtggggggctggacagccactctctccgggaccacagctttctgggctggggcaggacaaggccactcatgccccacttgcccttctgaggttcagccaaatgaggctcccacccccatgactcacaaggcagctgggagctccggcactacccgtggggatggtcaggactctaggggccttggggggtgtgggccactccaccgtcagccccagccccatccccagccacagcctgtctttggagggtgctgactgggggccattgcagcttatggatccctgtgaaagcctgaacatcgggagcagcctggtgacctctgctctctggttcccccaacagtgctgtcccacgtccccacccctgtggccagctccgcccactcagcctca

SEQ ID NO: 29701 - DNA, 1186 bp, Artificial sequence
  DNA replication origin
gctgtgaaggcggctcctacccagggtgtggggcgtggagggcagaagggtgacgtccagggagtttgggtgacacccgacaccaagggaggggaccccggggtgaggaggccctggtcttggtctgggggctgtgtccattccagacctgacctgaggctggggtgcctgtggcaggggctctgggggcttgctctgcaggtaccaactgctccctgaggagcccctgggcaagtgcccctgtctgacaggcagggcctgaggctggaggaggccggggtgaggagacaaacacaggtgggccctggccgggagcctggcgtcggccatgggccatgcccttccaacattctactctggccgggaggccgccagggcgctggggtgaggccgacacccagtcctggggccgtcagagcacagaccagcccatctaggcagatgaaggtccccacggagtgagtgaggggtggggagtggatccagaagggctggggccaccagcccccacggcccctgagccctggcctgagtgcatgtggctggctctgggtagtgggccctgcagagggacttccgcccataagtttcccgtaagtttccccgggacagaggagacgcagctggatctcggggtgtggaggaagccaggcagtgtctgtagctggggccatcctggaccctgctgtgctccggctctctgggctcaggggtgacactgcccccacattcaggcaggccaccagctgcccctggcggccacagggggtcagtccaggtgggctcagaggagccccatcaggtatgggggtgccgtttttgttcagaagcccctgaccccccctgcaacacacatgaaaagaatattcgagaagtctgtttaaaacatcttgggcattcaaaacacacggacagacagacagacagacagacggacatgttagacaggaggggctgctggtgggggcggggtggtgctggccctcctgaggacctggggacagcaggtccctggagcctgacggtcagtcctggctctacggggagttgggcacagaggggtcagggggtggcgggcctgtctggggctccctcaggcctgtccctgacctggggaagtggggtcctgtcctgcccagccagcctgacactggttttgcgtcccatctccccacagtgacagagg

SEQ ID NO: 29702 - DNA, 1301 bp, Artificial sequence
  DNA replication origin
cctggcggcctcccggccagagtagaatgttggaagggcatggcccatggccgacgccaggctcccggccagggcccacctgtgtttgtctcctcaccccggcctcctccagcctcaggccctgcctgtcagacaggggcacttgcccaggggctcctcagggagcagttggtacctgcagagcaagcccccagagcccctgccacaggcaccccagcctcaggtcaggtctggaatggacacagcccccagaccaagaccagggcctcctcaccccggggtcccctcccttggtgtcgggtgtcacccaaactccctggacgtcacccttctgccctccacgccccacaccctgggtaggagccgccttcacagctgctaacccctgccctccagcccccactgcctcttcggtaacggggctgtgactggcctaagccctgggcctccacagggcccctgtccagcccaccttgctcaaccgcagcgttccgcatcacgcctgccccttagtggttggggtgtgcatgtatatttatacactgtaattacataaatacaatttaataatcaagggtcaagtgccgttactgcactgtgcaattacagaatcactccagagcagacaccatggcatctcagctgaaaaccggcacccgcctgcatctatcgtgagaaagttggaaattccttagcccagcctcgaccactgcctgcggtgttgggaggagtggccaagggctgggggtggggggacctctgggacatccaagactgcaaggctcctggggggtccgggaccctgtttgttgtccccccgttcctcatactggggagaggaaataggatgggaactgaggctgtggaccagggagccccctctacatcttggccggcccacccccacctcatgcccatgaggtgcgtcccccgaggtggagagttgaggtgggcaaggcagagggcaggagtgatgggggtgagtcccaaaggctcaggactgcagactctggaaaaaggaggagaaggcccagagtggggtcctagctggaggcttggggtgctgagggagggtccggcgtctccaggtccaccaggaaagggaagggctcttctagggctgatggtcctgcagccgaaaatgtacccctgcccccactgcacaggacctccagactcagggtacccagcccttccctgccacctacctctgacacaaggagaaactgaggcacgggggagaacctccagcccaaggctccgagctgggactggacccaggctcctgcctcctgaccttc

SEQ ID NO: 29703 - DNA, 1114 bp, Artificial sequence
  DNA replication origin
cgaggacgaggaggaacgcggcgtccatcggggccgaggcgggagccgggccggagtgcacccgcgacccgaagaagcgcgtccaggctgagtgacagcgcaagtgcgcggggcgggccagggccagagacagagacagcacgtgtgaggggggcggggagggggcggggcaagggctgagtgacagcacgaaggaggcctctgacgggccgagggccggcctgggcagggctaaggctgagtgacagcgtgttggcaggcgggtggggcggagcctctggcgagctagggcggggcgcaggctgagtgatagcccgtgtgcgagtggggcaggcggggcggggccggggccgagggctgagtgacagcgcaggtgcgccggcggggcggtgaccgcacgaggctggtggggcggagccagaggaggatggggcgggcggggcggggccgagggctgagtgacaccttgtgagagtgcggggtggggccggggtggggccggggcggggccgagggctgagtgatagcttttgcggggttccggcgggcagggccagggctaggtcggagataccccggcttgctgcgttgggagcagagccagaggccaggctgtggggaaggcagggtgggtgcgtccgggtcagggaccagctgggattcctggcttcttcatttcctgctccttgggcccggctcgcccctgctccagggaatctgcattgtagtccctgccgggggacacctcttgagcacttccttgggcccctcgcctctctggctgcgtctcctgcgcctccccgcatcccactgaacgctaggcccgccttccacgcacctcctcgcgacctcattttgcccagctcttattcagtatggaactgctctggttcacacgcctctgataccagcgtggctcgtaggacacccccaattcccccagtccacgcacctcctccagcatccccttgttccccgaggccccctgcctggagcaccttccttcctacagaactccttctcatcatccctcaacacccaaggtcaacgctgccgcctcctggagcctccttgccacctcggccagaagccctccctcctgttgactgtggca

SEQ ID NO: 29704 - DNA, 953 bp, Artificial sequence
  DNA replication origin
catctggcccccacctccaccacctcccccagcctccagctgtcgggggagggggttattgtcccccagccctgggcgagaaaagaagggacagtgagagggaaggcttctgaggagggagaggtcctgcctgcctccccacctgccacagagccccctggggccttttgaaaggcagacactcccaaatccaaaggaagaggtctggaggaatgttttcacaggcgccagcctccccaccaccatgccctgggttggggtgccagggaagaaaccctgtccccagagcaggtggggaagggccctggaggcatggagccccccagcctgcgctccccggcagagggctgaggggtggagggccggggggtgagcacgcatgctgagccactgtctccccccaccactgtctccagatgggggagtcgggggtggcaggagccgtggtgccctcaggggcagctgctggagggtctggctggccaggcgcctggtcagctgccaggggctgaaattggagccagctggagctgggaggcctgtgggaatgaggggactcaggaagccccttcagtgggggctgggaaaggagtggcttcccttactcactgtgtccagcactccctgaccaccccaggaccacaagagcaatgaatactgtgagcaccgctaagccctttatgtgcattctctctcgaattggccagagagaggctgccctcttgtacccagtgacgtcccaaccacagccggccatgccccagcccagcccagtccctgggggctgaagccactgaggccacatcctccatgtctaggtccccctagggtgtgaggagacgtggctccagctaggcagtacccatgtcgggtgtggggggctgaggcctgggcttccttccactctggcttgctcccacgttggagagaccacggtgccagcagtccagaca

SEQ ID NO: 29705 - DNA, 1203 bp, Artificial sequence
  DNA replication origin
cttcagaactggcccctctcagccctgctgcacctacaccatccctagttgctggttctacacctgggaccccaccccagctgggaggcggctgaggtctggggcagcacacttgactcacagagaaccccagcctgctgggaaggtccccacttctgcatctgggttttgggagccccttggtctctgggagacagtcagcagcaccctgggggccaggcaggggctcttagctcgggtgactgtgaccaaggccaagaagggaagtggctcccaggccactgttcttcccacagtggaaggacagccccagacaccgtgctttggaggggacagctgcctccatgcctcttcttccacatcccttctctgaagcccgcagcagctagagagggtggggcccagggaagatgctccagccgctctgggccaggccaacagctggggccattcctggcatgcctggccatccaggaacggggtggccccagattccagcctgggggaggggttgaagcctgagaagcttgaggggccttcgcactctcttcccaggcaaacccacccacacgccaccaagcgtgttcctagaatctcgtagcacccttccttggaaaaccgggggagcaggagtgcaaggtcggccccagaaccgctcctcgttcccgtctcgcagtggtgttcgtaaaccccattcccacctcgcagtggtgtttgtagactgcagcaagcgcccagtgtgtgcagagctttcttacacagcagccccttggggttgagtgtcaggctaggagcagacctcaagagaggcgttaagtcccaggagcttggctgcagggcggtggccccagacgtctcaagggcttcgaggtggttccctccaggctcttggctaagggtccagtcgaggatgagcttgggggtgtcattggggaccccctgtggggaagcaggtcactaatgtccatgggtcttgcctggcttgggtgggggacagagaggagtggacgagtgtccacaaaatccacctcccagggtgcttgcgtcccctaccccaggtgcagggctgtgggctggctgcgttgatgtggctttgtcctgggcaccggatgtcccgatctccccaggacggctcccaggccctccctccactggccacgtcttctgggacggggatggggtgggaggacaaagagccagctt

SEQ ID NO: 29706 - DNA, 826 bp, Artificial sequence
  DNA replication origin
taagcggccggtggtggaggacagaggccaagcctaatgggggttcggcctgacaggcttcctggccatgccaacatctccttcccggcccccgcccactcagacttaccagcccccaaccgctgcctcctctcaaggccacatgcccccacgtcccggcccctgcctagactgaagtctcggcaaagccagcaggagcaggcggcactggagggtgaggcattggcacggggctgaggagagcgggcagcctcggagccagcaggggcgtggtggtcagagtagctgtcgacacctgtggttttgcagggggaggggcggcccagctggcccagctctgaccccccggttctcggtgctccatttcatggggccccaccctgcctggagcgggtgcccccttccagcggggagctgggtgaggcctcccacgcagggtcccgctcaccagggccgactcggtgctccctccgctcgcacaatgtggggagctgttctaggtgttggtgtggcgtggccggcacacctctgtagtaggcacaggacttggtgccggctggggagtcccgtgagcctccctagaccccagcccacctgctgtccagatgaaggagctcaggagcaggccgcgaagacggtgatgtggagatggggaaggagctcaggagcaggccgcgaagatggtgatattaagatgggggccctgtctgaaaggggagctgaggagtttgtgtgtggtgggtgatgtttggggcctgctctgctcccagactccccatcgcctgcctgggacccccagcacctcccacccgtccccctgcccgac

SEQ ID NO: 29707 - DNA, 1349 bp, Artificial sequence
  DNA replication origin
tgcacgttagacctgcccagccagaccccagcaccgcatgagccaatttcttgcagtaaacctcttactgtgtcagtatctaaatacacccacatctacacgtgtggacatatctgtgcatgtgtctcctatggcctctttctctggtagaaccaggactgacacaggtgtgcagctgtgattttgtacatggattccatatgaaaggaggaaggctggacagagcaaagtggtggagggtgtcccctgcctctggccctcaagccccatgggtagcgtggcctgggacccagtcctcaggctggggggctccatgccctcccccactctctctcacccaaggacgaacacaaggtcccagctggtcagaggatgtgaacctgccaggaaggggctcaaaccccagcatgggcatctgtgtgtgggcatctgtgtgtgggcatctgtgtgcgccagcatctgtgtgtgccggcatctgtgtgtgggcatctgtgtgtgccggcatgtgtgtgtgccggcatctgtgtgtgggcatctgtgtgtgccggcatctgtgtgtgggcatgtgtgtgggcatctgtgtgtgccagcatctgtgtgtgggcacctgtgcgtgggcatctgtgtatgggcatctgtgtgtgccggcatctgtgtgtgggcatctgtgtgtgggcatctgtgtgtgccggcatctttgtgtgggcacctgtgcgtgggcatctgtgtgtgggcatctgtgtgtgggcatctgtgtgtgccggcatctgtgtgtgggcacctgtgtgtgccaacatctgtgtgtgggcacctgtgtgtgggcatctgtgtgtgggtgtctgtgtgtgggcatctatgtgtgccagcatcggtgtgtggacagtgtgggcatctgtgtgtgggcacctgtgtgtgggcatgtgtgtgtgggcatctgtgtgtgctggcatctgtgtgtgggcacctgtgcgtgggcatctgtgtgtgggcacctgtgcgtgggcatctgtgtgccagcatgtgtgtgggcacctgtgcgtgggcatctgtgtgtgggcatctgtgtgtgggcatctgtgtgtgccggcatctgtgtgtgccggcatctgtgtgtgccgccatctgtgcgtgggcatctgtgtgtgccggcatctgtgtgtgggcatctgtgtgtgccggcatctgtgcatgggcatctgtgtgtgccggcatctgtgcgtgggcatctgtgtgtgggcatctgtgtgtgccggcatgtgtgtgtgccggcatctgtgtgtgggcatctgtgtgtgccggcatctgtgtgtgggcatctgtgtgtgccggcatctgtgtgtgccggcatc

SEQ ID NO: 29708 - DNA, 931 bp, Artificial sequence
  DNA replication origin
gggagcgcaccgttgacctggctgaggctccagttccggccgagctctgggagcctggggctcagctggaagtggaagggggccccgtgggggggcaggtcctcatccgtggcgcccaggaggaggcctgggccttggtgtggctcgctgcacaggctgcccggcggcggcggggccagcacaggtgcatggtcgttcacctccaggatctcgatggacagggtgccggtggcggtgcggggctgggaggctgcaggcgaggaggccgcggcttagtgaccccaacaccccagcctgccccaccagtcggctcagagcgggtgcgcagctctgagcccccgggcgacatgggcagagccctccgacactggcaggggtgctcagccgggacaaggccaggtcagggagccccaagccggcggcgccgctcaccgtcatcctgggccaggacgatggctctgtaccagccgcccttgaggaagggggacgccgggctgagcacgtgctgggtctggatccggccagtggctgcgtccacttgcagccagtcttccgggtcgtagtccttggagtagctgatgcaggggaggggaagagtgggatctgagtttaccccagggccccacaggtgtggtcaggtatgggtgcgtgacatgcactgcacacacacaggcacacacatacataccacatgcatgcacacatgcacacaacatatacacacgcacacacagccttacatgccacatgcatgcacacaccacatacacatacatgggcatgcacagcacacacacatgcacatatatacacatagacactcccccccaccttgcacataccaccccccacacacctatacaccacacgcatgtaccacacatgtgcacacacatatgcacatacacatgtacacacaacccatgtgaat

SEQ ID NO: 29709 - DNA, 2138 bp, Artificial sequence
  DNA replication origin
actcaaggcagaacccgagcctcctggacacccccatccgcagaacggcccgtctgcctttcggaggctctgtctgcatgtctgtcctctcagctcgtggggacacacgctcctaaccgggggtgtacaccttggctgggggctttctctgagccaggtgctacaggtgcagacaggcacagaggagggttccctgtgcgccccacaccccagattccccgtgtgcacattcatcctgtggatggcagggaatcattaacgctgtgtccagagggtcttctatggaggccctgattccgctgacagccaccgaagcccaggggatgctcccggggctcccccaccccctccatggtggacacggggcagtggatgggtctgtggccatcgccactccatctgtgcaaagacccgcgtcgcgggtggaggctgagggcccagtttggacggtggcagcggggcttccacactcccgcccgcacaccatcttcctctgcggtgctctgggacggcccataagtgcatgcaggcgccggttcttgcatgcatgtgcaggtgtgtacatgtgcatgtgtgtgtgcacctgtgcgtgcctgtgtgtactggggtgtccccaggagcacctacatcattgatgaagtcggcgatgtccagggggctggtgggcagcactcggggtggctgggggtgcaggcggccctgcggggcatctctgcgaagtggcggcggtcccagaggcaggctcagcgctgtcgggtgacgcagctggctgatgtcgtaggcgtcctgtgggcgaggaggtggaacagagccaggcatccctcgggtggccctggtggaggtctcaggtacaggctcctggccagcttgttgtaagaaggcccgcgacctgggttccttggggacccctccccacccacacctgccccctcacctggtcctcctccccgcctccttgctcatcgtagttgaggacattgtctcgaaggtcgtcctgggggccgtgcagcagccccttgccccgagactgcttccagaaccgcgcccggagtgccacgagcaggaccagcactggggaatgaggggacgcaggctggggccaggcacagggcgcgacttcagggggccgggctgcgaaggaggtgggaggagggggcggggcggggcaaggctggtaagcaggggtggggttgagggggcggcagttggggaaagggcgtgtctggcatggaggagccggggttggggaggaagccgcgaggttagggaggagggggccgggttgtggaggagggagcttggctggtaaggagaggccggcttggggaagaggcgtggctggcaacgagggggcggggtttgcgagcagggggcgggttgggtggaagcggcgtggctggtaatgagtgggtggtgttggggaggaggcggcagtggagaaggggcgtggctggtaatgagggggcggggttagggaggaggcggagctggggaggaaggggcgtggctagtaatgagggggcggggttggcgagcagggggcgggttgggtggaagcggcgtggctggtaatgagtgggtggtgttgcggaggaggtggaactggggaggaaggggcgtggctggtactgagggggcggggttacggaggaggaggagctggggaggaagcggcgtggctggtactgaggggcggggttagggaggaggaggagctggggaggaagcggcgaggctggtaatgagggggcggggttagggaggaggcggagctggggaggaagcggcgaggctggtaatgagggggcggggttagggaggaggcggagctggggaggaagcggcgtggctggtaatgagggggcggggttagggaggaggcggagctggggaggaagcggcgtggctggtaatgacggggcggggttagggaggaggcggagctggggaggaagcggcgtggctggtaatgagggggcggggttagggaggaggcggagctggggaggaagcggcgtggctggttagcaggggacggcctggggaggagggtccgagggtccgagggtccaggtggaggcggggcgctcactcacccagcagcaggagggcgctggccagcacgatgaccagtgcgc

SEQ ID NO: 29710 - DNA, 1515 bp, Artificial sequence
  DNA replication origin
gcctgtacctgagacctccaccagggccacccgagggatgcctggctctgttccacctcctcgcccacaggacgcctacgacatcagccagctgcgtcacccgacagcgctgagcctgcctctgggaccgccgccacttcgcagagatgccccgcagggccgcctgcacccccagccaccccgagtgctgcccaccagccccctggacatcgccgacttcatcaatgatgtaggtgctcctggggacaccccagtacacacaggcacgcacaggtgcacacacacatgcacatgtacacacctgcacatgcatgcaagaaccggcgcctgcatgcacttatgggccgtcccagagcaccgcagaggaagatggtgtgcgggcgggagtgtggaagccccgctgccaccgtccaaactgggccctcagcctccacccgcgacgcgggtctttgcacagatggagtggcgatggccacagacccatccactgccccgtgtccaccatggagggggtgggggagccccgggagcatcccctgggcttcggtggctgtcagcggaatcagggcctccatagaagaccctctggacacagcgttaatgattccctgccatccacaggatgaatgtgcacacggggaatctggggtgtggggcgcacagggaaccctcctctgtgcctgtctgcacctgtagcacctggctcagagaaagcccccagccaaggtgtacacccccggttaggagcgtgtgtccccacgagctgagaggacagacatgcagacagagcctccgaaaggcagacgggccgttctgcggatgggggtgtccaggaggctcgggttctgccttgagtggacaagggccacggggaggaagagaccagggtgagggggagcaaccccttcccaccttgctggggcagggcagagccccgggggacgggctggccgctggcctaatactgaggaagggggtagtccgtggcaccctcttcacaaccctgctgctgtgccctcaggacgctttgcctcccctcagacctcgcccccggacgtgggcagcttccccttcctgagcccgtgccttgagctgactttgccctgggctgtggccacggcggtggggcacccgctggcccctccatgtgtcttgagctctccgggcctctttatagggcttggaggctgcagatagtgaccccagtgtgccgccttacgacacagccctcatctatgactacgagggtgacggctcggtggcggggacgctgagctccatcctgtccagccagggcgatgaggaccaggactacgactacctcagagactgggggccccgcttcgcccggctggcagacatgtatgggcacccgtgcgggttggagtacggggccagatgggaccaccaggccagggagggtctttctcctggggcactgctacccagacacagaggccggacagcctgaccctggggcgcaactggacatgccactccccggcctcgtggcag

SEQ ID NO: 29711 - DNA, 2056 bp, Artificial sequence
  DNA replication origin
ccatgctgtctgcacggagcccccagccccggtaccactccccactggggcttctgcgtacccgagtcacctggagaaacgggcttatcttgggcttcagctcgtgagtcgaggaagggctggggtcctgcaccatcccccggggtgggcatatggtccccagagtccccggctctggctgggcccatagatttgctctctctcccaggctggttggtggaggcatcagagctagcttccgccgcagcctggcacctcaggtgccgaccttctacctgccctacttcctggaggccggcctggaggcggcagccttggtcttcctgctcctgacggcagattgctgtggacgccgccccgtgctgctgctgggcaccatggtcacaggcctggcatccctgctgctcctcgctggggcccagtgtgagcttggggccccgcaggccatacaggagccattgtgtttgggccgacggtctgccacaccagggggccatagtgccgacaggggagcagcctggggtggcagcccaaggccagctgctgtttgttttcctctgatccttgtggaaggcccaaaaggatcttttgtgactggcctaaagtaaggaaactgtctgagcctaaaacacctgccccagccacagagtgcagcacaggcatgagaggtcaagaggccgggctgggtaaaagctctgcccagagttccaggtggccgaggccggccatggactggtgtgggagggcccatatactcagggccagccacatggtgtgtggagctaggtgcaaaatgaaatgcaggccttgcttccaacgtattcgagattttaggacggttctcgaaattgcaaagacagtggacagcacagcagtagctgagcgtgggcccgagtggaggtggtcggtgtggctgcggctcggggtcaggattctaacatccttagaatccaagccaggctggaatcaggctgcagaggacaggttccccctccaggtttctcaggggggctggaaaaggaggcttggaaagtgggtccccagacagtggtgtggttctctggggaagggccctgagtggccagggtggaaggcctggggagagagcctgggaacccctgttctttgtccccagatctgccaggctggactgtgctgttcctctctgtcctggggctcctggcctcccgggctgtgtccgcactcagcagcctcttcgcggccgaggtcttccccacggtgatcaggtgagcttcagggttgcccggccacacagcagggtccagggcctctcatggggaggaggggccaggtggacaggaggccctgtccccataccccacccaggttcctgcctgtgattcctccatccagtaaggactcggggtaaagcactgccctgctcctggatggtgggggccactgctcacagaaggctctgggcagacggctcaggaactgggaaggggagggaaggccacgcaggcctgaagccaggagtgcggggtgggggcagagatgaggaggcctccagaaatggcagaattctcggggaaagcatcacttttcgatcttcttcttcttctttttttttttttttgagatggagtctcgctctgtcaccaggctggagtgcagtggtgtgatctcagctcactgcagcctccaactctctggttcaagcgattctcctgcctcagcctcctgagtagctgggattacaggcacccaccaccacgcacaactaatttttgtatttttagtaaagacagggtttcaccatgatagccaggatggtctcgatctcctgacctcatgatccgcctgccttggcctcccaaagtgctgggattacaggcatgagccactgtgcccggccactttccagtcttgaacagagcaaaaagtgctccaggagaggaaggaggtttttccaaaacaatttttcaaattatcctcagccagcaaaccttaggctgtgcggaggccgggccttccccctgctcactctggagtcacatgtgtgtcccccaatctgttgccccaccagctgccc

SEQ ID NO: 29712 - DNA, 2342 bp, Artificial sequence
  DNA replication origin
cgaccggaccccacgctgttgcccccagcgctgcgcgccctgcgcggacccgcgctgctggacgccgccatcccgcgcctggggcccacgcgagccgcgagcccctgcctgctcctgcgctaccccgatcccgcgccctgcacccgccccgggcccgcgccccgcgcccgcacgcaacggcacccggccctgcacacgcggctggctctacgcgctgcccggcgccggcctcctgcaaagcccggtcacccaggtgcgcccccgtccctgctgccccgcagccctccccgcccccagcccgccgaggccctgggtgtcctttctccatcctacctggcgcctctgacccgggccccccggccgtcctcctgggcttcctgctccggggcggccgccggcccgacggtgccgcagacgggcgcgcacgggccggacccgcggagaggggccgggcgggggctgaatctgggcctgggagctgccaggcgcggggcggcctggggcgctggaggattggagccgaaggcgccggtgggggagcagggcctggaatttgcttcaggaccaccagcgtcttcagcagaccgtggctttgggctggctttccaaggcagagtctctgcttggagggactgacgtggtcagcacagactggggaaggtgggcttcccatcagtgaggtgcgcagaggctgggctagagactgcattgcctgaagggaaaccttgacgatctgcgtgagaagagatggggaggcgggcggcagggacctccaggcccctttcatgcctttccgcgctggggctgagacctgcacacccctgaggcagcctttaccccgaggcccccatcccccatcctgggaggactggccccagtgtggaaactggaacggggttgccacatcttcacaagggctgcctggggccctggaacccgccgggcttctctctccaccctgctccctcccacctcccacctgccctcctcctgtttggtgcctggatccaggaatgccccatcagctttcccaaaacgtcaggtttgaaagtaaaatctcgggcatagcacggcccccagcagtagattaagcttgccaagaagacccaggaaccggaaggggtggggggaggcgcagagctgaggtcaagggtcaagggcctcaccgggaaatgccgctgagcacagctctccagccgctgcccgagtccctcttgaaatgggcagggcagggagggcgtgggtaccagcgcaggtgctggggttcatttcttaggcctgtgtcatggctatgacccttggccggctggggtgggggctgtgtctatgacgccaccaaggccctgggtgtccccggggtccctcggaataggaggtggaaacgggtcggacaagagctggccgtgggggaagagcaatggtgtgcggaggtgggggaggccctatctagggacaagcagaaaacttagggtgggcagatccccccgacccctgtgcaggggctgccggagaccagagaggctgctgtgtgacctggaccaagccccttgccctctcatgcctcagtttccccttctctccacggagggattgagcaggacatggagggccccttccagtagccattctgggactccctgcacctgtccccaggggagggtcctgagctggcctccacgtggctgctgttccccatagtggaaccttgtgtgtggagacggctggaaggtcccgctggagcaggtgagccacctcctgggctggctgctgggctgtgtcatcctgggagcaggctgtgaccggtgaggccccttcccttttcctgctgcccagcagccctcccctccgcccactctcagggttcagctagacctggtgctgccaggatgaaggttggaccctgggttatcctgaccctgtccaagcatgtcccccgctgcccaccaggtttggacgccgggcagtttttgtggcctccctggtgctgaccacaggcctgggggccagtgaggccctggctgccagcttccctaccctgctggtcctgcgcctactccacgggggcacattggcaggggccctcctcgccctgtatctggctcgtgagtaccctgggggctgctgtcactgggggaggggcagtgggtggcccgcaggcctctgaggctcccttgccgagggccccgagctgcagggacagtgagcagtgagtcccttgggcatcccgctcctgggcaggtcaccaataggtccccgcagttcccaatggaactgttccagtcctccccgaggcctccacttcaacctgtctgtgtctgcccaggcctggagttgtgtgaccc

SEQ ID NO: 29713 - DNA, 881 bp, Artificial sequence
  DNA replication origin
ctcgggacggggcggggcctggaccagggcgggctcctggggcggggctttggggcgaggcattaaggggcggagcctgagtccagtggaggcggggtgtgggggcgggcggtgtgagggcggggcctaaggcgtaaaggggcggggcccgatctggggcatagggcggggaggttgaggggcgggaaggttgagaggcggggcttgcggccgaaccgcgagggggcggggccccgtgagggcggcacgtgggggccgggggcgtggcaggggcgtggccgggagcgctcaggtgccctcgcggcgcaggtgcactcaggttgcccgggggcgcgcgggctccggccggcgtcccggggtggtccccgcgtggggccgggggcgtccgcgcgggcggggcgaggtcggggagggcagccgcccgccctcctcggcgctgggagctttcggctggtactgcgggaggagctcccgggtgacccgcgggttctgaaaccgccgctcgggagctcggggcctgcgctgcgtctacggggcgagcgagggagaactgacgcctttcgcccggatccttctccccttccgagaaccaggtaggtcgcgtttattttcaagtccgactgttttcgcggtaacatttgtgggaaacatcacggtggatcctgtgggtcgctgagttttctgactcccggtttgtcttattttgctttgtcagtgggctctgcgctcgcgttaacaattcgaatgggcacgtttctgcgtttcagaacgctgttcgcttcctcacacttagattgaggtggaactcacgtcacataaaccgggtcgcaaggctcagctcagcggggcccccccaacagtgttgcgggaccagcaccttc

SEQ ID NO: 29714 - DNA, 945 bp, Artificial sequence
  DNA replication origin
ccaggcatggtggtgcgggcctgtaatcccagctactcagggggctgaggcaggagaattggttgagcccgggaggtggagcttgcagtgagccgagatggcgccactgcactccagcctgggtgacagagcgagaccccgccttccccccgccccccaaaaaattacaccgttcacaggaataagctgcaaatggatcagggatctaaatgtggacaaaacgtgcacacgtgggtgatgtgaatggtttcggggcgattgggaagagggcctggccagcagggggcggtagcgcaggcagaccgggttccgcggtgcctcgccggcttcggggtgggggtcaccgctcagaaggggaggagagcgagggacttccggggggaagggaggagagcgagggacttccggggggaagggaggagagcgagggacttccggggggaagggaggagagcgagggacttccggggggaagggaggagagcgagggacttccggggggaagggaggagagcgagggacttccggggggaagggaggagagcgagggacttccggggggaagggaggagagcgagggacttccgggggtaagggactcggtgaggaactcgggggatcggagaggggctcgtgtgctgggcgacagtgacacactcagcagcccggcgggagccgcggtcggtaccgtctgaagggcagccggggctgggggaccgacagctctcaggtgtcggtttttctgtggctagcggatgtttggcaccatttcacagggcacacagggcagacgggacctagatgacgacagatctgcgtgtttgggctctgtttgaaacagacctcagccagagtcttgaagagcagaacccggagtgttgaagtcacaagagatcaacatccctacggtgtgaaatcctgaaaacggcaaatcccaaaggacga

SEQ ID NO: 29715 - DNA, 1065 bp, Artificial sequence
  DNA replication origin
tcaggccccgcccaccacggccagcccgggtctaggccccgccccgacacgactcaggccccgcccccggccagcttcgctcctcgcgcgccccgcccagcaatcctcgctgaacccggcgcggtttccccagcgctgctccacgccgcagtccagcgcctggagtccgcgcgccccgagcccctgcccgctcatgcgcagctgggtcacccaggtgcacccacttccttgctgtcccgccgccctccctgcccccaccccgcctaggccctgggtgtcccttctccatcctccctggcgcctctgcctcaggccacctggccgtcctcctgggctccccgctcgggggcggcccctggtccgacggtgccgcagacgcgcgcgcacaggccagtcccgcggagaggctgctctcaggggctaggcggggggctgagtcagaggctggggcctgccaggagcggggcggcctggggcgcagcagcattggagctgaaggcgagggcggcccgcgccggttggggagcagggcctagaatttacttcacgactaccagcgtggaaactgcagaggggctgccacatcgctgccagggcctgccctggggccttggatcccgccggcttctctctccacccgcctctgtcccacgtctccacctgccgtcctgtttggtgcttggatccactaatgcccagtcagctttcacgaaacgtcggatgtatttattttttttaatatctggggtacacgtgcaggatgtgcaggcttgttgcataggtaaacgtgtgccatggtggtttgctgcacctatcaacccgtcacgtaggtatgaagccggacatgcattagctatttttcttaatgccctcctgcccccgccctcccccaacaggcccgagtgtgctttgttcccctccctgtgtccatgtgctcatgttgttcagctcccacttataagtgagaacatgccgtgtttactttcctgttcctgcgttagtttgctgaggataatggcttgcagctccacccatgtgcctgcaaaggacatgatctcgcttctt

SEQ ID NO: 29716 - DNA, 811 bp, Artificial sequence
  DNA replication origin
cgccgggttcagcgaggattgctgggcggggcgcgcgaggagcgaagctggccgggggcggggcctgagtcgtgtcggggcggggcctagacccgggctggccgtggtgggcggggcctgagtcgtgaaggggcgggccttgcaggggcggggcctcgaggggcggagcttgcggtgaccagcgagggggcggggcttagagccactaagaagcgggacccagtgagggctaaacgtggggcgccgggggcgtggcgcggggcgcaggtgcacgcaggttggccgcgggcgcgcggggtccggcgggagtcccggggtggtccccgcgtggggccgggggcgtccgcgcgggcggggcgaggtcggggagggcagctgcccgccctcctcggcactgggagctttcggctggtactgcgggaggagctcccgggtgacccgcgggttctgaaaccgccgctcgggagctcggggcctgcgcggcgtctacggggcgagcgagggagaactgacgcctttcgctcggatccttctccccttccgagaaccaggtaggtcgcgtttattttcaagtccgactgttttcgcggtaacatttgtgagaaacatcacggtggatcctgtgggtcgctgagttttctgactcccggtttgtcttattttgctttgtcagtgggctctgcgctcgcgttaacaattcgaatgggcacgtttctgagtttaagaacgctgttcgcttcctcacacttagattgaggtggaactcacgtcacataaaccgggtcgcaaggctcagctcagcggggccccc

SEQ ID NO: 29717 - DNA, 1477 bp, Artificial sequence
  DNA replication origin
ttggaggagagccggggccgccgagcagcccgcgtccagggcagaaccgtctcccttccggctcccccagcggctgagagctccttccaggcaatacgaccctgggcgcattctccaggccacgcgtgatcagattctgccggtacaccgaagcaggaacccgggatacggaaagcgtcggtccttgcggcgaggcgggggtcccagcacaaaccacccccagacggcaaaccagccgtgcagcctggaacccacgcccaccggggcctcaggcgccgcgagacgctgccgcggggtcggagccccgcagcccgcccgtccccggaggcggccaccccccaccacacccccgcgaggcgcgcgaggggctctgcggcttctgcgctcacgcccgtcgtcccagctgctccgtgagcccgagcgcgggcgaggcctgagtcacactgagtcactgcgccccagcgcgggcgacgagagcccgtcccaacagcaacgacgagagggcgaggaaggggagggcggtgagggcacccgggacctcgtggtgtattttgacgacggaatgcgctttcggaggcgacagtggtgacgacgcagatgaggtgacgtgcgctggaagcgccccgagcgccaccctgggcccgcacacgactcggttttgcacagagcgcgcctgccctgctgtctggcttggcggacaacgaaccatttggtcagggcccaggcgacctgtgtggtcccggggaggggcatggagatggtgacagggtatcttctccacgcctccctcccttcccccactgccacctccggtttcctgggcatggggcgaagggcgacatccgagtcactgaagcaggaagcagagttggaagaggagccgggatggagaggctggcgtgagcacagtgaccaggactgatgccaggttttcttttgttgttttgtttaattagttcgttttgttttgttttgagacggagtctcgctctgtcgcccgggctggagtggcgccatctcggctcactgcaagccccgtctcccgggttcacaccatgctcctgcctcagcctcccgagtgtctgggactacaggtgcccaccaccacgcctggctcatttttgtatttttagtagagacggggtttcaccatgttagccaggatggtctcgatctcctgaccttgtgatccgcctgcctcagcctcccaaagtgctgggattacaggcgagagccatggcgcccggccctagttagtttgttttttgagatggagtcttgctctgtcgcccaggctggagtgcagtggtgcaatctcggctcactacaagctccacctcccgggttcacgtgactctccagcctcagcctcccgagtgtctgggattacaggcgcccaccaccatgcctggctcatttttgtatttttagtagagacacggtttcaccacgttgccaggatggtcttgaactcctg

SEQ ID NO: 29718 - DNA, 1670 bp, Artificial sequence
  DNA replication origin
cgcctgggccctgaccaaatggttcgttgtccgccaagccagacagcagggcaggcgcgctctgtgcaaaaccgagtcgtgtgcgggcccagggtggcgctcggggcgcttccagcgcacgtcacctcatctgcgtcgtcaccactgtcgcctccgaaagcgcattccgtcgtcaaaatacaccacgaggtcccgggtgccctcaccgccctccccttcctcgccctctcgtcgttgctgttgggacgggctctcgtcgcccgcgctggggcgcagtgactcagtgtgactcaggcctcgcccgcgctcgggctcacggagcagctgggacgacgggcgtgagcgcagaagccgcagagcccctcgcgcgcctcgcgggggtgtggtggggggtggccgcctccggggacgggcgggctgcggggctccgaccccgcggcagcgtctcgcggcgcctgaggccccggtgggcgtgggttccaggctgcacggctggtttgccgtctgggggtggtttgtgctgggacccccgcctcgccgcaaggaccgacgctttccgtatcccgggttcctgcttcggtgtaccggcagaatctgatcacgcgtggcctggagaatgcgcccagggtcgtattgcctggaaggagctctcagccgctgggggagccggaagggagacggttctgccctggacgcgggctgctcggcggccccggctctcctccaaccggccaaaccccgcctggtcccgccgccggtggctgctgctccctcgccgtcttcctgccgagcagccgctggcgtcttcttccactgatctgctcctctccacgtccggctgccttgtcggcctgctagggtcttgggtttttatagtaccaggatgggggcatggcgggccagggtggtcttggaaaatgcaacatttgggcaggagagcaggagagcctgtcctcaccgaggccggggaccctcctttctctacccagcacttccctgcccccctctcgtatcaccaccacgccccggctattttttgtattttctgtagagactgggtcttgctgtgttgcccaggctggtctcgaactcctggactcaagtgatcctcctgcctcggccccccagactgctgggatcacaggcgtgagccaacgtgcccgcctccctcgtgatctctttcttgactgattggttatttaagagtgtggtacttaattttcatgtttttgatttttccaaattctctcctgttactgattcctaacttcattctgctgtggttggagagcacgctttgtattattgccgtccgttttaattctccaacgtgtgatctgtggcctaacatagagtctttttggagaagaatcctgtgcactgggaggaaagtctgtttttctgtcaccaggtggagtggtctggaggcatctcaggagcagttagtgctattcaggtcttctgtttcccggtgtgttttcttcctgttgttagatccacgatggaaagtgaaggcactgaagtctccagccattattgttgaactgtccagttatcctctttatttttatttttttattgagtctgggttttccggaatggttatccttttataatccattctgccgatctctgccttttaattggaaggtgtaatccatttgcggtta

SEQ ID NO: 29719 - DNA, 1834 bp, Artificial sequence
  DNA replication origin
cacagaaggtcagaagatcagaaggtcttactgaggagagatcctggggcaggtttttctgaatgtcatgacccaactgccgtctctgtcttctgtggatgagcctccccggggacggctggggtcaggctcgcggggaagggaaagaccgcagaggtcaccgtgggtgcagtgcccctcgtgctccctgggagcagagctcagagcttggcagggtggggcccgagggcgcccgctcctggatcctgcacaacgtccctgacatgtcggccagcagcacagacccagcctcaccctcagggcaagctcagcagaccccgtcatcctcaccaggggggtgctgggtagctgagccaggtcagggccagcacggcgaggggcctcaggcggcctgggcccacagagccaacgcgtgtggagggcccctggctgtacctcacgccacctgcgagtttcagtgcccaggaatccccagaaggaaatggccattggtgacggcaagcctgttctgggcataacacaacacactcaagcgagacggctgcatcaaccacacagtccgctaggcacagtgtgagtggagtcgcgtggtctgggaggagactccagggaagagccagaacgccacacgctggggctggatggaccctggggggcctgagaacaggagggcaggggaggccgtgcacagctcaggccgtcaccgaggacagacgggtgggctctgcctcccccatgaggaatccctgtgcctgctgggaaagaccccagtgggtaggaggaggtgggaacccagtcaggccccgcggcccagggcagagagtgcacagggcaggcagccctcatgggaatgtgctcagagcagggccccatttggagggatctattttgggcccagacgtagcgcaaggagctgggggagtgggggtgattccgagatgtttcacctgagcctgcagaggtagggatgatgcctggggaactgggctgacagggtcaggtggaacaaggtgaggctgggggccgaggaccaagctgccccaagggagctgcagctctgctgtcccagaagcccaagggaggaggtgggggaagggactcatcgtgcaggtatggaggctcagggaacccacgcgggtccaagggagaagggggcggggcaggggcaggagacacagggggtggctctcgtgaggccgtcctggtggacggggagtggagaggggagagtgagcggcgtgaagggggagccccacacgagtgggaccggggtgcacccagggtgagggggaggtcaggagaccgaggcctggcacggaccagctggaggaaggacctcgggtctgcagaacagctgggcagcttccggcttttgcctccacagcagaagtggggctgtgtctcctcaggtggcagaaggtcgagagaggtcaagggccatgagtgggacaagacgggctggaggaagccgtgactaggggccccagacgcatcccagagagagaaggcagtggctctcccgggccccgcactcaccacggggatgtggagcttgctgagcggcttgccgtccaggaggtaggagcccgtgtaggtgacgtactcggcgtagcactggggcgcctgcggcgtgatacagcacaggatcttgcgcttctcctcgatcttcttcctgatctgcaggtattcgaagtaggggttggccctgtcgctgtggtagggctcgatggcatccagcttgatggcgtccacgatggcggccagcgtctgctggatcacctcccgcgtctgctgcgtggacgtgttcagctgctgctgcagctgctgggtggag

SEQ ID NO: 29720 - DNA, 1971 bp, Artificial sequence
  DNA replication origin
cccaccgtttatgaccccgggggcccctggaggcatctcttctggaggagcaagactttcttccacgggttccgcttcaccatctgcggcatctttagtctgcaggggaagctccggcagggagaagggccccaggtccaggtcgtcctcggggccggcgaaggcgtccgcccagggcaccggctccacctggccgaggtgagacaggccgcggctgccgtccaggaagctattttccaggggccccagagcctccacctgagccacagcggctacacaggcgggctcgggggccacgtccagcggggcttccggaagtgacttgcagttgctgaagaaggactccagcccggagggaggggcgtagggagccgcctctgaggtggagatggcggcggggacggcgtccactccgtccttgacgtcctccagccccggctcagcgacgggcagagcgtacggggcaggagaggcgggaggggcggggtacggcgcctccgaggcgctgaagggccctggggcggcagagtggagggggtccgcggggcagaaacgctttggggactcggggaatctctgtggagacttcagcaggaggtccgagcccacaggccagctcacagggttttcagaggtgcccccgatcaggctagaggcaagcgcctgctcggaggggtgggcccactcaacgggctcctcggtgatgacggcgctgaagggaccctcgtccagcggctccaggtagctgggctccggggggatgatggcggccgtcgcctgctggtcctcggaggtgtccaggtccgggggaagggccccttcgagggaaggaaccagcagctcggctctgggggaaggggaaggttttgcttgtaaacttgagaagacgccctctggagacggggtgacagtgacaacggcagccggtgggcagtgcaaagcgtcgactttgggcgacgggaggccatagtctggggagtagtaccctggcgacaagcaggcaaacttctccgcgggaaccgggggcaggggcgccctgtcttccatcgagggtggcatgggagagtcgtagctggaggcagcaggaacgctctgctgcctgaagagcttgtctccgacgctgaattcttcctcgggggtcctcctaatgtcgacagagaccgagcggtaaaggtttgtggagagaggcctggcaggagcctggctggcgttttccgaaagcccacttgaagccacggagaacctgtcgaaaaaggagggggagcaggcgctggtgggagcggtgggcacgggcgtggagtgctgcgagtcggcgcagtcgaacacgaggtccgcgtagtcatcggcgctgcaggacggggtcctgggcgtgtgcatcacctcctcgtagctggggcaggatagcaccgacgtaggggtgggcacgccagtgggccggctctggtcaggcctgggggacgcaggcaggacctctttcatgtgagggcctgccagccagtctttggagtctgcacctgatgctgggtgtagcttattttccgcggcaggtggaataggagtcgactctttgagctttttgtctttaaatggagggtccagccccggcggtttcttagcaggaatgtccagacccttcttccgcccgtcgtctgccggcttcgccttctccttgagcttggggtctccggaccggtgcctcagcttctccatttgcttcatcctctccttgtgccgcttgtggcgctcctcgatctccaggtccttctgggacagcatcctctcgaagctggtcatcatcaggtcgccgtcccccaggagcttctccctgggcctggcgtctttcttgcctgggtctttggatggcgctaccttatcattcccgttgctcatcttcactgggtcgcccttttctttctctgcaccgtccttgaatttctccttcagtttggcatcgccgagcctcgggccctc

SEQ ID NO: 29721 - DNA, 751 bp, Artificial sequence
  DNA replication origin
gggggaggctcagggctccagcggggggtaggctcagggctccaatgggggtaggctcagggctccagccgggggaggctcagggctccaatggggggaggctcagggctccagcgggggaggctcagggctccaatggggggaggctcagggctccagcgggggaggctcagggctccaattgggggaggctcagggctccaatggggggaggctcagggctccaatggggtgaggctcagggctccagcgggggaggctcagggctccaatggggggaggctcagggctccaatggggggaggctcagggctccaatggggggaggctcaggactccactgggggaggctcagggctccagtggggctctctggcccttgccaggcacagggtgcccacctgcgaagtccttgacgttgacgtctgccccctcgctgatgagctctttgatgcgccgggcgtccccgcggatggcggctcggtgcaggcgggtctctccacgctcgtttctcttgttcactttatctttggtttttgaggcagagttgggcgttcccttctgacacactgtagactgggaggggtgctttggtgttgtgtccactgcaggccaaggaggggacagatgggcattactgtggggtggtcctgctttgtccaatcttcaagagcccaggccaccatcacgaggtccctttgcacagggcttgtcctcagcacagccatgaggctgcgaccaggcagagccc

SEQ ID NO: 29722 - DNA, 1160 bp, Artificial sequence
  DNA replication origin
cgggggccggccctccccaggcttgcttctcatagccacctctaaacaacagaagcaggcctgcggctgcctccctctaggaaagaggcgacgaagctgctggagaaaccccagctcccccaccgatagccctcaagtcctcctctctccaggaggggcccacactcaccgagcagctggtctgcccacagtcgcctggagaagcagctgagaacctctgcagggccctgatccccaagacctagccacgcacattcagaggcctgctccctccgtcacccagagcaggggggttaatgttttggagacacgaagccccctgagaacacgaggaaagcagaatccccgagatacacagactttgcaaagctgcacacagcacaggagactcctgggagcagacggcatctccttattccattgaccatcagaagtgaaaagcgagtgggccccacttctgtgctgcatgtggccactaggggtggacacagggaggagctggggcagagttggggttgcggagggaggagctggggcagagttggggttgcggagggaggagctggggcagagttgtggctgcggagggaggagctggggcagagttggggctgcagagcgaggaggcggggtggtgttggggctgcggagggaggagctggggcggtattggggctgcggagggaggagctggggcagagttggggctgcggagggaggagctggggcggtgttggggctgcggaggggaggaggcggggtggtattggggctgcagagggaggagctggggcagagttggggctgcggagggaggagctggggcagaggtggggctgcggagggaggagctggggcggtgttgggaggagctggggcggtgttggggctgcagtatgtttacatcccgaagtgcaggcgttgccatgctcttaagttatcaaaggaccctaggaggcgtgtgtcagaggaacaggcagaggcaaaggcgttccttagaagtcagtctttaggctggcaggccaggagcccacgctgcgtccccgctctgaggggcagcaaagagctgctttgtggcaaacagaacatgtcccactcctgcagggcggccatctcaggtgcagctcacacccaacatgtgcagaatgggcaggactcgg

SEQ ID NO: 29723 - DNA, 1615 bp, Artificial sequence
  DNA replication origin
tatgagaaactgcttacgtctagagaggaaaaatggttgagaaataggaggaccagagaccaatcacgcggagttcttaatcatgtgaaaatattttattttgacgtgctttttcttgagtgcctgaatgtggtggctcttagggtaaccccagaatcctcactgcggcaacaagacctggccaccaccctcacctcgaccaccacggccttcgctgcagccccactctgactccccgggggctgctcacgtgccagcacccactggccaagcatcctccggcaggacccaagtcctctgtattcagaggccgaccctgctttccagagactcacgaggtggcagagagtcaggctgtggcaggggcccctgtgtatcgaggagaggaggaagagtctgcagaggtttctagggaaggagatagtgtggaagtgactgtggctctggtcctgcctgggaggagatctacaggggaggggcctggccttgggctggccctgccctgcgtgggatctgtgccctgcgtgggatccctgccctgtgtggggtgcgtggggtctgtgccctgtgtggggtgcctgccctgtgtggggtgtgtggggtctgtgccctgtgtggggtgcctgccctgtgtgggatgcatggggtctgtgccctgtgtgaggtgcctgccctgtgtggggtgtgtggggtctgtgccctgtgtggggtgcgtggggtctgtgccctgtgtggggtgcttggggtctgtgccctgtgtgagctgcctgccccgtgtggggtgcgtggggtctgtgccctgtgtggggtgcctgccctgtgtgggatgcatggggtctgtgccctgtgtgaggtgcctgccctgtgtggggtgcgtggggtctgtgccctgtgtgggatgcctgccctgtgtggggtgcctgccctgtgtgggatgcgtggggtctgtgccttgtgtggggtgcctgccctgtgtggggtgcgtggggtctgtgccctgtgtggggtacctgccctgtgtgggctgcgtggggtctgtgccctgtgtggggtgcctgccctgtgtggggtgtgtggggtctgtaccctgtgtggggtgcgtggggtctgtgccctgtgtggggtgcctgccctgtgtgtggtgcatggggtctgtgccctgtgtgaggtgcctgccctgtgtggggtgtgtggggtctgtgccctgtgtggggtgcctgccctgtgtgggatgcgtggggtctgtgccctgtgtgaggtgcctgccctgtgtggggtgcgtggggtctgtgccctgtgtggggtgcctgccctgtgtggggtgcgtgcggtctgtgccctgtgtggggtgcctgccctgtgtggggtgcgtggggtctgtgccctgtgtggggtgcctgccctgtgtggggtgtgtggggtctgtgccctgtgtggggtgcctgacctgtgtggggtgcgtggggtctgctacacgcttggtgagaaactgcatcagggcttcccgccgtgtgttgctaacatccccacacacgtgagtgccttgggaccctcgtcaacacactgagctgaggccactggtccacggcacactgcagtgcacatgcccttcctg

SEQ ID NO: 29724 - DNA, 1210 bp, Artificial sequence
  DNA replication origin
agcttgagaatgtaatttggacatcacgactgaaagcatccctttcttttctaggataaagataaagtttctctaaccaagaccccaaaactggagcgtggcgatggcgggaaggaggtgagggagcgagccagcaagcggaagctgcccttcaccgcgggcgccaatggggagcagaaggactcggacacaggtaccagcccgcggcccctcctgcagtcagccctccacaggcagcccggagcagcccaggcagggcgtccctggcccccgcacctccggctttgcactgggacgcactctagcaccctgcacgccgtccaggcaagaggcagcaggggcggagcacaggcccccacatgccacctcctttgcacccgaggctcaggcccatggggccgattggagagcttcactcttgggtcccacacacgtggagatgcacccggtgcatgtccagccctgggcgaggtatggggctgctcacctgtgggtcttctgacagctggacacgggagggagacagtggttcccctcagggccacaaaggcacaggaagaaactccattgcttgtagtaaaaaccaaagggagccctaaaagtgagcaggaggcagggaggtcttcccaagcacaggcggggtctgaggctgcagagcaggaatgtgtgtgctgtgtgcctgtgccagagtgtgtgcccaagtgtgtatgcctgtgtgtatgtgtgcccatgtgcacatgcccgtgtatctgtgtgcatgccctcatgtgtgtgcctgtatgtatgcccgtgtgtgtgcccgtgtgtgtatgtacttgtatgtacccatgtatgtgtgtgcccgtgtatgtgcttgtgtgtacccatgtgtgtgcctgtatgtgtgcctgtgtatgcgtgcccgtctatgcccgtgtatgtgtgcccatgtgtgcctgagtatgtgtatgcttttgtgtgcctgtgtgtgcctgtatatatgtgcgctcatgtgtgtatgcccatgtgtgcgtttgcatgtgtgtgcatgtgcatgcctgtgtatgcgcccgtgtgtgtgtgcatgcctgtgtgtgcccatgtgtacgtgtgtgcctgtgtgcccatgtgtgcatgcctgtgtgcccgtgtgcaagcccatgtgtgttcatgtgcacacgctcctggtggggtcagcgccttctgcagtgacaccttcccagtggattct

SEQ ID NO: 29725 - DNA, 2260 bp, Artificial sequence
  DNA replication origin
tgactccagttgcactctgagcttgcagcatgttctggaaagctctttcatggtcactcagggatgtctcagattaactgtcaggtttggtggatgcaggttgggtggatgcacgtttggtggatgcagagtgactgagctggaagatgtatcagggtcccaggaggcaggaccgtggctggggatgcttgggcttctcccaggaacagttgggcatctcagccctggagcagctgaggcctccggtgctctgaaggcttcgctgaccactgcacggtatttgccggcagcttacctagggaaagttacagaaagaaggcttactgatggggaaaggcagtgtgtgtgtcgcaccgtccccctccccacgtcccgagtgctgtgtgtgtcgcactgtccccctccccacgtcccgagcgctgtgtgtgtcacactgccccctccccacgtcccgagcgctgtgtgtgtcgcaccgtccccctccccacgtcccaagcgctgtgtgtgtcgcaccgtctccctcctgggaggtagcgcacgtgtctgcggagtgggaggtaggtggcgcgtgtctgtggagtgggaggtggcgcgtgtctgcggagtgggaggtaagtggcgcgtgtctgtggaatgggaggtggcgcgtgtctgcggagtgggaggtaggtggcgcgtgtctgcggagtgggaggtaagtggcgcgtgtctgcggagtgggaggtgggtggcgcgtgtctgcggagtgggaggtggcacgtgtctgcggagtgggaggtggcacgtgtctgcacagtgggaggtggtgcgtgtctgcggagtgggaggtaggtggcgcgtgtctgcggagtgggaggtggcgcgtgtctgcggagtgggaggtggcgcgtgtctgcggagtgggaggtaagtggcgcgtgtctgcggagtgggaggtgggtggcgcgtgtctgcggagtgggaggtggcgcgtgtctgcggagtgggaggtgggtggcgcgtgtctgcggagtgggaggtggcgcgtgtctgcagagtgggaggtaggtggcgcgtgtctgcggagtgggaggtaagtggcgcgtgtctgcggagtgggaggtaggtggcgcgtgtctgcggagtgggaggtggcacgtgtctgcggagggggaggtaggtggcgtgtgtctgcggagggggaggtaagtggcgcgtgtctgcggagtgggaggtggcgcgtgtctgcggagtgggaggtaggtggcgcgtgtctgcggagtgggaggtaggtggcgcgtgtctgcggagtgggaggtggtgcgtgtctgcggagtgggaggtaagtggcgtgtctgcggagtgggaggtggcgcgtgtctgcggagtgggaggtagatggcgcgtgtctgcggagtgggaggtgggtggcgcgtgtctgcggagtgggaggtgggtggcgcgtgtctgcggagtgggaggtgggtggcgcgtgtctgcggagtgggaggtgggtggcgcgtgtctgcggagtgggaggtgggtggcgcgtgtctgcggagtgggaggtgggtggcacgtgtctgcggagtgggaggtgggtggtgcgtgtctgcggagtgggaggtggtgcgtgtctgcggagtgggaggtaagtggcgcatgtctgcggagtgggaggtggcgcgtgtctgcggagtgggaggtggcgcgtgtctgcggagtgggaggtaggtggcgcgtgtctgcggagtgggaggtggcgcgtgtctgcggagtgggaggtggcgcgtgtctgcggagtgggaggtagcgcgtgtctgcggagtgagaggtagcgcgtgtgtgtctcctctgctttctccacacacaccagcgatttcctgagcgtccctccggtgcgcaggatgagaaatgggccagagtcagggctgagccacagcccgaccccgggcttctgggtgaaggttctgcggtcggtgaccagcctcacacagccacgccctggggtgcagggagggtgttcattgcccaaataagagatgcgcttctcctggcatatgaaacaaaatcttgagagcttgagaatgtaatttggacatcacgactgaaagcatccctttcttttctaggataaagataaagtttctctaaccaagaccccaaaactggagcgtggcgatggcgggaaggaggtgagggagcgagccagcaagcggaagctgcccttcaccgcgggcgccaatggggagcagaaggactcggacacaggtaccagccc

SEQ ID NO: 29726 - DNA, 1145 bp, Artificial sequence
  DNA replication origin
agctgagccctgccggctgttgtgcgctccgtggaaagggagaagcacggtctccagcggctgcgtcaggagtggtgccttgtgcacacctcacagggagagaagtctccaacggactgagcggaggaaaaaagaaaaaaggagaaaaggaaaaagagctgcatacctggcaggcctactgtgtgcaaagcccttgagtgacacaccctatgacccacagcactgtggcaatcccaggtatggaagagaagcaccactggcctctcacctctcaccatctcagtgggcaaggggagagcaagcagcccagggcaggggggctgagccgagggcaggggggctgagccgagggcaggggggcagagccgagggcaggggggcagagcccagggcaggggggcagagcccagggcaggggggctgagccgagggcaggggggctgagccgagggcagggggtctgagctaagggcacgggggctaagcccagggcaggggggctgagcccggggcaggggaagagccgagggacagaggccctcacaggaaccaggccctcccgcacaccgcctgacagtccacgtcagcgtctctgtccagcctccacacacccctgcacgttctgaagagccctccccaagagtccaactctctctccttcctcctcagggccgcaccagctctctctccttcccctcctcagggccacaccaactgtggggttccagctatcactctgtgcaaaggactcctaacatgggtgtcctccgtctcaccccataagccacactggccaaggccaggcaggcaccacacatcgcgaggtagaatctctttgctacggtttgaatgtttgtgtcggcccctcccctgcaccccaaaattcacaggttcaaaccaaacccccagtgtgcccagctactttttgtatttttggtagagacagggtttcaccatgttggccagggtggtctccatctcttgacctcatgatctgccggcctcggcctcccaaagtgccccacggcacaacgctctctactgcagccctgtttccactcacattttctgttatcacggcggggggtggcagcaccgagagcgcgttcagcattactggcctctgctttgcccctcagacacat

SEQ ID NO: 29727 - DNA, 1135 bp, Artificial sequence
  DNA replication origin
ctcctaacatgggtgtcctccgtctcaccccataagccacactggccaaggccaggcaggcaccacacatcgcgaggtagaatctctttgctacggtttgaatgtttgtgtcggcccctcccctgcaccccaaaattcacaggttcaaaccaaacccccagtgtgcccagctactttttgtatttttggtagagacagggtttcaccatgttggccagggtggtctccatctcttgacctcatgatctgccggcctcggcctcccaaagtgccccacggcacaacgctctctactgcagccctgtttccactcacattttctgttatcacggcggggggtggcagcaccgagagcgcgttcagcattactggcctctgctttgcccctcagacacatgcttggtcactgggctgtggaacatacaggagccccgtgctccggaacacggaccacccgacaggagcacggacacagcagtcggggcgacgtgggtgcctcacagaagagggaaaaagccaggagggcggcacgtgggcgcaaagttctcagcttcgttagtcatcaagaaaatgcaaactaaaaccaaggtaagtgtgagggttactactgagtttcaacttgactggactaaaggatgtgtaactgttcctgggagcatcttgaggaagctgccaaaggagattcacattgagtcagtggacggggagaggccgacgaaccctccatctgggggggcatgatctcatcagctgccagcacggcagatctgcggaagcactggactggctgagtcttccagcctccatctttcttccatgctggatacttcctgccctcgaacatcagactccaagtgcttcagcttttgggttcttggacctacaccagtggtttgccaggggttcttgggccttcggccacagactgaaagctgcgctgttggcttcccgacttttgaggtttggggactcggactggcttcctggctcctcagcttgccaacagcctattgtgggacttcacctcatgactgtgtgagtcaatactcccaataaactcccctccatatatacatttatcctattagtgctgtccctctagagaaccctgactcgtacacacaagtactggtga

SEQ ID NO: 29728 - DNA, 923 bp, Artificial sequence
  DNA replication origin
gcatgccaccacgcccagctaatttttgtatttttagtagagacagtcatcatgttggccaggctggtcttgaactcctgacctcaggtgattgcccgcctcggcctcccaaagtgctgggattacacaggtgtgagccacagcgcctggtccttttttttttttttttttttaacagagtgtatgttaagtacaggatttccactcaggcccttttcaaacccatgtttcaattttgcaggtagtcagtatttgtcagcacccctgtaagcaggtggctgtcctggcttggtaggggagggactaacagagacccacatcctggaggacacagtgtggcgctcatggcagcacatggacactgagtggacgtgctgggctgcagaggtcccaccccccggcacagtgagagtgcgtctcggggcagcacacccactgaagctgggtgcttggggcagtgtcctgggagcctgacgggcggcgtcctgggatggccatagtgggggcccctggggctcctgagtggcagagcgcgacacagtggtcctggtgtgtagggagtcaccatgatactggcaccagctgatgtgggaggcaggtcactgtgttgcttgtcacccgtgggacagtgagcttggaagctggaccctcatgctcagcaggtgcttgcagcccaggagctgtggtcccaatagagggggattccacacacagtagactgaagaccacaccattagagaacagagggagaggaacaggcattgctgactccagccttgctcgtgcgacttgggcaaacttgctttccacctaggaaagacctgcacattgtctgcatggttagaattgcttagaccaggccgggcacagtggcttacgcctgtaatcccagcactttgggaggccgaggcgggtggatcccg

SEQ ID NO: 29729 - DNA, 673 bp, Artificial sequence
  DNA replication origin
caagagcatcctgggaatgacagggagaccccgcctctagaaaaacatttaaaaattgctgcgtatggtgccgcacaccagcagagtcccagctactcgggaggctgaggtgggaggattggttgagcctgggagttcaagccttgagtgagctgtgggtggggggggcagcactgcagggtgaggtgaagggggtggttctgcgggaggaggtgaggtggctctgcgaggttaggagagggggcaggggctctgtggggtgagatagggggtatctgcagggtgaggtgaggggacagctctgtgggatgaggtgaggtgggggttctgcggaatgaggttgggggggcggcactgcgggaggaggtgggcggggtggggcctgcagaccctccaggctctcccgggggaaggagccccatcagggccagcactgcgccactcccaacaaagcaggcaacctagcctgccagtggagacctcttttccgcctgggctccagctctagagcaaggccagtcacctcagccccaccatcaaacaccaggctccacatgggcactgcctcgctcaactgcgtggtggcgggtggcctggaacgctgctgtcatcactgcacgtggacacatcatcaacctctcagcgtgacgtgccctcgtgctttcaggtaaaa

SEQ ID NO: 29730 - DNA, 1505 bp, Artificial sequence
  DNA replication origin
gtgctgggacctctgctgacctgtgacctctgctgtcctctgtcctctgctgacctgggaggcatggagaggtcctgctgggggactgagaatggctttttgtttgtaggttataatattgcggttactgtatttcttttgttaactacagtgattctcatggggccagtgttttatttttttaataccatcattttttacagctggcttaagggaattttttcctctatgtttttgtatctgagggtgaaaaacattttgcctggatctagcaaaagagtactcagtaagttctatttaaattgaagtgaactttatggatgcaaaaacaccaatgtacctttttcctgtcctgcttgtttcttcccagatgtaattgggttcctgtagcaaatggggtaagggctctgcgtgtcttaatacatcattgccaccagaaggcccatttacaacttgcttagattttgttgagaagaagaggaaggtaggaggaaggagatggagggtccggtgtggcctgagcaccccagtacctggctgaggggagggatggggcacggccaggagactctgggaggcatctcagcccagtacctggctgaggggagggatggggcacggccaggagactctgggaggcatctcagcccagtacctggctgaggggagggatggggcacggccaggagactctgggaggcatctcagcccagtacctggctgaggggagggatggggcacggccaggagactctgggaggcatctcagcccagtacctggctgaggggagggatggggcacggccaggagactctgggaggcatctcagcccagtagctggctgaggggagggatggggcacggccaggagactctgggagacatctcagcccagtacctggctgaggggagggatggggcacggccaggagactctgggaggcatctcagcccagtacctggctgaggggagggatggggcacggccaggagactctgggaggcatctcaccccagtacctggctgaggggagggatggaacatggccaggagactctgggaggcatcttcgttactggccattggattcctcaagttctgctgagaattctagtctctttttttccccactctagaataaggatcttaattatttatttgtgttgtccattgggaaaaatgatttgggatgtgcttactgtcaacaaggggatagtggtgggttccgaatgtaaactggccgtaatcccagcactctgggaggctgaggtgggaggattgcctgaggtcaggagttcgagaccagcctgggcaacgtggcaagaccccatctctccaaaaaatacaaaaattagccaggcgtggttgtgtgtgcctgtcgtcatggttactcaggaggttgaggtaggaggatctcttgagctcgggaggcagaggttgtagtgagctatgatcacaccactgcactccagctctaggtgacagaaggattacaagaaaaag

SEQ ID NO: 29731 - DNA, 1704 bp, Artificial sequence
  DNA replication origin
caagttgggaagagaaaattctggtctgaaggtcttttctttctgactgacagacaatctcagtaactgatcccattatctctggaagacagtaccaatccagagcctctaaaatatttggaataaacattacagatttttcttaagagacagggtctcactgtgttgccaaggctgggaatggagtggtgcaaacacagctcactgcggcctcaacctcctgggcccaaggggtcctcccacctcagcctcccaagtaaagacattttctaaggtgtgaaaaaaagcttcatttagaatacatgttcacatcaaaaccaccaccacgactataaacaagctatgttgtcaaacagaaaagcaccaggctacacttcttactgtcagctcctgcctacagcaactcaggaatcaacaggcctgtggaggctgagtgcagacagagaccatggagacatgaagggtcagtgtgtgatgacggagtcagggagtcagggatgggaccatcacccatccatgtctgggggtggggctgagacacgaagggtcagtgtgtgatgacggagtcagggatgggaccatcacccgtccatgtctgggggtgggggtgagacacgaagggtcggtgtgtgatgacggagtcagggatgggaccatcacccgtccatgtctgggggtgggggtgagacacgaagggtcggtgtgtgatgacggagtcagggatgggaccatcacccgtccatgtctgggggtgggggtgagacacgaagggtcggtgtgtgatgacggagtcagggatgggaccatcacccgtccatgtctgggggcgggggtgagacacgaagggtcggtgtgtgatgacggagtcagggatgggaccatcacccgtccatgtctgggggtggggctgagacacgaagggtcggtgtgtggtgacggagtcagggatgggaccatcacccgtccatgtctgggggcgggggtgagacacgaagggtcggtgtgtgatgacggagtcagggatgggaccatcacccgtccatgtctgggggcgggggtgagacacgaagggtcggtgtgtgatgacggagtcagggatgggaccatcacccgtccacgtctgggggtgggggtgagacacgaagggtcggtgtgtgatgacggagtcagggatgggaccatcacccgtccatgtctgggggtgggggtgagacacgaagggtcagtgtgtgatgacaggaccactgcccatccatgtcttggggcaggggtgggggtaaccaaaaccagaatccagttaaaacaacagggagttgcttctacctatggaaatggcaacaggacaagatgataacccaggtgctaaggagtcggctacacgcattctgtgttaggaaacccaggaggtactaatggcggctctctctgaatggtggagcaatgtgaggttttaaatgctcttaccactctggactccttactctcatcaacccctttaagtgggttatttgccacgttagggatagggaaagaaaattatttaatacaatcaacgggtaaaaagttaaagttacctaagaagaaagagctctaggccaaacctataatcccagaactttaagaggccgaggtgggaggatcacttccgcacagaagctcaaggctgcagtcagttagggtggcaccactgcactccacctgggc

SEQ ID NO: 29732 - DNA, 845 bp, Artificial sequence
  DNA replication origin
aaaaaaaaaagaaaaagttattgtattttaggaaaatattagataaatgctggtacatgtaataaatacatgatgttgggccaggcgcggtggctcacgcctgtaatcccagcactttgggaggccgagggcctgcgtgtccggatgcagtgttcttagggccaaaggtggctgtgtaggaggagtgagaacaggtggaatgtggacacttagggtacgaggccaagagtggagcattgttgtaggattgtggaccacagcagggagtgtgagtgcacggatggggatcacgaggaccctctgattcgtaggattgtggacgacagccgggatgtgggtgcatggatgggatcatgaggaccctctgatttgggtgttagctgtgtggttgctacactctagatcgtgctatgtgatgtttctttggcacctcaggcccccttgttgaggttcagtgatatctgatggagaggaaagggtgttggggtgtttgtgataagtcgctggatagggaagagagggaggcatctagggaccactgtctttaggagtttaatgagggcaaggaatggggtagtaggagacagggcagcaatagtgattaaacttttggtactaatgggttgcaaatatgcattgggggtgaggaggccactggtgttggacgtggagctttgtagttggaacgatggacgtgccctttgtgtgggggtcatgcagtcacgtgctcggtggctttcatgcagtgtcttcgtagggtggggagggatggcaggcattcagttggtggcaggttgtgttgggtcctttccaagctttgcttcattcaggctttaagcaggacc

SEQ ID NO: 29733 - DNA, 1233 bp, Artificial sequence
  DNA replication origin
aggcagaagttttcttagtacagaacaaaatgaaaagtctcccatgtctacttctttctacacagacacggcaaccatccgatttctcaatcttttccccacctttccccgctttctattccacaaaaccgccactgtcatcatggcccgttctcaatgagctgttgggcacacctcccagacggggtggtggccgggcagaggggctcctcacttcccagtaggggcggccgggcagaggcgcccctcacctcccgggcggggcggctggccgggcgggggggctgacccccccacctccctcccggatggggcggctggcctggcggggggctgacccccccacctccctcccggacggggcggctggcctggcgggggggctgaccccccccacctccacctccctcccggacggggcagctgggcggggggctgaccccctcacctccctcccggatggggcggctgctgggcggagacgctcctcacttcccagacggggtggctgccgggcggaggggctcctcacttctcagacggggtggttgccgggcagagggtcttctcacttgtcagacggggtggccgggcagaggtgctcctcacatcccagacggggcggcggggcagaggcgctccccacatctcagacgatgggcggccgggcagagacgctcctcacttcctagatgtgatggcggccgggaagaggtgctcctcacttcctaagtgggatggcggctgggcggagacgctcctcactttccagactgggcagccaggcagaggggctcctcacatcccagatgatgggcggccaggcagagacgctcctcacttcccagacggggtggcggccgggcagaggttgcagtctcggcactttgggaggccaaggcaggcggctgggaggtggaggttgtagcgagccgagatcatgccactgcactccagcctgggcaccattgagcactgagtgaacgagactccgtctgcaatcccggcacctcgggaggccgaggctggcggatcacttgcggttaggggctggagaccggcctggccaacacagcgaaaccccgtctccaccaaaaccagtcaggcgtggcggcgtgagcctgcaatcgcaggcactcggcaggctgagtcaggagaatcaggcaggggggttgcagtgagccgagatggcagcagtacagtccagcttcgactcagcatgagagggagacc

SEQ ID NO: 29734 - DNA, 921 bp, Artificial sequence
  DNA replication origin
ccatcgtctgagatgtggggagcgcctctgccccgccgccccgtctgggatgtgaggagcacctctgcccggccaccccgtctgacaagtgagaagaccctctgcccggcaaccaccccgtctgagaagtgaggagcccctccgcccggcagccaccccgtctgggaagtgaggagcgtctccgcccagcagccgccccatccgggagggaggtgagggggtcagccccccgcccagctgccccgtccgggagggaggtggaggtggggggggtcagcccccccgccaggccagccgccccgtccgggagggaggtgggggggtcagccccccgccaggccagccgccccatccgggagggaggtgggggggtcagcccccccgcccggccagccgccccgcccgggaggtgaggggcgcctctgcccggccgcccctactgggaagtgaggagcccctctgcccggccaccaccccgtctgggaggtgtgcccaacagctcattgagaacgggccatgatgacagtggcggttttgtggaatagaaagcggggaaaggtggggaaaagattgagaaatcggatggttgccgtgtctgtgtagaaagaagtagacatgggagacttttcattttgttctgtactaagaaaacttctgccttgggatcctgttgatctgtgaccttgcccccaaccctgtgctctctgaaacatgtgctgtgtccactcagggttaaatggattaagggcggtgcaagatgtgctttgttaaacagacggttgaaggcagcatactcgttaagagtcatcaccactccctaatctcaagtacccagggacacaaacactgcggaaggccgcagggtcctctgcctaggaaaaccagagacctttgttcacttgtttatttgctgaccttccc

SEQ ID NO: 29735 - DNA, 1984 bp, Artificial sequence
  DNA replication origin
ccccggcgacggagctgcgccgcgggcctccgggcgggcctggggggtcggggccgggtgggcgggggtctttgggggcccggggcgatcgtgagggaccaataatgggtcccggagcgggcctacgggtccgggttcggggcagccgggggtctttgggggcccggggtggccgtgaggggcccatagggggctccggggggggcctgggaggtcggcggagcttgggtcggccgtaaggggcggacgggggctccgggcgggcctgggtggccgggggcccgcggcggctctgaggggccgattgggggctccggggcgggcctgggggccgtgggggcccggggcggccgtgagaggcggacagggggctccggggcgggcctcgggggctcggagcggccgtgaggggcggacggggggcttcggggcgggcctgcaggtcttggggacctgaggctgccgggaggggctgccagggggcgctggccgggcgccgggttctgcggagctggggcgccgacctctgacccgcgagaggggcgccttcgccgtgctggtcgtagttgttattctcagcgtccctattattatcgctgttttgaaatgagagcaggcggctctcgggctccgagccggagggggagggcgaactggggacctgggggcgtcggggttgcaggaggcgcgcgtaggccgaggaggggcaggaatgcgggcagccgtgtggggggtgttagggggagggtaggcgggcgggtgtggggggtggctgggaggaaagcggtggcggtggcggctgcaacagcagcccttggcctcaaggaacaatgtgagacgttgcctgaaatgttaatttccgttcctcatttcatcatcccctggcagggcggtagctgtgtgtgtggtgtatgtgtgtgcgcgcgcgcgcgcgcgcgcgtgtgtgtgtgtgtgtagggttggccctgccacattgattcagtcccctctcaaagagggattgtactgttaactcttgtgtttgtgttatttgggaaggttggtcggggggagtcttgatttttctcgaggcttgctcttttcctggtgccccattaagattttctgcttctgttgtgtttttggaaggttagtgttatatatcagcttccaagaagttttggaagaggcttgggaagatgaagctggtctaacagctccctatgctttgaaactgttttccttctatgtaacatgcttaggattcatcgtttttgtagattatgagtagttttgtatccttttgcaagaacagggttttatggtagagaaattagatttcaggctttcttacatgaggagagagttttatgcagtcattagagcaatatccttaacacttgaaatgagaaataaaagtgtgcacagttgttgaactgcaaaacttagagaatcttttgatcctttttgggatgttgagacttagccaaacatataagatgatattacctgtggaaaaagtgccatcgaaacagttactgtttttgttgtgtgcagacctagtctatggcataacgttcaaaatcggagaccctgaggctgtttctttggtttctctgagaccttgatttctcttagtaagtattggctgccctggaagacttcgagttctgttagagaatgattacagaagtcctctgattttactctgcaactgtagttaaactagaaaaaaaggggggggggcggatgtcttgctcagccttcattgtgacccttgcattggatctcgtatagttggtgtggcctcccctaccctccattcagctgttgttctcctctttctgtagtttctccccgaagagcaggatctccttcgataggctggccatctgaatggaactggatgggagggaacaaagaccaagttgctgtgacgttttctctgttcttcgtgatgcctcttaagtttgttgaaaagttccccacaagatagtgctaaatt

SEQ ID NO: 29736 - DNA, 836 bp, Artificial sequence
  DNA replication origin
tgcccgccccgaccaccgcccccagaccagcggcgcctctcaccgtgctccgagggctgcgcggctccgcgacggctcagcggcggggcgcgggcgctgcccatgcagcccgcggccgcgtttcccgggccgcgcggcccgagcggcaaggcggcggcggcggcggcgcgggctcgggcccggcagagctgcgagggacggcgggaggcgagcccgcccctcgggcgcgcccacggctcgggcgagagccgcggctcccggtgcggacgctactgatggggcgtctggccgcgggctcggcggcggcgcctccccggctggggccctcggtccatcgcgcaccgtctcagggcggcctctggctccaggacccagcggcggctgcggcgggagccggccgcatgagacgctcccgcccattggcccgccgtatccgccaccgccattggcccgccccggccggccgcaggggctgtgcacgtcacagcgccgtgagttagtgcgctaatggagtgaaggagagaggcgggattgacagcctctctggcggtccggaggcgggactaggaggacgtcccggtaacgattgggcagggtcctgcgtaagggcgcatgcgacactggaagtagcgagcaactggattggctgcctccgtcgcaaaggagggtgggtcttgcattctcgggcctgacgattggtctttccaagtgccggaagcaacagggatgtcgtctggaaacaaaatctggtattgaagcgcagggagacaaaacgtccacctctagagccgaggcggcggttgcctgtcgcgtgcccgtggtcttctgcctgcccc

SEQ ID NO: 29737 - DNA, 967 bp, Artificial sequence
  DNA replication origin
ttgggcagggtcctgcgtaagggcgcatgcgacactggaagtagcgagcaactggattggctgcctccgtcgcaaaggagggtgggtcttgcattctcgggcctgacgattggtctttccaagtgccggaagcaacagggatgtcgtctggaaacaaaatctggtattgaagcgcagggagacaaaacgtccacctctagagccgaggcggcggttgcctgtcgcgtgcccgtggtcttctgcctgcccccggacatctcgggccacgtccggcccggcctccggccgcgctgccctaacgggcgtcacggggcatgaagagctctgggcggctgcgaggggagggtaccggggcagcggggcggtcgctcggggctcccgcgcggtgactcttgctctgccgtcgaagagaacggccctcgggcgcgtcgcggccgcggctccagagcccctgggcctcgcgctctgagagcctgagccgcttgaggaggccaagcgcccacgaaccgcattccctgccttgctagttagttctccaacacgcgaaaaaggtagacgaggactggttttctttgcagctaaaatgaatcaagcctctggtaagtgtggatcctgttctaagtgcacctgtgttctcctccagaactaaaccaaaaagcaaggtgaacaaaatcggtgctccttcagtttcttctttagttctgcatgttactggggactaagacaacgggtaagcaaactatttataggcctcaatttacgaaataacggaattgcaaagtccggagtggataggaccgtgaggacggtcttttttcttgggcaacacgcattatggtcgagagatcagttgttaaaccgcccctgttcaaatcccagccctaccagtgactagcggtcaccctgtaggctttgtctctcagatcttcagtttcttggtgggtaaaatgggaactacaagtagcac

SEQ ID NO: 29738 - DNA, 1317 bp, Artificial sequence
  DNA replication origin
ttttaacttatctcaaacaatattaataggactacacttaaactcctcccaaacacatccaaatgtgtgccctcaccctctctccagccttgtcccgtgaccaacccaaccaaacttccgaaagggttttttgtgttctaggaagtgaccgagccccacaaccctttatgcctgtgcgttcagaggatttgtgacctttttttttttttttgagatggagtctcgctctgtcgcccaggctggagtgcagtggcgggatctcggctcactgcaagctccgcctcccgggttcacgccattctcctgcctcagcctcccgagtagctgggactacaggcgcccgccacagcgcccggctaatttttcgtatttttagtagagacggggtttcgccgtgttagccaggatggtctcgatctcctgacctcgtggtccgcccgccttggcctcccaaagtgctgggatgaagggcagggagagggagggggagggcaccgcgcccggcccacctggtgtctttcaatcagggaaagaaaaaatagtggaggaggaaacggcaaggttggattcactgcgaaggctgactgtacaataagaagcaaaaggaaaagcggttcagttgtgaaaatcagtgtcagccctgggtgtaggggaaggtcctctccacaaaccaacagaacacctccccagccccgagcacctctgccgaggcacccggcccactggagggctgagggcggataaccacgataactgaaaacactttcctgagcgtctcggggctgaggaagagggaggattacacgcagcccactggctttgcaacctcgtctgtagtggtggagtgagtgcaggtccagaaacaaaccagaccggccttgaaattctgccctaacttcagagctgtaatcctaggcaggttacttttaatacttctgaatctttctttacatgtaaaatagaggtattgtattcgctgcacagggttgtgaatattacatgggtgttcgacacggagctaggcactcggtgatgttggctgtcgtcactggcattcactgttacgaatttgcggagtacagaaaagcataaaaataaataggtcaccctcatcctacctctgtgacagaccatctagtctttgcttttcctactcaacaagctttccagctcttggcgtcagctctagacctaaggcggacggaggaaggggtcggggtggcggaggaccccgcgcgcctgggagcccacgagggaccctgcccgggcccggagggcggaccctgaagagaacagagcctcttcctaagcttccag

SEQ ID NO: 29739 - DNA, 998 bp, Artificial sequence
  DNA replication origin
tagacgggctcaggctcgggggtgcggcaagcggcacccgggcgcggcggggcgcagctgtggggaccgcgcaggcgccacgtcagaccccgcccaccccgccgcgcaggcgccgtgtagcgccccgcggatcacgcaggcgcggctttcaggccaacatggccgtgctgctgctgctgctccgtgccctccgccggggtccaggcccgggtcctcggccgctgtggggcccaggcccggcctggagtccagggttccccgccaggcccgggagggggcggccgtacatggccagcaggcctccgggggacctcgccgaggctggaggccgagctctgcaggtaaatccccgcggagtccgggccccacctcccgcccggctctgctctgtaaggcccagcccggcggggcgggtcggaggccgcctggcccctgcggcgggggagcctgcgcctgtgggcccgcggatcccccagctgtggacctcggcgcggagcgactgttggggccctggatcgtgggcgctgggcgggccgggaagaggcagggctgggatccgcgcagtcctcggcgtggactttcccaacccgtctgttgtgtgtggatgttctccgcccgtcttcctcgccttttaaagtggaatccagtaacggtttccggcgtagcactaatttacagtccacgcctgtggatcgattccgtcaccaggaattccagcgccttccagttagggtggttattgccgagtagggggcccagaacgtttctgtgtccgcaaaataccctgtagctgcattttgctgttgtcatgtagctcggcacgttattgatacagtcattgagcaccccctgtagtgcggccttgtttcaggttctgctaaggataggatagcatctcctcccgaaaaccagaccttgtgtccttcagcttttgggctgatgtttttttctcctagccctcgcctaggagcttagcccacaccttttaggttgttgtt

SEQ ID NO: 29740 - DNA, 2642 bp, Artificial sequence
  DNA replication origin
cgtcttgttatttgcccgtcggtggacatgtggactgtggtgaatcaggctgtgttaacataagtacaagcatcttctgaagtctctgctttgtaagatttatttttaatcagaattctagttacattttaggtattgtagatgagggagactttttttccccaagtgttctggctccgagagagccgttgacttcctgttttctttgttgcctgtggctgtctggagtcgtgtgtgttagcacacatgcacagcccagttttgactactcagctaagggggagcttgctccacctctcattgcaaaatcactttagacttacagaagcgttgccacggtagtcagagtgttctttgatgccttcctgcaagctccctgaaggctgactgtgacatacatggtctgcaggttcggaccaggccacgctgtccgtgactgccccccagacccatccacaggtgcttccgcccccccgatgtggatgtttggtctccttggtctcttcccctcctgtgtcatttgttggtcttgttttttgagacagggtcttgctgtgttgtccaggttggtcttgaactccttggctcatgcaatcctcctgcctcagcctcccgagtagctgggattacaggtgggcttcactgttcctcagtgtttgtctttggtgactgtgacactgtacaggccagtgacattcaggaatgtcatctctggaactgtgacatgtcctcaggatcaggtcgagcagtgcatttggcaggattggtgcagcagtgctgtggtgtgccttgaggtttacagtgtcgctgcacctgtcgctggcggtggactctgctgaggactttggccctgggctggcatgcatctcttctgggtgctccatgttccctgtgctggcgcccgtctcttctgggtgccccgcgttcccgtctgcctctgggctgctgtgaagtcaggtagactgatgcccacagaagtgttctctaggctctgaaagctctgaggttagaagatgaaagtgagattcccgacagtgtgcaggacgcaacgacgtttgcggagaatgcttcacacctctcctgctgcttgtcccccgtgtctccagtcgtctctcaacacgcttattcaggaactaacgcgtgagcaaccgagacctgaatggctgccttctgcacacacagcaagtggtcatgggagtcgagttttcagagaacacaatgtcttcagagatgtggggtgagcagttcagattctgtgatgtctgaggtgtcactgaggagagacccgtcctcagaggtgggtccttggggttcagggaccccaccgcctctgctgggagagctgccctgtacctcaagcggagatcaccatgcgttttagaggcctctggagcctacaggctcgctgtactgcttctctgcagagcatctttatgtggcctctctggtgctgtgtggccttcagtgtggcctctctggtgctgtgtggccttcactgtggcctctctggtgctgtgtggccttcactgtggcctctctggtgctgtatggccttcagtgtggcctctctggtgctgtgtggccttcactgtggcctctctggtgctgtgtggccttcactgtggcctctctggtgctgtgtggccttcactgtggcctctctggtgctgtgtggccttcagtgtggccgctctggtgctgtgtggccttcagtgtggccgctctggtgctgtgtggccttcagtgtggcctctctggtgctgtgtggccttcagtgtggccgctctggtgctgtgtggccttcagtgtggcctctctggtgctgtgtggccttcagtgtggcctctctggtgctgtgtggccttcagtgtggcctctggtgctgtgtggccttcagtgtggcctctctggtgctgtgtggccttcagtgtggccgctctggtgctgtgtggccttcagtgtggctctgaccattgcttctggaggctgctcaaggatgggtgggtggtttgggttttgaggaaatctgcagagcaccttgggttctggccgcagagtctgaggactctcggtgaggcgggtgaggcgggtgaggcgggtgaggtcaggtgaggcaggtgaggtgaggcgggtgaggtcaggtgaggcgggtgaggtcaggtgaggcaggtgaggtgaggcgggtgaggtcaggtgaggcgggtgaggtgaggcaggtgaggtgaggtgggtgaggcgggtgagggcgggtgaggcgggcgaggtgggcgaggcaggcgaggcgggtgagatcgggcgaggcgggcggctgcgctgctctggctgtgtggcgtggacaccaaggtcttcgtcctgtgagtctgcggccttcttctccaaccaggtgcctctcttgaccagctaccctcccaggggaccatgaggaagctcagaggaaagacccccgcctgctcctgtctcacggagcccacagggtcacggagggcaatggagggtcattcgctctgctggggttgccttttgcactgaagatagagaccacctttttgagtgacttgagcccaaaggcaagcgtatatcaaacgatcttctccacataacctctctgtgccatcataagaatagctgcttccgcccccgga

SEQ ID NO: 29741 - DNA, 977 bp, Artificial sequence
  DNA replication origin
ggccgtctgactcacaactcacgcccgccgactgcccctgtacttccctgggggttgcgagcactgccgagccctgggtgacgctggtgtggccaggctggagcgcagagaaccacacttggggttcagagtgtgttctcccactcagaagcattggctctgccgggagcgggatggggatgcagctttcttccccattttagacctcaggttggaagggcgcactcaggtggcagcagccacttcgggttgggcgtctcgtgctgtcctggtgcgttgagacatccctcaaagaaagcacgagtaccctccacacccacatagccagggcatccactgtcaccactccatgtggaagtcctgttggtaaaatcttgacaagagccatttagagagcacggggggaaattctcccaggtccaagcagaatggacagtgagcctgggggacggatggacaggaggaggcctgggcttctgggctccgcaggcagggaggggccggcagtgtggcttattccccgggtggacgaggagccctgggcttctgggctccgcaggcggggaggggccggcagtatggcttattcccacttgagtcagctcttgagcacttgctcgtggcccagaggtgatgctgctgtttctgccctctgtcctctcagaggaagtgggtgctggttcaaggatctcaggctctgagcgggagagcggggtcaggtctagcttctgtccgtggcttgctccctgtggtgctgcctctgcctgccctgccgtcttccacatgcgtctccaacagggaatggaaggagcctctgacccaaaaacatcccccaaactgtcgggtcctgcggcaagttgagggcctctcaggggtcctgtctgcggccctgtgggaagtgaggctgtggcagccggtcctttatcctgagtttggttgcttgttttttggacaatgtcttaggtcccagtgatggt

SEQ ID NO: 29742 - DNA, 1124 bp, Artificial sequence
  DNA replication origin
taggattacaggtgtacacaaccacacatggctaatttttgtatttttagtagaggcgggattttgccatgttggctaggccggtctccaactcctgacctcaggtgatccacccgcctcggcctcccaaagtgctgggatttacaggcatgagccaccgtgcctggcctgtgaaatacttttttttctttttgagactgagtcttgctctgttgcccaggctagagtgcagtaatgtgatcttggctcactgcaacctctgcctccccagttcaagcaattctggtgactcagcctcctaagtagctaggattacaggcatgcgccaccacgcccagcttttttgtatttttagtagagacagggtttcaccatcttagccagggtgatctcaaactcttgacctcggctgatccgcccacctcagcctcccaaagtgctggaactgtgaaattcttaaaatgtggattacgttggccaggcacggtggctcacgcctgtaatcccagcactttgggaggcccaggcgggcggatcgcgaggtcaggagatcgagaccatcctggctaacacagtgaaaccccgtctgtactaaaaatacaaaaaatcagctgggcgtgatggtgggcgcctgtagtcccagctacttgggaggcagaggcaggagaatggcgtgaacccgggaggcagaacttgcagtgaacagagatcgcaccactgaactccagcctgggcaacagagggagactccgtctcaaaaaaaaaaaataataataagttttaccaggaggaagcgtggtgattgggtgagggtagggaagaaagagggttattgggatttaaaggtttccaggtagcagtaagatggatggtgccttcacagacttatactagagaagagatggctttttgttgatgcttttctttgtgaaggaaggcagtaggcacagcaggtcagagtgtgacattttcagtcgggtacccctgaccttagagaagtcacctaatcctgggccaagggaaagcgacagaggccaacagtaactccgtctactaaaataccaaaaattagcagggtgtggcggcgggcgcctgtaatcccagctactcgggaggctgaggca

SEQ ID NO: 29743 - DNA, 1817 bp, Artificial sequence
  DNA replication origin
ggcgcggccggacggcccagtctggagggttcggggcggaggcccgggggggtgcgcgcgcccggggtccggcctctcactcgctcccctctcgtccgcagccgcagggccgtaggcagccatggcgcccagccggaatggcatggtcttgaagccccacttccacaaggactggcagcggcgcgtggccacgtggttcaaccagccggcccgtaagatccgcaggtgagccctgcgctcggggctgcccctggggctcgtgcccgcggctgcgccttggcttgcgggtggccgatgccagggcggggggcgctgtctgcaaccgtcgcggagcgctggcctggcggccttaggcaagggtgaccgccgctgcgcttctctccaccagacgtaaggcccggcaagccaaggcgcgccgcatcgccccgcgccccgcgtcgggtcccatccggcccatcgtgcgctgccccacggttcggtaccacacgaaggtgcgcgccggccgcggcttcagcctggaggagctcagggtgagtactggcagcgctgcggtgtcaggaaggccccgaagtcccctctgttggcctcagtcgcgtgatgacattctccggaatcgctgtacggccttgatgaaagcacatttgaacccttttccatctgattgctgaggcttttcatccaggcctcggggctggagaaagcccgggcctgtctccatctctctctggttctggggcaggtggccggcattcacaagaaggtggcccggaccatcggcatttctgtggatccgaggaggcggaacaagtccacggagtccctgcaggccaacgtgcagcggctgaaggagtaccgctccaaactcatcctcttccccaggaagccctcggcccccaagaagggagacagttctgtgagtacacggctctctggccgtcctggtgcgcggggacagtgaggcttggctcctttatcagtgacaccggtccctgggtcttgctggggtgagaagaaccaaaacattgtgggtgatgagctaagcgggactgctaaggttcacctgtgcgtttccgcagagataaccttaatggacatggcaaggctgtgtgacttggaggcagctttttccattgacgttgctctccctaaaatgcttcgtattccaaaatatttctagaaagaccttgtaggataaggttgataaagagtccattgtatacgtttccgggtagttaaattagggaacagttttctctgccccgcccgtggttcacaggtagataactgtctcgtgcgtgttgcgtcaactcagtaagatatagtcacctaactaataaggactgttcttaacattggggccacaaagtgtgttgtagaaaaggctcagacactggtcctgaacacggaatccccaggggaaagtttggggccaggtgagggtggagtccttgcagcagtgcggccaaccccacttaactcttctcattcaccaacaggctgaagaactgaaactggccacccagctgaccggaccggtcatgcccgtccggaacgtaagtgaacacttactcaaatccaggcttcagacgagatcagtgggtgaacacgtgggtatctgagatgcgggtgatgggggtcaggcttaagaacgttaatagtggcagttgtgggtgtggaggtttgcggaaaggaacatttcttcttagtttttacttcttgcaaccatgaagccatacattgggaagtatttttgtttgttttgtgtttttttgttgttgttggaaagagagtttctctatgctgcttacattggtttt

SEQ ID NO: 29744 - DNA, 4023 bp, Artificial sequence
  DNA replication origin
tgcccaacacaccaggcgccgtgagagcagtgggccacaaggaacgaggcgggggctgatggggagcaggtgctgggcagacaggcggccgcaggggaggcggaagggtcacctaaaggcagggagatgaagggaggaaggtatttgttcacgagttaggggcagttcacaagataagagcaatttacaagttaagggcacctgctgtctcccaggcacggccccaagctgggaccacaactgaaccaaactactcccctgcccttcagcgtgtctctgcaaatgttcagcttcatcttggccggccgggtgcagtagctcatgcctgtaatcccagcctttgggaggccatggtgggtggatcacttgagcccaggaattcaagaccagcctgggcaacatagtgaaatcctgtctctacaaaaattttaaaagttggctgggtgcggtggctcatgcctgtaatcccagcactttgggaggccaaggcgggccgatcacaaggtcaagagatggagaccagcctggccaatacaatgaaacctgtctctactaaaaatacgaaaattagctgggtgtggtggcacacgcgtgtagtcctagctaatcaggaggctgaggcaggagattcgcttgaacccgggaggcggaggttgcagtgagcagagattgtaccattgcactccaggctgggcaacagagggagactctcaaaaaaaaaaaaaaaattaggtgtggtggcgggcgcctgtagtcccagctactcaggaggctaaggcaggagaatcgcttgaactaaggcagaggttgcagtgagctgagatcacgccgctgcacaccaggctgggcgacacagcgagactgtctaaaaataatcaagcatctcttcccttgaccttccccacgtttccattcctgacacggtctggcctcttacctgtacctgggcaggtgcctcatgggctgcggctaggggacctgtggagaagacgagacactggcagagcctggtgccagaagggaccccgggagctcctccctttcccacagcatcagagtgggcagggggagggctgtggtggtggagggtctgggtgccttctctggaggtggcccagggagagagggggttggcatcccatggccttctccagacccccttcctgggcggctggatgtcacagccagtctcaggggcctcctgcactggtgagaggggcagggcagtagagggtgtgtcagacttggcccggccattgtccagcctccccattgtattaccctcaggctccccatctgcagcggtaccaccaaggcatggtgctgggggacagtctgatgtggcacggtccctggcagcacctgcccttctgagtaactccccagaaagggtggtgcctcccggggaggagggagaagaactaggctattgatgaaagggaccagagagcggagggaagtgtccgagcagccttccaggccggctttttaccaagaatagcatcaaaagcctccgatgactcaagcaagactaaaaccaggacgtccatcagttgggatggcctgaggacaccggccccggggacacagctcctgccggccatcacctcccacaggaccagagtctcctccgggcctctctgctcctgccctggccctgtggtcagtagccacccatctggtgcccatctcctgacgctcacccttgtgcgagcccctccctcaagcacgggctggacgcaacactgtgctctcccagaagcctcctttgaccttggagcacactggctgaggggacaggtgggcaccaggaaggcgtgtggccacagaggcgccagcgccaagcagaggggtggcactggggtagagagagctggtctcagaagagcctcagtggagcagggcggtggcgacacaggcttagaagccagtgaccccacagctgctgtctgaggggttggccccccagtcgggtacagagcccccagcagcagtggcaccattagccgggggccttcgcccagggcacagcctgcttgtcatgagcaggtggcactcacaggcccgtgggtttccgaggccctgctcagcttgggcttcagctgctcatccgagtgcacggacctcgtggacagcagccacccagtgtcaggcctcccagcagcacctcaggattataggagttggttctgggtagtcgacaggacactggaaggaagtgaggtccagagggttagcgtggtggggaggtcgggcaagtctgcaaaagggcagcctgggaggaggcaagtgggcacaggtggtctgcgggctggggaggtggtccctgggcacaggaggaggtgagcggggattggaggaggtgagcgggcacgggaggaggtgagcggggacgggagcaggtgagcaggcacgggaggaggtgagcgggcacgggaggaggtgagcggggcacgggaagaggtgagcggggcacgggagcaggtgagcggggacgggaggaggtgagcaggcacgggaggaggtgagcggggcacgggaggaggtgagcggggacgggaggaggtgagcggggacgggaggaggtgagcggggacgggaggaggtgagcggggcacgggaggaggtgagcggggcacgggaggaggtgagcggggacgggaggaggtgagcggggcacgggaggaggtgagcggggcacgggaggaggtgagcggggacgggaggaggtgagcggggacgggaggaggtgagcgggcacgggaggaggtgaggggcacgggaggaggtgagcggggcacgggaggaggtgagcggggcacgggagcaggtgagcgggcacgggaggaggtgagcggggcacgggaggaggtgagcggggcacgggaggaggtgagcggggacgggaggaggtgagcggggacgggaggaggtgagtgggtacaggcggtccgggggccggggaggtggtccaggggcccagggccactgctggtcagcaggcttggcagtcagaaagaagagaggacccaggagtggggacagtgggaccaggagcccaagtcctggggactctgggatggctggtgcctgagtctgagcacagaggggtcctggctcaggagggccaaagggggtgaggaagagccagtcccggacggtgtccccagcgtgcagtcctgggcagggaccctgacccctgggtctcactgcacaggggctgtgaagtctgggcccctccacagtaagtgctcctgagggtctgctgggaacattctgggcaagggcagcaaagccatcaagccacgccgggggctggacgggcgaaggaaggcgtgagggctgggttctgagcggggttccagttccaccccagggcctggacgggccgaggaaggtgtgagcgctggcttctgagctgggttctgggttccagctccacccctgctgtgtggtctcagccaccacaacgccctctctgagccatgtctcccgccagcagtggtgtctcctgctgggcagagatgctgggggctgggatggtctgctcctggctgcatgcagacaaggggcaggagggatggcggcccggggctgcacgcgagaacgcgcctggaggagaagggagtctcgaagaagggggtctcatccacacccagaagacggtgttgggggaaggaagtggaggaaggggaccccctggttggaacatatgttgccctggggtggcctgtgtctgcgcttgtgtgtcttgggtgcctggcgtgtctgcgtgtgggctgtctctccatgagtacgtgcacgtgtctgcggtatttggcacacgtgtgtggcgtgtgctcgtgcgtgcctgcatgtgctgagtgtggtggaggagaaagtccccctaatcagtccccaggtctctgaggctgtaacaaggtcagcgaggaactgagactggccaggtgtgttgtctcagccaacagccggcgtggccgcctctgggcatggttgatttctcaaataagatcagcatcagat

SEQ ID NO: 29745 - DNA, 1150 bp, Artificial sequence
  DNA replication origin
tccccaggtctctgaggctgtaacaaggtcagcgaggaactgagactggccaggtgtgttgtctcagccaacagccggcgtggccgcctctgggcatggttgatttctcaaataagatcagcatcagatcctgcaggaagacaatctgatccagacaggttgcagatgttctaagataaaataacctttctttaggaggaaagaaaagaagagggtaggtttgcaaccagattaaaaaaagcagcacccatccggacacgtggagagctgtttcctgttaaacaatcctgttagtaacccccaccctctgcaatttcttgttttgaggcaacttctgggacaatctctccacatgaagggcaggttcgaggaccctgcattcaggggtggggaccgagccccggaccggtccactggagcacaccagctgtgtgctcaggacggccagggaggaggccatggactctggacctggctcagggacaaagggctgtcagagtgtgggggagagcactggctccaggggatgtgcctcaaggcagtagcagtgggcctggggtctgccgggaacctctggaggccctggacaggtttccctgctcccggttggcctcgtggccagtgttactgaaatgggagatggggactctgtgactgatggagatgacaccctcgaggcagatccaggaccagagagcagccaccagagctgcgtttcattcgctgatccgcacttcattcatccgcctggagtttgttgtcttagactctgtgttgggacctgtactggtgttaactcaggcctcggtggactcctggtccagggtggatgaggtcatgggcagcacagccctggacagtggaactgatgttgtggacgtgtgggccgggagcccagggagggatgttgggtggcggttcagactgggctgggctttgcagggtaggtaggggtcgggtggtgggagaggctgaggcagaggcacttgggcctgaaaagtatctgagtcctggatgccaggaagccacacagggcacttgggcacagatatgtcattgctgctcctaaaattgatcatgtgtaagcctctggatagccgtgggggtcggcactaatcagagggtctcataggtaacccagtgatgaggg

SEQ ID NO: 29746 - DNA, 1534 bp, Artificial sequence
  DNA replication origin
cgcggggcacggtccacaccagtcccccgaggccggggcggggcggggcaggcctgggttccgtggggggtgggcccgctccgccctgaactcactcccccaccttccccatcaccggtcccgggggagggagcagcggaagaggaggcgtcggcggggacagaaaccacctcgcagtccactctttttgccgatttctgcctaaaaatagggcacggacctcgccaaaagccacgggggtggggggcgagggtgagggagacattaagactgaagaggcgggaagaccgggcgcctccgctcagcctcggcgatcaggactctagaagaagaccctgcggtcagaggggaccgccgccgacagggcgaggaggctcagggccccgccggcgggaggcagcacaggcagcctcggcctgggaggaggaacgcggccagcggcgtcccctcgcggtcggacggcgggatggcgccgggcgcggctgcagggcggggaggccccacggggctggcagggccgggagaggccatggagaccggctcctgccttcccgggaggttggctaaagaggcgaggaacaggtcagggcgcagcgaggcctgcagggccccatctgctgtctccccggcctctgcgcctcctccctgaagcccgcagtgggcagaggccagtcccgctctctagggaccagtctgggccttcccggccctgtgtcctcctcagcccagccttccaggctgccgggaggccacatcctcggtccccaaccacttccatgggaaaaggatgcgaaattcaggcaaagggtgcgggcgcccaggcagctcctgcaggccgtgcctcccgctcggttccagcagccctgggacagttttccccagaccaagctccgcttcctgccttgacctcacccgaaagctcctcaccaccgccctgaggtttgctcgtctgcagtgtggcgtgaggcctgaggtccaccaggctgtctgaggggtacccggcttaaacctggaacaccccagttcagcccttggctgtcacatagcggcaccctggcaaaataacagatggcttccaagcaaaggacgcagggagccaagaaagatcacagagtttgggaatttgagtctctgaagcccagggcgatttgggatctccagccacagccctcggccggcttgctgtctcctgactgacagccctgactgcagcctgctctaatggagagaaaccacagaaggaaaagccgattcccctgtggcactggtgtctggacgctgcctgcccctgctcagggatcagcccgcagtaggcccaggtacaatggaaggaccccgcaggccatgtggagccatctttccaaggctccccctcccagctttccctgcagggccagacacaggaaatgagatccacacacatacacgcaggaataataaccgtgttccttgttgaaatattagacaatgcagatagggagtaaaaacaaatttccagaccccaaagcagcccatcacctccccacatctaacc

SEQ ID NO: 29747 - DNA, 1233 bp, Artificial sequence
  DNA replication origin
gccttgcgccccactggcctcagcgcgcccgctctggtctccgcatccccagctcggcgccagccccggcccggtggcctctcggcctcccacgccccggccctacctgcacccactggccctgcgcctgctgcagcaacgccacgctggggtcggacttggtgagcgggtcgcggtccagcaggtgccggcagctgagccgcagctccaccttcgaggcgcagggcgcgggcaaacccccgggggttgccgccgccccgcgctccgagcccgcgctcatgctcccggcgttcgggggcccggctgggcgcactgaggggccgctgcccgcgagtcggcgccgccgcggcgcccgggaaatggtggccggcccaggcgtggccgcgcttccctgaacgcctgccgggcgcgggcgcacgtggctcgggcggccgccgcgcggggactgcagggggtggggcgcggccggggggcggggccggggaggggcgcggcgggaaatgagggcagggggcagaggcaggggtgcccctcggagatgcccgggaggagacagcttctaattccccggggaccccccccccaactgatagctttggggtcaggtcgggcgcgccctccccggctgtgcgcatccccggcccagggaccggctccgggctggaggctccgagctgcgcggggcctgagcccgggttcggacccaggcagacactaggggaggcaaaagggggaccccagcttggcaccagatccccgcgcccttcccggatctctaggatcccatttccaggctccgctggtttcgggtactcgccacctccatcaacaagcatttagtgggcgcctgttgtgtgcaggcgccgcgctcgtctggggctggaaggaccgtcccggggggccgagggctgaatcgcggtctgattccgaggggtccgcggggcacggtccacaccagtcccccgaggccggggcggggcggggcaggcctgggttccgtggggggtgggcccgctccgccctgaactcactcccccaccttccccatcaccggtcccgggggagggagcagcggaagaggaggcgtcggcggggacagaaaccacctcgcagtccactctttttgccgatttctgcctaaaaatagggcacggacctcgccaaaagccacgggggtggggggcgagggtgagggagacattaagactgaagaggcgggaagaccgggcgcct

SEQ ID NO: 29748 - DNA, 1236 bp, Artificial sequence
  DNA replication origin
gctgggcgggagcaggccggcgagggagcgcgcgctggggtgcggacctccaggcgtccggggctcccgctccaacgtgggtctcaagcgaacccgctgtgatcgcggttggggtccgaaggggcacggggccggcgccagacgggcgcttcctcggtcaccatctcgcgtgaaacgcgtggcttcacctcgaaagggcgagaaacgcatggcgcgaagccgcagcgggcggaggagccggaactcgaaccccagtccgcgcggggcgccagcgcttttccccggcgcaggggtctctccaggctccagcgcgggcccgggcggctgctcgggcggtggaagggacgcggtcacccggtggcgtctccggtcatccaccttgagggtgaagggcctgccccgccctcaccgcctgtccccagggttccggctgcccccggaggccccgtgcccgcccctcacagcctgagcccacccttcacatcccgagcccaccatccccacggaggcctcgtgcccgcaccctcagagcgtgagctgtacgggtggcccatgtttgcccttggtttgaggtgcaggatttttcaggattctgaaatgagtagcctactggcccagctgggtcttgtccttacggggcagttggaccagggaactgcatgggatgggagaggctggtgagcccatggtaccccagccaggagggagggcccccctgtaccctacgccccctccccactcagctggtgctggggagcggcctgcactttagggctgcccagcccagggtgtgaatctgatctcgcccccgactcagcgtgtcattctcgtcctctgtgagcctcactttccccatctgtgatctgagggtggagcagacagtggtggccaggggtgacccccagggtggccctcgggattgtggtcccatggacagagagcaggcaggaggtcttcccagggtatgagtcctcctgaggtacctgggcgtgggtgagcggcagaggggagatggaggtctggagcccggggtggaagcctctggagtggggtcggctcacaggtgcacttgcaggtgggcagaaccgaggtggtccggagcagcctgcatcccgtgttctccaaggtcttcacggtggactactacttcgaggaggtgcagaggctgcgctttgaggtgtacgacacgcatgggcccagcggcttcagctgtcaggaggacgatttcctgggggg

SEQ ID NO: 29749 - DNA, 2514 bp, Artificial sequence
  DNA replication origin
aaggtgtccaggccagacacagtggctcatgcctataatcccaacattttgggagcccagggtgggtggatcggtgagcccgggagttcaagaccagttggggcaacatggtgagacccctgtctcttcaaaaaatgcaaaacgtagccaggtctggtggcgtacacctgtagtcccagctactcaggaggctgaggtgagaggattgcttgagcacaggccgttgaggctgcagtgagctgtgactgtcccactgcactccagcctgggcggcagagtgagaacccaactcaaaaaaacaaaaaaagcatgtccatatttctgtgtccgtgccatcctcttccatctgtgccctccctaactctcagtttccttatctaaaaaatggggaggacaacaggatcgatggcacgccagctccgaccgaggctgcagggggatgagtcacgcagacattatgttgggtaaaagaattccacagcagggagaacacgcgctgtgattcatggacgtggaattccagaagagacgaaccaggcggggagctggccacaaaggggcaggggcagctgcgggtgacgggatgttccgtgtgatgggtgacgggatgttccgtgtgacgggtgatgggatgttccgtgtgatgggtgacgggatgttctgtgtgactggtgacaggatgttccgtgtgacgggtgatcggatgttccgtgtgagtgggtgatgggatgttccatgtgatgggtgatcagatattccgtgtcagcgggagacggaatgttccgtgtgacgggtgacgggatgttccatgtgatgggtgagatgttctgtgtgattggtgagatgttccatgtgacgggtgatgggatgttccgtgtgacaggtgacgggatgttccatgtgatgggttacgggatgttccgtgtgacgggtgacgggatgttccgtgtgacaggtgatgggatgttccgtgtgatgggtgagatgttccatgtcagcgggtgacgggatgttccgtgtgatgggtgagatgttccatgtgacgggtgatgggatgttccgtgtgacgggtgatggcatgttccgtgtgacgggtgatgggatgttccgtgtgatgggtgacgggatgttccgtgttacaggtgacgggatgttccgtgtgacgggtgagatgttctgtgtcagcgggtgatgggatgttccgtgtgatgggtgagatgttctgtgtcagcgggtgacgggatgttccgtgtgacaggtgagatgttccgtgtgatgggtgatgggatgttccatgtgacgggtgatgggatgttccgtgtgacaggtgagatgttccgtgtcagcgggtgacgggatgttccgtgtgatgggtgagatgttccgtgtgatgggtgatgggatgttccatgtgacgggtgatgggatgttccgtgtgacgggtgagatgttctgtgtcagcgggtgacgggatgttccgtgtgatgggtgagatgttccgtgtgatgggtgagatgttctgtgtgatgggtgatgggatgttccgtgtgacgggtgatgggatgttccatgtgacgggtgatgggatgttccgtgtgacgggtgatgggatgttccgtgtgacgggtgagatgttctgtgtcagcgggtgacgggatgttccgtgtgatgggtgagatgttctgtgtctgcaggtgatgggatgttccgtgtgatgggggagatgttccgtgtcagcgggtgacgggatgttccgtgtgacgggtgagatgttctgtgtcagcgggtgacgggatgttccgtgtgacgggtgagatgttctgtgtcagcgggtgacgggatgttctgtgtgatgggtgagatgttccgtgtctgcaggtgatgggatgttccgtgtgacgggtgagatgttccgtgtcagcgggtgacaggatgttccgtgtgatgggtgagatgttccgtgtgatgggatgttccgtgtgacgggtgacgggatgttccatgtgacgggtgagatgttctgtgtcagcgggtgacgggatgttccgtgtgatgggtgagatgttccgtgtcagcaggtgacgggatgttccgtgtgatgggtgagatgttccgtgtgatgggtgtgggatgttccgtgtgacgggtgagatgttccgtgtcagcgggtgacgggatgttccgtgtgatgggtgagatgttctgtgtgatgggtgatgggatgttccgtgtgatgggtgatgggatgttccatgtgagcagatgacgggatgttccatgtgatgggtgaagggatgttccatgtgacgggtgagatgtgatgggtgatgggatgttccgtgtgatgggtgaagggatgttctgtgtgacgggtgagatgtgatggctgacgggatgttccgtgtcatgggtgagatgtgacaagtgatgggatgttctgtgtgatgggatgttccgtgtgacgggtgatcggatgttccgtgtcagcaggtgacaggatgttccgtgtgaggg

SEQ ID NO: 29750 - DNA, 1214 bp, Artificial sequence
  DNA replication origin
ggggggcctggcccgaggctccccctcccagcacccaggacccctttgcacccctaagagagccttcccaccccttaacctgacttgacttccccagccctgacctgggatctgctttctcttctgtgtggaaagtgccgcatgctcagaagctgctggccaggccggccctggttgggggtggagggactgcccctctctgctttgtattcaacctacctcattgtgacctcccagcatccgccaggcagtagcaggtgtgagggcaggtgggaagcacacacctgctacctggtgggccattcgatggttgctgagatcacttacgtgtgaggagatgacggccaccccgcttggccggggtcatcaccatctcctttcggacacggagcctgggagggccgtgtgcccccgtcctgctcctcactgaggagatgacctggctgcaggggcctgggcctgtcatccgccacccaccccaggtgggctcatagccgatggggcggaagtccagcagggcctggtgaggaggaggaggccccggctgcatgaggaggtccccagggtctaagccccagtccacttcgaacaatcaactctgctccttggcaccttcgaagaggagtgggcggtggggtcctgggccggcacctcgctcacaccctttctgccgcccgtggctacgtggacatgctgggcgtgagggtccggggccgtttgagctgcctcgcctctgcttctgcgggttctcacctgggcctggagagggtcagggcagccctgcttacctgtggaggggcgtccgccacacctgtgcaggtgcaggccagctgggctgtgagctgcttcctggcttccacctgagcctgtttcctcacctggtaaataggtatgatgacctctgcctcccctgggcgactgctggcgccgtgaggtggtggacgtgcaggggtggccacacgcagggatggcaggtgcttgagagcagccacaaagggggcgcgggccctgggcagtgaagctcatggtgggggatggggagacaggacaggcctgagagtccgggtgagggcgcggtggggtctccagggtcaggagccgtccccgcctgcccctccctgcctgacgcctctgacttacagattgtggcccagaagaaggtgacccgcccgctgctgctcaagtttggcaggaacgctggcaagtccaccatc

SEQ ID NO: 29751 - DNA, 1016 bp, Artificial sequence
  DNA replication origin
ggtcaggccccacctggccaagcctggagcccgggcgtccccctgccaggtgatcgccgaggacatctcggggaacaacggctacgtggagctctccttccgggccaggaagctggacgacaaggtgagtgcaggtgccgggcacgcctggctcaggctgaggtccgggaaccggttcgaaaacccggtccctgcccagcgctgacctcgcgtggctatgtcccgtgtgagacgtgtgcggagtgtgcctggggctgggcgtgctgccgtcacggtcgccatcatcactgtcaccgccattagctctcccgcccctcctggcagctgggctggggctggggcagctccctcctgtggggaccactcatgaccctgctcagggatggggaaataggcccagcacccccgaggccactgtcgtgacaggaggaactggaacagcgcgcggttctgcgggctcgtcacgtgggtgggcagaacagggtccaaccccgccatgtagggcgtctccctggaggggctgagtcgcagggtgtgtagggcaagtccgtggagggctgagtcgcagggtgtgcagggtgactccatggagggctgagttgcccgccgtggtcagatccctgggggcgggagggagggacgagatgctgtcggcggggactggctgcctcgttttgtgcctgaggaattagcggctggtggcatgaagtgagccctgggaaacgacaaagccagctcccatccaaagcccgatctcacagtgcctggcccagcagcccttgtgcctctccccaggacctcttcagcaagtccgaccccttcctggagctctacagggtcaacgacgaccagggcttgcagctggtgtacaggacggaggtgagcggccggggatgggaacacagggaggggaaggggctgtccccagccctcacgcatctctggccacatgggaggagctcccagcctccaacagggagctgtgggcgcagggctttggtggctgtggctatggc

SEQ ID NO: 29752 - DNA, 1629 bp, Artificial sequence
  DNA replication origin
ggtctctatcccccccaaggatcccagggccctgggcctcccctgagccagcccctcccggcccacaggtggtgaagaacaacctgaacccggtgtgggaggccttcaaagtctctctgagttccctctgcagctgcgaggagacaaggcctctaaaggtgggggacgggatggaccaagggggcagtgagggggtggcctggatgtgggctgcgatggagacacctgggctcgggtgggagggtcctggggcccccagacagcagtgctgaggaggactgggctccccagtgcctggtctgggattacgactctcgaggaaagcacgacttcatcggagaattctctaccaccttcgaggagatgcagaaggcctttgaggaggggcaggtgagcaggacggggtagggggtcctccagggagggtcaggtgggggtggaggggggccttcggggaggggtaggtgagcaggactgggggggtacctccaggaagtgtcaggtgaggaggtggggggtggggtaggggcctccgtggaggggcatgtgggtgggcacctctggggaggagcaggttgggggggcctttggggaggttcaggtgaggggggcctccagggaggggcagttagcagggggagggggcattcagggaggggcaggtgaggggggcctctggggaggggcaggtgagtcgggggcacacctgggctacgcctgtgttggccctgccacagaggctgtgaaaccctgtcccactgtcctgatggggttgtggggagtggtgacaatgacttgttataaccagagaaggctgaggatggtggaccctggtgctggctcctgaggggtcatagcaggggtggcccccatcaggttcagctggacatttcaggcaccatctgggtctgggcacaggggtggtgggaggtggggccaaggggtgccctcccctgtgtctgcccagcccacagcagccgggtgagggtgcagtggggaggccaccctgggccctgcttcctcccccgtccctgggcctcagtgtccttgggcttaatgacagggccatgccgggtgggggatgcaactcccatccctcttcattcccgtatgacccactctgccccttcctgctgccctgcagcagtgccctcccctcccctccccaccacggggccctctgccgtcgctattggggatggtcttgggtagggtctccctggtaggtgttcagagccaccactctggggggcctctgcttgttcctgccccaggcccagtgggactgtgtgaaccccaaatacaagcagaagagacgcagttataagaactcaggagtggtcgtcctggctgacctcaaggtgagaggtggctgtgcccgaagcctccccacccacaagaggggcttccgctgcctccctctgattgttggatggaccctcaaccagaggcctggtgggccccagcacgtctggggaggggctgagagacggggaagggcgaggttggggagagaggatgggggagaggagaggagggtggcaccccagagggactgggctgcctgcgggaggcaggcctggatcccagctggcactggcctcagtgtccctggcgggggtggacgct

SEQ ID NO: 29753 - DNA, 1147 bp, Artificial sequence
  DNA replication origin
ccccgtgtcacccacagatacacggccccccgtgtcacccgcgtgtcacccacagatacacggcccccgtgttacccacagatacacggccccccgtgtcacccgcgtgtcacccacagatacacggcccccgtgtcacccgcgtgtcacccacagatacacggccccccgtgttacccacagatacacggcccccgtgtcacccacagatacacggccccccgtgttacccacagatacacggccccccgtgtcacccgcgtgtcacccacagatacacggccccccgtgttacccacagatacacggcccccgtgtcacccacagatacacggcccccgtgtcacccgcgtgtcacccacagatacacggcccccgtgtcacccgcgtgtcacccacagatacacggcccccgtgtcacccgcgtgtcacccacagatacacggcccccgtgtcacccgcgtgttatttgcagatgcgctggttcgtgttttgttgaacgagccccagaatggctttgggagaagccagcaagtgggaaacgtggggggacccagaccaggcttggtccacttaggccctgccggggagggtggtagaggggttgggcggccactaagaaggatgggcggggcccccacaaggccagggtgatcctggtggggtgtcctcccggagatccagggagcctaggggctggcaggttttgaggagacctctcctggccctgtgtagcaggtgggtcagccccaacagcagccccccagccctacccacctacgcgacccctgaccctgagtcctggccactctgggcgtggtttctctacctgtcaggagcgggttcggggagccccggcccagcacagctcctggctcccggcccactgcaggtggccattgacttcaccgcctccaatggagacccgcggaacagctgctccctgcactacatcaacccctaccagccgaacgagtacctgaaggcactggtgtccgtgggcgagatctgccaggactatgacaggtgcgcccaccaccttcccctcaccccctggtctccaggtcagctatgacaggtgcgcctggccgtcttccccctcacccccctggtctccaggtcagctatgacaggtgcacccggccgg

SEQ ID NO: 29754 - DNA, 760 bp, Artificial sequence
  DNA replication origin
ggaggctgaagcaagagaattgcttgaacccgggaggcagaggttgcactgagctgagatcgcaccactgcagtccagcctggcctgtagagcaagactctgttttaaaaaagaaaaaagaaaacaacaaaaaacttcaactggcttcagcagaaaaaatggtgtgtggggatttattggctaatgtaagcctcaggcactgctggatccagggaggtctgcctccctctctgtttcatgactctgcagaacatggtcacccatgggtttggcttcccctagaaactccaagcctacctctctcagtaggtgggggacatgggggccaggtcgggggagcagctgactgggggacatgggggccggggacggggggagcagctgactgggggacatgggggccggggacggggggagcagctgaccgagccctctttagtaggcgggggacatgagggcggggacggggggagcagctgactgggggacatgggggctggggacggggggagcagctgaccgagggacatggggccagtggggtgtgttgcaacgagcagctgactgagccctcttgttcccacccaggtgtcccatgactttgccatcaatttcaaccctgaggacgatgagtgtgaaggtaggagctcgaggcaggcctggggaggggagtgcaggggggccgggctcaccccctgccccccacaggcatccagggcgtggtggaggcctaccagaactgcctgcccagggtccagct

SEQ ID NO: 29755 - DNA, 954 bp, Artificial sequence
  DNA replication origin
acctctctcagtaggtgggggacatgggggccaggtcgggggagcagctgactgggggacatgggggccggggacggggggagcagctgactgggggacatgggggccggggacggggggagcagctgaccgagccctctttagtaggcgggggacatgagggcggggacggggggagcagctgactgggggacatgggggctggggacggggggagcagctgaccgagggacatggggccagtggggtgtgttgcaacgagcagctgactgagccctcttgttcccacccaggtgtcccatgactttgccatcaatttcaaccctgaggacgatgagtgtgaaggtaggagctcgaggcaggcctggggaggggagtgcaggggggccgggctcaccccctgccccccacaggcatccagggcgtggtggaggcctaccagaactgcctgcccagggtccagctctacggccccaccaacgtggcgcccatcatctccaaggtggcacgcgtggcggcggccgaggagagcaccgggaaagcctctgtaggtgcccggggggtgtggtgcatgcttggtgtggggtcggctgtgtgtgcaccagcgcgtggacgtcagggaggcacctggcagagggaacagccagcgcagaggcccccaggcaggacagagctcaggagggcgggggcccagctggttgactacgtctccctcaaaggtgcaggtgtctcgggcacagggctgtccatcgcctcacacggtcacggccatggctgcagcgaggctgcccctctcctcttcctctgggcaccacaaggccgcgcacatgtctactgtttggctgtgtgtgtatcgtcattttgtttacatgtgtctttcctttgcacaaatgatacggtgccgagaactgcactggattctactctgccaccgtgtggccctgtatgtgtctc

SEQ ID NO: 29756 - DNA, 898 bp, Artificial sequence
  DNA replication origin
gctctggaggatgaggcctgggccataatccagttgcagggacggatgatctccatctcgaaggtcccagaggtaactgcgttgtcccatcctccaggcatcccctgcggcgctggccaagtgcgtgctggccgaggtcccgaagcaggtggtggagtactacagccacagaggcctgcccccgagaagcctgggtgtccctgccggagaggccagcccaggctgcacaccgtgaagatgtggagggcgtagggtgggggcagtgaggaatgggtccgtacagcctctgtctgcaacatgcttggggtcccttaagctccctccgacctcccagaagcctccagtccccaccaggccccactcccagtcctcctgggatcctgctggcttgggcccggctctggggcccccaaggccgaagggtgacaaaatacaggcccccatgcctggccctgcctgagccaggtgggtggagggagggagatcatgagggacttggagggagctgggagttcatccacgggagaccctgccccgatgagaaggggcagggactgggggctctgctttgcgtctaacctttgtgggggagggccagcaaggcagtccccccacgcccgagaaagcctgggggacccagacacctgtccccacagtcaaagcctggggacccagacatcctgtccccacagtcagcctcctgtccctgctggtgcccccacacccacctaccctgtgctttttgccgtcgggcctctgcacctgggtccatggggtctgcggggtctgcggggtctgcctggcctgtgggttctgccggtggggcttcaggagtaataaagtgtcaccctatccttgtagttctcttgtgccttcagtcccttccccaaccccccag

SEQ ID NO: 29757 - DNA, 1540 bp, Artificial sequence
  DNA replication origin
cacccacccatccatccacccatccccccacccacccatccgtccacccatccgtccacccatccccccacccatccgtccacccatccatccactcacccatccgtccactcacccatccgtccacccattcccccgcccacccatccatccacccatctgtccacccgtccatccatccacccatccgcccacccatccccccgcccatccccccgcccacccatccgtccacccatccgcccacccgtccgtccacccatccgtccacccatccccccacccacccatctgtccatccatccactctggggcctatttttagctcttgcttcgtcctctgttaagcagggatcatgggtatcgccatggtaacctggccagtctgtgaatttcagaaggatcaatgttggtctctttggggatggacaggcccagagatcacccctccatccacatctgaggcttcaggccctgagccggtcggggggcctcaggggctggccaggcagagggtgcgtgtcagggccctgtgcaggtgtgggggggtctcaggctggacagagggtgagtatccgggccttgtgcagatcggaggtctcaggggctgggcagagggtgcgtgtcagggccctgtgcaggtgtgggggggtctcaggctggacagagggtgagtatccgggccttgtgcagatcggaggtctcaggggctgggcagagggtgcgtgtcagggccctgtgcaggtgtgggggggtctcaggctggacagagggtgagtatccgggccttgtgcagatcggaggtctcaggggctgggcagagggtgcgtgtcagggccctgtgcaggtgtgggggggtctcaggctggacagagggtgagtatccgggccttgtgcagatcggaggtctcaggggctgggcagagggtgcgtgtcagggccctgtgctgatcgggggtctcgggctggacagagggtgtcagggccctgtgcaggtgtgggggggtctcaggctggacagagggtgagtatcagggccctgtgctgatcgggggtctcaggggctgggcagagggtgcgtgtcagggccctgtgctgatcgggggtctcgggctggacagagggtgtcagggccctgtgcaggtgtgggggggtctcaggctggacagagggtgagtatcagggccctgtgctgatcgggggtctcgggggctgggcagaggttgcgtgtcagggccctgtgcaggtcagggggtctcgggctggacagagagtgagtatccgggccctgtgctgattgggggtctcaggggctgggcagagggtgagtatcggggctggggccctgagcgggtcgggggtctcaggggctgggacagagggtgagtgttggtgccctgtgccacctgcctgtggtttttgggccagaaagtgtcagacggtttctgggctgactcaaagtcgagaggtgttggtccattgagatcttagcaggaagcaggtgtgccgaggagtctacctcagaacagggttggggcgg

SEQ ID NO: 29758 - DNA, 2013 bp, Artificial sequence
  DNA replication origin
aggcatgtgtgcgtgcatgtgtgcataggcatgtgtgggtgcatggatgcacgggtgcatatgtgtgcatgggtgtatctgtgttgctctgtgtgtgcataggcatgtatgcatgtgtgcatgtgtgtgcatgcatgtgtgtgcatggatgtatgggtgcatacgtgtgcacaggtgtagatgtgttgccctgtgcatgtggaagaggctggagtgggggtgttggtcctcactgctttactgaaacatctttaggagccccagttgcactgggacttggccacactgccagccctccccatcccaggcagtcagcatccagaccccaggtggagcaagtgacgtgcaaggtcttggtgccccattactccaccaggacagtacattatcatcccactgtgcagagaagcactgggggctggagggaggcactgggggctggaggggggcactgggggctggaggggagccctgggggctggagggaaagccctgggggctggaggggagcactgggggctggaggggaagccctgggggctggaggggagccctggaggctggagaggaagccctgggggctggaggggagccctgggggctggagggaaagccctgggggctggaggggagcactgggggctggaggggaagccctgggggctggaggggaccctggggctggaggggaagccctgggggctggaggggagccctggaggctggaggggagcactgggggctggaggaagcactgggggctggaggggagcactggaggctggaggggaagccctgggctgcagaggagcattgggggctggagggaagcagtgggggttggaggggagcactgagggttggaggggagcactgggggctggcaggaagcactgggggctggaggggagcactgggggctggaggggagcactgggggttggaggggagcattgggggctggaggggagcactgggggttggaggggagcactggaggggctggagggaagcactgggggctggaggggagcactggaggctggaggggaagccctgggggctggaggggagccctgggggctggagggaagcactgggggctggaggggagcactggaggggctggagggaagcactgggggctggagggggagccctgggggctggaggggagcactgggggtgggaggggaagccctgggggctggagggggtcactgggggctggaggggagcactgggggctggaggggagcactgggagttggaggggagcactgggagttggaggggagcactgggcgctggaggggagcactgggggttggaggggagcactgaggcctggagggggagcattgggggttggaggggagcactaggggctggagggggagcattgagagctggaggggagcactgagggctggaggcgaagcactggggactggaggggagcactgggggctggagggaagcactggggtttggaggggagcactgagggctggaggggagcactgggggctgcaggggagcagtgggggctggaggggagcactgggggctggaggggagcattgagggctggaggccagggctggaagggactgttctcctcatcccgtgggtgaaagccagggcctcaggttgggcacacagggccttcctcaggcagccacagctgaaaaagtttccatttcacagccataggtggaaccccacgtccccaccgggaccccccattctgtgcacatacaccctacatgatccccacacccagttaacgtccttcctgcagacacacagctacacatcggtgtccacacaaaagtccagacagacttgtgggccaacagacacacaagagcgggtggggtggggagcagcggctgcgggtggccctgggtgaggacgttgcggctggggagtcgggcctaggcggccaggttggtgggatgcattgccaaggagaccatgaaggctctgcggaggccccaggtgttgact

SEQ ID NO: 29759 - DNA, 1641 bp, Artificial sequence
  DNA replication origin
gcacgttgggatttggccaccagagggcaggagctgcagcagccaggcaggcggtcaacacgggggccccggggtcctggccggctggtggggtgtgaattggagaggagtgggctgtgtggagggagaccaagcaccaaggcccgccctggcctctgagtgtccacccctttcacaggcccatttcacagatactgaggcccaaaggcgcagggctcaggcgtcccctacgtgtcgtgtccccaggcaggagaattacttgaacctgggaggcagaggtttcagtgagctgagatcacaccactgcactccagcctgggtgacagagcaagacttcatctcaaaaaaaaaacacaaaaagtgaatttaaaatgctccctgaactccagctggggtgcgcagcaggaggctgggtccgtggggcttcgggggctgggctgggggttcaggtgggtgggggagtcagtgctgtggggatagggctcagagcccagaaacagacaagcccacacaggtagccagtgtcgacgaaacaggagaggctgggacctgtgccctggaaggacacagccagcgggtcctgggtcacccactccggggctgaccgggcacagtttcacagagcagtatggcccagccagctgtgagaggatcggacagacgggcggaaaggaggggagacagcgggtgtgctcggggctgtgccgggaggggtccttggatggaggagggggtcgccaggaggcatctgcatccccggggtggtgaagacccagcgtgtatggccgacctcgaggacagggcgattgctccaccagaatgttcccagatggcacagatgcttctggttctggcactgggacctgcagcaggattcccgggtggcttaaagaggttccttgaagtttgtgatcaggaattcaaagtagcgcagattgggacggctgggccttctcccctcagcacactccgcgaagggcagtgcaaacgcacgctggcaggaagtggctgggaagcaggcagagagcgaccaggaagcggccaggaagcaggcaggaagtgggcaggaagcaggcagaaagcggccaggaagtggccaggaagcggacaggaagtggccaggaagcaggcaggaagtgggcaggaagcggccgggaagcaggcagagagcggccaggaagcgggtaggaagcgggcaggttttaccgagcggcgtgacggctccagaggggatgatggagtctggcagagaatggggcgggaggctggaggtcctgggcaggccctggagcagaaggggaagggaggggtggggtgatgggactgcagtgaaggtctggccccacccgagcaaggtgagggtagcacaggtcattacatgtcagggaattgcttggccagggttggggacaattctctcttattagaattgccaggaatcaagacagggtggagctagaacaagggagagggagtggcagagagatggggtgcttggggctctcatgtgatgccctgaggacactgcatgaagactcacggctgagctgggtggaggtgggagaggtaggcaggcaccaaggcccagggccctgagaggtgaggggaaaagcgctcctgcctcacgaggccacaggagct

SEQ ID NO: 29760 - DNA, 1148 bp, Artificial sequence
  DNA replication origin
gctacagaacagccacctccttgagggctcgcacagtaccccagggagagccgggctaaagcctcacacatgtcagctggttcttgtttccgaagatacgcatgccctcagtgaggccttgagcatccggccagcccaggggcttctgggactctcggtcccaggccaggcaggagagcttgtgctgggtgatcaccctttgaggccccccaggcagtagtgtagggtatctgccttaggtggcagcaggttgagaaatggagaggagggggcctgggagcttgggcccagcccaacgagcccagagagtctcaagtggcctgggggtcccaggtcgtgtgtcccccccactggcagaccccagccacctccctgactccctcggaggacactgaccctggccccggagttgggacaaactccgtcctcagtttctttatctgtaagtgcgatgggttgatctccctccatccccagccacaatcgaggattggaatgtcctctggcaaagccacacgggctttcgaaatccaaggagggtctgcgtgtggaccgcactgagctggagaccaggctggctttggaattctgaggttgcggcgggaggggggcatactcagtgggttcaagcaggcggggggaggccaggcctatcccggaccccacccaaggcagggtggagacctagggctgctgctgggctagtcacaggggcccttggagtctgacattttcaagcagccaatgatgggcagcagtgggaggaacagtgggggctgcagagaggggaggggacgcagggggctgcagagaggggagtggggggcacagggcgctgcagggagggggtgcagggggctgcagggaggggagcagggggcacagcaggctgcagggagggggtgaagggagtgcagggggctgcagggaggggagcagggggcaaaaggggtgcagggaggggagcagggggctgcagggagctacagggaggggagcagagggagcagggggctgcagggaggggagcggggggagcagggggaccagggggctgcagggaggggagcggggggagcagggggaaagcgggctgcagagaggggagcaggggggcagggagctgcagggaggggagcaggggggca

SEQ ID NO: 29761 - DNA, 1174 bp, Artificial sequence
  DNA replication origin
ccaggccacttgagactctctgggctcgttgggctgggcccaagctcccaggccccctcctctccatttctcaacctgctgccacctaaggcagataccctacactactgcctggggggcctcaaagggtgatcacccagcacaagctctcctgcctggcctgggaccgagagtcccagaagcccctgggctggccggatgctcaaggcctcactgagggcatgcgtatcttcggaaacaagaaccagctgacatgtgtgaggctttagcccggctctccctggggtactgtgcgagccctcaaggaggtggctgttctgtagctggagagctccgtgggtggcaggactgaacttgaacaccagaaacaacccccaagccttgtgacctgggaggcaggaggcgggtctgtctccctgggacttgggtggctgagccgaggtactcgggaccctgtcccgcgcatggtgagtctcggggagcggggagccgggagccaggggttgtggttttggggagcgtgcagccaggttgaggcccagggctgtaatgagggcggaaagcccctctcctctctgactgcctgtgatccaccgtcagcgagggagaacctcagagagtaggcatctacagcatagcatggagcaccatcacaggcagtgaagggcgagagtctcagaggatggaaccgggtggggggcctcagctcgtgccatcacgggcagtgaagggtgaggctctcagaggatggaaccggcgggggcctcagctccaggcaggggtgagagggtggcttctggggtgactgtgtctggaggatggggtagcaagggtggggaggccaggctgaggggccctgacctcatgggagctgggagcctgttgggaagtccctgagaagtgcttcactgggattcactgggaggaagagctcgcgccctggtgcagatgtgggctgtgggggatcagagtggtgggggcaaccgtggggggcctgggcagggtgaggagggatgtggggaagccaccagcctcagggtgggctggacgctgggagggaggcgttgggggcagaagtggggtgccggccttacggctgggcctgcagattgaggggcctgtggactcccccagtgcagacatcagcctggtcaggagccagaagagagagtcc

SEQ ID NO: 29762 - DNA, 1646 bp, Artificial sequence
  DNA replication origin
ccctgcagaccttcatccgctgaagtctttgggggccctgagagaccccacaaagcagcaggggccaggaaagggcaagggcccggcaccgtcgcagaagctgaaactgagccccaacccaagggcacacgagtctcacccccagagaaactgagccccaagccaagcacacacgagtctcacccccagctcccccagccccaactccccaggccaaactcccccagccccggcacccccagccccggcacccccagccccggctcccccagccccggcacccccagccccggcacccccaaccccggctcccccagccccggcacccccagccccggcacccccagccctggctcccccagccccgctcccccagccccggctcccccagccccgctctcccagccccagttcccagtcctggttccctaagcacctggctcaggtgagcactcacccatcaatgacaggggagtccctcatgatcctctctgcctcgtcccgaaagaagtctgcagtgcagacggccacaaggggccacagccaccatccgctccacatggtggggtccccggggacctgtgtgcactgctgccctggtgcctctgtgctggcctggctggcccgtgcagaaggatgagcttcaggctgtgaggagccactctgcctgccaggagaggcaccagaggtgtgggtggaagtgatgacaggtggctgctctcctgtttatagcttcccatgttcaataagtaaccagcacattccccaccagggtgggtaggatggaaggccggacactcaatgactgggcgttgctgtctgggctaggcggaggcatagtaagaagctgggatcccagacccaggggtggagctagagcccagatgaaaggacagcaggctgagagcaggcccagatgagtggtgagtggctgttggctctagctgtgctactgttattactaccacctccctcaggacccgggggcctagatctgcaagcaagacaacagtcattcaaatagtgcattctcataaagcacccctttccacgtaaaaatcatcttacgtgacttgccatgggggataaacattagggcgttccaggaagctgctgcacagccaggtgtgcccctggcgcctgccctgttgctgaggggtccgcacccccggcctgcagccctccagcgtcacagggacccacactccagctacagagcttcaggccaagcagctagacacgtccttagaaccggggcctctctaggactcagcagagcacattcaagtcgcccgagggctcctgggcacacagttcccaggtggtgccctgacggaagaatcttaatcccagggctgggtggtgtctggggttctgggggacagtgggctgagcactggggctaaaccaggcctgctgggaggagcaggagggaaaactggtcagaggcttcgggggggggtggggggagcccggcagggaaggaggatcgccccagctggaggacagtggctccctctcggctcactgcaacctgcacctcctgggcccaagcaaccctcctgcctgagcctcctgagtagctgggaccacaggcgtgcaccaccacgtctggctaatttttgtattttttgtagagatggggt

SEQ ID NO: 29763 - DNA, 1399 bp, Artificial sequence
  DNA replication origin
acaggagagcagccacctgtcatcacttccacccacacctctggtgcctctcctggcaggcagagtggctcctcacagcctgaagctcatccttctgcacgggccagccaggccagcacagaggcaccagggcagcagtgcacacaggtccccggggaccccaccatgtggagcggatggtggctgtggccccttgtggccgtctgcactgcagacttctttcgggacgaggcagagaggatcatgagggactcccctgtcattgatgggtgagtgctcacctgagccaggtgcttagggaaccaggactgggaactggggctgggagagcggggctgggggagccggggctgggggagcggggctgggggagccagggctgggggtgccggggctgggggtgccggggctgggggagccggggttgggggtgccggggctgggggtgccggggctgggggagccggggctgggggtgccggggctgggggtgccggggctgggggagtttggcctggggagttggggctgggggagctgggggtgagactcgtgtgtgcttggcttggggctcagtttctctgggggtgagactcgtgtgcccttgggttggggctcagtttcagcttctgcgacggtgccgggcccttgccctttcctggcccctgctgctttgtggggtctctcagggcccccaaagacttcagcggatgaaggtctgcagggactgggcaggaaggaggcaaggccacactccctggtcccgaagctcagagtgaggtctgagcctgcggacgtggaggccctgcgccccaatctcaccctgtgcctcagcttctcccaaaagcagcaggtgcgggtggcaccctacaggccctctcagccggcatctttttggctctcttcccactccccccggcctgccttctcccggggggaggcccatgccacttgggcccttgcctgtgctgcgctgtgtgcccacccggcccccacccccgacctcgctggggcacctgggtcacctgcttctgtcctgacctcctcagggcggagatccccactgcccgggaatccgaccctcttccccgccccttcctggcccagtgccccgacactgggtcaccatggaggcctcctgcttccaggcaccagactcagatcagggtccacactggctccgcgttggggtgggagggtcactgagagtccgccctgtgtctggcatggtgtctccacctggaaaatgcctctgggctttgttggggaaaaactgtgaaaaaagcagggaaacccgatgtcttgtcgcataagaacttcagggaacagtccaggctgggcagttcacgcctgtaatcccagcactttgggaggccgaggcgggcggatcacctgaggt

SEQ ID NO: 29764 - DNA, 1036 bp, Artificial sequence
  DNA replication origin
gggctgtcagagctggtggctgagtgaggatcccagagggtccgaatccagctgcccaacagggcctggcagagaccaggagcaaagggaatccactgtcgttaggaatgcaattctcaggccaggcagggtggctcatgcctgtaatcccagcactttgggaggccgaggtgggcagatcacaaggtcaggagatcgagatcatcctggctaacatggtgaaaccccgtctctactaaaaatacaaaaattagccgggagtggtggcgggtgcctgtagtcccagctactcaagaggctgaggcaggacaatggcaggaacccaggaggcagagcttgcagtgagccgagatcgcaccactgcactccagcctgggcgacagagcgagactccctccaaaaaaaaaaaaaaaagaagaagagaagagaaaagaaaaatagaaatgcagctctaaggggcccagggcaggctctaggctacgatctcatctgtgtttcaaccaggctgtgaggaggatgggaaggggctgaggcctgacccccgaccctggggaatgcccagggttccccttccccgtcactgggtctggggcctcagtctccttcctgtaatgtgggctgtgcccctgtctcggggggactgccttgtgagggtgtgcgctgggatgaggccacaggggcccctccacttgcagtttccagacccatccctgtgcctcagtttccccatctgtaacatgagggtgtcttggtgccttccttggaggacagctccctctgtgtctcagtttccccatctgtaacatgagggtgttttggtgctctccttgaggacagctccctctgtgtctcagtttccccatctgtaacatgagggtgtcttggtgctttccttggagggcagctgggagaggcagatgagtaactgttaatcatttccagctgcgggctctgctttctgtgacccagctcaaatctatgtgcccgcaatgagcttttccaaggcgaatgcacccatggagctcctcaggggaaa

SEQ ID NO: 29765 - DNA, 1362 bp, Artificial sequence
  DNA replication origin
gtcagggtgcaggggagtgggcacctggtatctggagggtgaggtgtcctgaccggcacctgctgctcaggatgagggctgggtgagaagacgcaggacctggaggacccaggtcaggaccccacctgcactgctggtgacatacaggaaggtctccgggtacatccggcacatgcggtggaccacgtccatctgctccagcgtcctccgcacggcgtctttgttctgggtgtcgcagggcgtgtacacggaccagaactgtgggccgcagggggtgccaggagctgatgcagccaggtctcagcccaccccccgcatgcctgtgggagtctggtttcccacccgctgggaagccctccctcggcctgggcaccgagggaccctggaggaacaccacagggatggtcccactgtagccaggcctgaggtaggagacgggatgaccccacacagggcaagcacaaggcagggcaggcggtacctggcctcccacaaagccggccctcagcttggggatgttggtgtgtgtgccggccaaggtggtcaggttggccctctcgtcctgcagccggttgttgaacatatccagcagctgccaggggaggtcattgtgcctggagtttgccggggagaggccaggcagtcagggcggccactgggacctgggggcttccgagctcctggcctctgggctgctctccccacttcctactcctcacgacagacgcaggactgaagtctaggccgcgggggtgacatatcaccggccacctgaacacacctgtgcaggctgcatttcccaactgtgcccacccccagggcagggaaccccgagccaggagctcagggagctgggtagcccatcccttccagggcctttttctgtggaggaggctggggggcagacacattgtctgagggtgggacacaaggagccaaatgacctcagtggacaggattggagacgtgaggggcaagggcctgggggtgatactgtttctgagagttttcagtttaaagatcaaattgcctcttggggaatatggtgggtggctgggtaattggaacggcctgaccttggggggcctgggacccccatcctcctggggagcagggtgtcgagtacaggctttgggggctacccaggcctctctgctgcctctgtccccagggaagagccctgcacccaaactccaatcagatccttctaaacttccaaaggactgaagttctccaaggttttcccaggagctggtggtggtgagggtaggagctctcgtgaggaaaaatgagaaggaaggggaaaggagaaggaaggggaaaggagaaggaaggggaaaggagaaggaagggaaagggaag

SEQ ID NO: 29766 - DNA, 1998 bp, Artificial sequence
  DNA replication origin
ggccacctccacccagccttctccctgccaagtcagatctggaagtgacctgggcccagtggcttcccacttcctaacggaagctgagggagaactacagagcctgtgggggctgtgagggcagtcccctcacccccagggccctccagggtggggcagcagcagcgtggggggtcctgtcctgccctgtgtgcatctcaagacgaacccttggaggcccatatgggaaggcactgagccccaagctccacctaggaggacctggtgctgggcagctcacgcctggaccacgtctgtccctgtggtcggcctggttctgctgcccacagtgggagggagcctgggggccacgccgatgcagaccctgcctccccatttaccaaaagaggctgggctgggcgcagcagctcacgcctgtaatcccagcactttgggaggctgagtgggcggatcacctgaggtcggggttggaaaccagcctggccaacatggtgaaacctcgtctctactaaaattagctgggtgtggtggcgcacatctgtaatcccagctactcaggaggccgagacaggagaattacttgaacctgggagacggaggttgcagtgagctgaaatcatgccactgcactccagcctgggtgacggagcgagattccatctcaaaaaaatgctggatgaagagagtggttctgccagtgcaggttcctgggcccttagccatgtttacagaatcagaatgagcaggtgcagggggtgtgcgtgcaggggtggggttgctcgtgcagggttgtggggtgtgtgcagggtgtggggtgtgtgtgtgtgcagaggtgggggtgtgtgtgcaaggatgagggtgtgtgcaggggtgggatgtgaatgtgcaggggtgtgcgtgtgcaggggtggggtgtgcacagggttgtgtgtgtgcaggggtggtgtgtaggggtgggggtgtgtgcaggggtgggggtgtgtgcaggggtggggtgtgtgcaggggtgaggtgtgtgcaggggtggggtatgtgagcagggatgggttgtgtgtgcaggggtggggtgtgcaggggtggggtgtgtgcgtgcaggggtgggggtgtgtgtgcaggggtgcggtgtgtgcgtgcaggggtgcggtgtgtgcgtgcaggggtgggggtgtgtgcaggggtggggtgtgtgtgcgtgcagggatggggtgtgtgtgtgcaaggatgagggtgtgtgcaggggtgggatgtgaatgtgcaggggtgggggtgtgtgtgtgcaggaatggggtgtgtgtgtgcaggggtgcggtgggtgtgtgcgtgcaggggtggggggtgtgtgcgtgcaggggtgcggtgtgtgtgtgtgtgcaggggtggggtgtgtgtgtgcaggggtgcggtgtgtgtgtgtgcaggggtggggtatgtgtgtgtgtgcaggggtgcggtgtgtgtgtgtgtgcaggggtggggtgtgtgtgtgtgcaggggtggggtgtgtgtgtgtgtgcaggggtggggtatgtgtgtgtgtgcaggggtggggtgtgtgtgtgcaggggtggggggtgtgcgtgcaggggtggggtgtgtgcgtgcagggatggggtgtgtgtgtgtgcaggggtgcggtgtgtgtgtgtgcaggggtgcggtgtgtgtgtgtgtgtgcaggggtggggtgtgtgtgtgtgtgcaggggtggggtgtgtgcaccggtgcatggctggaggtgactactggagcctagactgtccctaaagacgctcaagcagtgtctctacaaagcccttttcacacctcctgagcccttctggcctggaccgaagactcgatccaggatcacaggagtgccccacgtccaaccaggagccattttcacaaaacaccccacctcctgagccggatgccgatgacacgtaccccaggatgtgaaggggtgttgcttttattgcgggcctactgtgtgtgtgtcctgaactgtccccaggcatc

SEQ ID NO: 29767 - DNA, 1149 bp, Artificial sequence
  DNA replication origin
caagaaggtggctggctgtgtgagggaacgaaaagtgcagtcgtacccttgtgaagctgagtggggccccatgggcctggccccacctgttgtccagagcatgcccctgcccccaggtgatggaggactccatgagctcggccaccaccctgaccacgccgcaggagcaggtggacagcctcatcatgcagatcgccgaggagaatggcctggaggtgctggaccagctcagccagctgcccgagggcgcctctgccgtgggcgagagctctgtgcgcagccaggaggaccagctgtcacggaggtagggtcggtccccgaaacgctgtgtcaccaaccccacgctctggtgctgtgggaagggagagagggttgtgggttagaggctggaggagagcttgggctgaggctccgaccagggagccctgatctcgactcagaggccccagctgcagccgcccccaagcgagccgccctgctgctgccccgtcctgctccggctggcgtgggggcttgagtgtgtgtcaggcatggcgtttacacacgtctgcagtacactttagaatactgcacccttcctaacagatcaggtaagagtgggacagggcatgtctgtttccaaggcctgtcactcatgttatctcaggacactgaggaggaaaagggtcacctgtgctgggagcacgtggtggtcagaggcccccttcccctgccctgacccgagtcctgttgttggtttccaggttggccgccttgaggaactagccgtgccccgccggtgtgcaccgcctctgccccgtgatgtgctggaaggctcctgtcctctccccaccgcgtcttgcctttgtgctgaccccgcggggctgcggccggcagccactctgcgtctctcacctgccaggcctgcgtggccttagggttgttcctgttcttttaggttgggcggtgggtctgtgtcctggtgttgagtttctgcaaatttctgggggtgatttctgtgactctgggcccacagcggggaggccaagaggggccctgtggactttcacccagcactgtgggggccttcagactctggggcagcagacatgctgcttcccatcagccagagggggtcagggctgccctgttgccaaacaactccctgag

SEQ ID NO: 29768 - DNA, 1773 bp, Artificial sequence
  DNA replication origin
ggtcggtggagaaaaggccgccgacgtggggacccagcgcggggtcggtggagaaaaggccgccgacgtggggacccagcgcggggtcggtggagaaaaggccgccgacgtggggacccagcgcggggtcggtggagaaaaggccgccgacgtggggacccagcgcggggtcggtggagaaaaggccgccgacgtggggacccagcgcggggtcggtggagaaaaggccgccgacgtggagacccagcgcggggtcggtggagaaaaggccgccgacgtggagacccagcgcggggtcggtggagaaaaggccgccgacgtggagacccagcgcggggtcggtggagaaaaggccgccgacgtggagacccagcgcggggtcggtggagaaaaggccgccgacgtggagacccagcgcggggtcggtggagaaaaggccgccgacgtggagacccagcgcggggtcggtggagaaaaggccgccgacgtggggacccagcgcggggtcggtggagaaaaggccgccgacgtggggtctccaggactgctgtgccctcctggcccacctgcactgtgtgaaggaaatgcctgcaacagccaaggctctgctgtgacgtccctgacccagcagatgagcctggccatgcaggctctgcctcttgtgggagttgccaagaccgaggcctggccaggtacagtgacagtgagtggttcacgcctataattccagcactttgggaggccgaggtgggaagattgcttgaggccaggagtttgagaccagagcggccaacatagacaccctgtctctacataaaaatgaaaaaaatcagctgggcatggtggtggatgcctgtggtctcagctacttgggaggctgaggcaggaggatcgcttgagcccaggaggttgagaccagagtggccaacatagacaccctgtctctacttaaaaatgaaaagatcagccgggcatggtggtggatgcctgtggtctcagctacttgcgaggctgaggcaggaggattgcttgagcccaggaggttgaggctgcagtgagctgtgactgcaccactgcactccagcctgggtgacagagcaagacagtctctaaaaaatatatatttaaaaaaaaaaaagcccaagtcttatcaagaggtccttcctggggcatcagtgcaagctcagggtgcagcctcacctgtgtccctgccagcatttcccaccccacgctgatccagcttaactcaacctccccaccccacgctgatccagccctcaacctccccaccccacgctgatccagcttccctcaacctccccaccccgcgctgatccaccttccgtcaactctgagctgccccagatccagaccgcagagcccattcctgcttcagccagcgaacgccacccatccagcaccagggcccagcactcacccccttcatagtcacagctgtctgcaccttggaggccactgcgtctacgcgggacgccatccgaagccagttcacaccttcgttcttcttgcggatggcgttctcggcatacacacgggcacactctacatttttctgcagaagggcctgaaacccgcgggggaaagcagctggaagagcttggtggtgtgtgtgccccctgctaggagcccagtttttgttttgttttgttttgttttgtttgagacggagtcttgctctgttgcccaggctggagtgcagtggcacgatctcgactcaacgcaagctccgccccccaggttcatgccattctc

SEQ ID NO: 29769 - DNA, 1639 bp, Artificial sequence
  DNA replication origin
cctcaggtgatcaaccaacctcggcctcccaaagtgttggggttacaggcgtgagccaccacatccggcctcccaaagtgctggaattacagccgtgagccaccgcgcccggcctcccagagtgctggggttacaggcctgagccaccacacccggcctggccagcatattttttgtggcgggaggtagatgttatctttcatcttctctcagggcagaaaatctctacacatttccttcatgatgatgacacggtggtactatagcttttcacacttctaactaaaagaattttttttgagacggagtctcgctctgtcgcccaggctggagtgaagtggcgcgatctcggctcactgcaagctccgcctcccgggttcacgccattctcctgcctcagcctcccgagtagctgggactacaggcacccgccaccacgcctggctaatatttttgtatttctagtagagatggggtttcactgtgttagccaggatggtctcgatctcctgaccttgcgatccgccggcctcggcctcccaaagtgctgggattacaggcgtgagccaccgcgcccagcccttcaaaaagtatttttaaaagcctgcccatcacaccagcccaacgatgtttcagcaaacataggacttcattttgccagattcttcctgttctttggtatccctgagcacacagccggctagccccagatgtagaaggtaagaattagggcgacccattgagcacagaaacgcttgtgctggctcctgctcaaacctctgcttccccacatggagaatggacgcaaagagctgctgtgaccagggcctggcactcagggagcgctttctgtctgagtccttctgatttgcagtgatgctgtttggggcagggggtgcaactgtcactttttctggtgccctctgacccgacattccaagtcccgaaaggccgaacaggcatcgcacagtcccccctaccgagctggcgggaaagggcgcctgacgctgaggagtgccaggggcgggggaaagggtcctgggtcggtggtcgggggtccaggccctgggcaaggggtcctgggtcgggagtctaggtcccgggtccatggttgggggtcagaggtcgaggccccggggaaggcataccgggttgagatttggggatggaggccccggggaaggggtcccgaatcgggggtcggggatcgaggcctggggggaggggtcccgggtcgagggtcgaggcccggggtaaaggatctcgggttgggggtcgggggcctgggaagggtcccggtcggtggtcgggggtcgaggcccgggagaaggggtcccgggtcggtggtagaggccctggggaaggggttccgggtcggggatcgagggtcgaggcccgggaaaaggggtcccgggttggtggtctaggccctggggaaggggttccgggtcgggtatcgggggacgaggctcgggaaaaggggtcccaggtcggtggtcgaggccctggggatggggtccgggtcggggatcgggggacgacgaccgggaaaaggggtcccaggtcggtggtcgaggccctggggatggggtcccgggggatcgacggtcgaggcccgagctctcctgagtcctgcccg

SEQ ID NO: 29770 - DNA, 1774 bp, Artificial sequence
  DNA replication origin
gaagggacgccaactccgggcggtgtcaggtcccggcggcgatcgaaccgaccaagctgcacccggcggggacttccggggtcgccgccccacttccggtcgcacgggatgctctcgcgagaggatggtggccggtcccgccagaggggcggggcgcggctgcgcggcgcgcggtcgccatggtgacgcacgccgctggcgcgaggaccttttgtgagtcgctcccggctccgcggccgcggaggtgtggggacccgggcttgcgtcggagggggcggtgggctcacccatgggcctttccaaaagcaaagagaaacccaggaaaggtaaaggaggcgcaggcgctgggctccccgcgtctccgcccctgggcgcgggcccagggcggggctgggctgggcggggcggtgtgagcgcaggcgccaggctcggcccggtgcgaaccgttcctgccgccgagtccgccacggacggcgcgtttcccgcctgaggcggttacggaaacgcggagactcgagacttgaagccagcttattctggacccacgcaggcgactgaagacgatgggacccactgccctgcattcggtaagtcccgggtctaacggatgatccatatatttcaggtgaggagcaaaagaagggatccacctattcagttccaaaatctaaggagaagttgatggagaagcattcccaggaagccaggcaggcagacagggagtcggagaagcctgtggacagcctccacccgggggccgggacagccaagcacccgccgccggcagcttcgctggaaggtaggagacggcgggagggagcgaagcgaggtcagtggcttggaggatctggggctggggtgaggagcctactgtaagaccctaccggatggacactagtagcaggcacgcgccgtaaagatgaaactggtttgttttgggaactttatgtaggaggtaaatatccagaaatcttagttgaaaacataagtttaatgaaaatgtaggtcagttcccgagtgataagtgcgtaccaggtggtcgaggggctggggcagtgtgcgtgtgtctcacctgaggttctcctcgagggctgggtatcttggtgccactgagaatccctgagcctccgcacactggaacagagcattgggaggccgtcccaggctggactgtagctctccgagggctgtggggataagtacattgcggagggtgaccgaggagtagaacctgggtgcgacaaaggtgtcttttataacagcctagtgtggccagacctttgggtgtgtgtggggaagatgaggccccaaaagtaggaagaagctagaatacaaagttttccatcagttttaccacgtggagctggaagcgttaaatattttaaacaacggaggtgctgcctggggcggtagttcacacctgtcctcccagttatttggccgaggcaggaggatcttttgagcccaggagttcaagaccagcttgggcaacatagtgagaccctgtctctacaaaaaataaatatttaaaaataaaaaacaagggcggcatgatgaggtctgtgcctaccaacaggggaagccagttcgcaggggaggtggcccggtcagagacccattgctgtggcccagtgggagccagcaaggccttgcagtaggaattgcagaagggtcaggcagggagaacccgcagagcctgccgtccgaggagattgggggcctgtgccaggaggaggtgttttaagtttcatcacaagaatgaaccactcggctg

SEQ ID NO: 29771 - DNA, 1064 bp, Artificial sequence
  DNA replication origin
accaagagacgctcccgcgggtccgccctaggcgctgggctccagggatcggctccgactgctgcagttcgggccttattttagggtgaagcccgggcagccgacccggctgcgccgtagtgggaggccacggcgattacccaggtgaaggtcttccaggtgagacgggttcccccaggtaagaaggtcctccaggtgggagtccttcatgtggggaggtcctccaggtggggggggagggtcctctcggtggggggtcctccaggtaagaggatcctctaggtggggggggggggttccccaggtgaagggccctccaggtaagaggatcctctaggtggggggggggttccccaggtgaggggacctccaggtaagaggatcctctaggtgggggagtcccccaggtgaagggccctccaggtaagagggtcctccaggtgagagggtcctccagcggagggggtcccccaggtaagagggtcctccagttgggagtccttcaggtggggtggtcctccaggtgagagagtcttccaggtgagagggtcctccaggtgagaggtgaaggtgaaggtcctccaggtgagggtcaggtcacttggtccagggatgtggcttcagcaagcatttgggtgcctcctctgtgttcaggacatggggactccaggagactgaaggaagcaagtggcaatgtccatgctgtcaagttctgtcacagaaataagcaggagtgagtgaaagacaggagagaagctctgtgaggggtggcattcaagcttagcttctgggcaggaagaggcagctatgtcagcattccctaacaaggtttggcaaagtagatacctcccctcactcatggaagacctgacttcccaggctggtagaagcttctctcacaggcacctgcctctccaatctctttcacagcccagccctggaaggtggaaaaagaaaagttgacatggaatgtttaggaagcaccattggtccaggtccaggatcggggcagccagcatgtcctctaatctggcttcactgttgaaatccagtcgagcaagcag

SEQ ID NO: 29772 - DNA, 1255 bp, Artificial sequence
  DNA replication origin
gcactgcccggctgggtctggggagcctcgtgtcgcgctgccgcgccgaggcttccggcacgggcgggaacgacagtcccagagttccccgcggcgggggcggaagccggggcggggcgggctcaggacccccgacagccggtccctggagatctgaggggccggggcgggctcagggatgcctcgcgcccgcggagagacgggcccgggacttgggaagagcaagctccgggatccagctcgggcgctgctgggttcagcgcccgagctgggctttgcaggctgagccgcgagccacttgtttgtggggagaatttacacccgcgacgagttcgagcttgaaggctcccgctgggcttgggctgcatggagcggggtccagcgctgcctggcggcttcacgcgaaccctgggcgcgtcccttgcggaggtgccggtgcctccctctgcagagaccaggagagagcctctgggcgttgggcggtgttgcccaggtgcacggctggtgggggtggagagccctgaactttggccgctggtttgtgtttttaactgctggctggtgctctgagaggccaagccacgtgttcagtaagaatcattaacagatcgtggctggatgacaacaggagccacactttactcatccagacgtgcagcaggcgctcaccgcgttgagagccgtgtgctggactctggggtgaagtagtgagttggccttttcttttttgttgtttttttgagacagggtctagcgctctcgcccaggctggaatgcagtggcgtgatcacggctcagtgcatcgtcagcctcctgggctcaagtgatcttcctgcctcggcctcccaagtgctggaattacaggcgtgagccaccgcccccagcctggcctggcatttctttgagttcaggaagtgtgacaaggatttggacacccagaaataagcgtgtcgagaagagcacaagcagaggatgtgagaaggggaattaaggcgggaaagggagtttgagactaggccatcagtgagtgacaggccagatgcttctgactcggtccccaggtgtcaggaaggaatcagactgaggacaaatgcggccagtggctcacacctgtaatctcagcaatctgggaggctgaggtgggaggattgcttgagcccaggtttgatactgagggttaagagaagggaagccgggaaatgggggctgtgaggtttcaaaccttgctacgtgtgcttttttttttttttttttt

SEQ ID NO: 29773 - DNA, 2139 bp, Artificial sequence
  DNA replication origin
ttgcccaggctggtctcacacacttgggctcaagtgatccacccaccttggcctcccaaagtgctgggattacaggtgggagccaccacacccaggcatgcactccgatttttaaaaggtccaaacatcaacagcatgtaagagttaatgaaaaaaaaaataataaagatactacgccgggcacagtggctcacgcctgtgatcccagcactttgggaggccgaggcaggcggatcacgaggtcaggagatcgagaccatccttgttaacacagtgaaaccccatctctactaaaaatacaaaaaaattagccgggcgtggtggcgggcgcctgtagtcccagctacttgggaggccgaggcaggagaatggcgtgaacccgggaggcggagcttgcagtgagccgggattgctccactgcactccagcctgggcgacagagtgagactctgtctcaaaaaaaaaaaaaaaagatactaaaaagcccaaagctgaggaaacgtgcaggaagtctacgggcattggtgccgtgggggagctctcagcccctgtggccctctgggagccacctgccactgtttttccatcacagggacctgaaggtttccaacttgctcatgaccgacaagggttgtgtgaagacaggtgggtgcaacttgggccaggccctgtccctagatggcacttggtgacacacactcccctctctgctgcagcggatttcggcctggcccgggcctatggtgtcccagtaaagccaatgacccccaaggtggtcactctctggtaagtccttctgaagcatggtggcccctggggaccaggcctgtctggtggaggtctccttggggatgtcaggccgaagctgcaactggccttgggaatgttaagctacagggtctgtgcacactcagaaacgttgggtctaggacagcctccaggacacagcagggctgtgccacaaaatggtgagagacgggctcagtggcgtcaagggcctgcctagatcagacacacctcgccttgagagctggaaacaccgtggccgtgaaaccatctctggagggaaggctgcttcacggactgaaggacaggcagcttgcatgctttccctggttcttcctcctggatacttttaaccaaacagggtcatgcttagccagggctgaatatcagagttggtcagaatcaggtcaggaccccagtgtcgtgtactccccatctgagaacgggttggtagtggctggtgtggctgtgtgccgagggtccgtggtccctgcgactctcaggacaccgctgcacgtgacagctctcgcccccggcaaccattgctgtgtgtgccacctggatctgcagggcctggggcagagggtggtccgagttgggacaggtttccaggccaccacaggctctcggggaggctgtgtcctgtggaggcctgggctgggggagaggagccggctgtattgaggtgggtgcttctgtgtgtaggtaccgagcccctgaactgctgttgggaaccaccacgcagaccaccagcatcgacatgtggtgaggagatacggttaccgctcctggggcctcaggaagggctgggacaggagccgggtcacctggttcctgagctcagcctcaggggaggggcaggagtgcagtggggtctttgccagcctcccactcccagggaggtgggcctgagcctggaaacccaggaggaggtgtgagaacttagcttgctgttctcaggctgggagcacagaggtctggaggaggcacgcctgcccctgcacttgtcaccccgggaggcctgcggggcccaggaggggagccagtggtccctgcctgtccttcacagtgtccctgacccagcgtgcctcacactggcagggtcagcaaaggtctggctgcagtcaggtcctctgttcctcgcgctggcggggtcagcagacgtctggccgcagtgaggtccactgttctctgcagggctgtgggctgcatactggccgagctgctggcgcacaggcctcttctccccggcacttccgagatccaccagatcgacttgatcgtgcagctgctgggcacgcccagtgagaacatctggccggtgggcgtcctgggcagacccgcagcccccgc

SEQ ID NO: 29774 - DNA, 2892 bp, Artificial sequence
  DNA replication origin
gggagcccccagctgaggagctgccgcaggccagcagcccaccatatggggccttggaggaggggctggaacctgaaccttccgccttctccttcctctctctgcgccgtgagctgagtaggcctggggacctggccacccctgaaagctctgcagcggccagcccgaggcgtattcgggcagagggggtaccagcctcagcctataggtctgtctcggagcccccaggctaccaggcacacagctgcctgtcccctggcgccctgcccaccctctgctgcgacacctgtcgccagctgcatgctgcccactgtgcagccctgcccgcctgccgtccaggccactcgctgcgtgtgctgcttggcgacgcccagcggcgcttgtggctacagcgtgcacagatggacactctgctctacaacagccccggggcccggccctaggccagctgggccccaggtcaagggctcttgggagacagctcccgtggtgcttctctttgctggggaggggtctgggcctctggttgccttgtccctgggggagtcctgggcacagcagggggttggagagtccaggccaacccttgctggaggtgggactctctgtatatggaaggctccaagggcagcaggcctaagccggccagcaggagcctttccacatttccccaccctcggaacccagacgcatgcccacatgtgctgggtagaggggtccagcctgttccagccagtgcctgaacctgtccctgagaaggaccctgtgccccaaggcccgtggctcctggcctgctccctgcagtacggagtacggggctcaggacttgggggtcctccacgtgtcccagggattctccacacgagtgtcctcaagggcctgttggtgacaccgagctccccccaccccaagctctgctggagccaatctgcggggctctgccgggtgcacggctgacctggcttcggggacgccggccctccccttgggtgtcacagcagctgggcccacagacaggaaatgacctgacctcaaaccagatgtggaggtgcacgagaggcgcaggaacgggcagtggctgacagctgggaaggccctgagcgtcactgctgctgggcggaagggcctgtggacagcccgcccaggcggcggggtcttggtgggtccagtggtaatggtgcccctcccctccattccctgtgggtgcagcccacaggctggcgaggaggtgcctctgccctaccctcgggtctggcgagggagagggcagggtgcatccactgtgacagcccctctgggcccacaactccctgaccctggaagctgagcctgctttcctgaccctccgccccaccccctcctccccagaacactcagagggacggtcaacatcagagcacattaaacgctggtgaaaccatgtctgttaaaaaagcttttatccaacaagagcctatagcttcgctcagcatcagagccacggcctcctgttgggtcctccatgtggggagcagggatgcagctcagcctccagcccagggctctcctggtagtctcggggtatcctcaattgtggctcccaccccataccttgtccctcttgtcctcatctggagtcctgccaggcccacctggggtccccacagccaacccatgcacgggacagccccgggcgactgagaggggatacgaaggtcttctgggccctctcatcccaggccagcgtccaccacaactcaaagacagcggggggactgcacccaccactcctcccaagaagcagtggttgcacatttccaacatagcgaggaggaccacatgagacccctgcagccacggatggagccgccagacctgcccttccagggtgcacgggctgggagccccccggtgtcacccggcctttttctgggggcagcagtgggttcagggcagacagtgggaggaagtcagtggaggatgttcccagccaaggggatgagctggatcccgggcgcctggtcagcctggctcgcggcacccttcacagacaccactgatcggaagacctggtgtgggaatacaggcgtgtgccaggcccaccgtcagggtttacagcgcttgctctggccctcggaggtggctggggcggcccgcttgttgcggtggtggggaaaggtcggcatgagctccggctcacaggctgcagggagaagggttcagtgctgggcggggcagggccccagataggaggagcaggcccaggtctgagtccagctctgcctctggacctggccctgggctgtctgtgcctccacatgcccctgtcctcttaccccagaaagggtgtgccgtcagtgagggcagcaggccacttctccaccacccaccccgggcaaaacgggctcccagccataccccacagagcgagtcaggaaccctgcacactcacgtaggggcttctccttgaaataggagctctccaggcagtccccggccgtcgccctggaggaggcagcctgcgttagtgcgacttgtgagtgcggcttcctcacctcccacccagctgagcagcctgtgattcaaatgctcaaaggaagccaggtggccactccgagcggctgtgcctggggaggggcctctccaccgcagtgaggctgggctctgggaaacggtctggacagtgtgggtggtgagggtccctgccccccgtgcagagatcagcaccttttcttagggtcgtacatgaacaggaagtgcagcaggcgcagcccggcctccgacagccatgggaacttgtgcttcaggttgttgtagggctgcttccggaggctgtactggccgaccagtggcagcttggaaaagccctatgggaggcaggagctgaggcgcagagggcgtgggcacgggcgg

SEQ ID NO: 29775 - DNA, 1264 bp, Artificial sequence
  DNA replication origin
aggggtcgtgggcgtgtgggggcacccactcctagggctgagaacatggggtgggcgagggcaggcttgggtgctgcctacggggtcctgccctgagagcttgcgtcagtgtcttccctaagaggcctcgcggccccagttgccatggaaatcttaggacgggggcacagaagggacttgagttcccatggtcatcctaattcctccaggttatgggccaatcccatttgcagaggaggccgccgaggctgggaggactgcagatgggtgcatccctgtgaagtctcagggctgggctcagacctagtgaactccacggcctggggcgggaggctgtgcccagggctggcctggcctctccaggtgagctcctggcggcaggagggggcagggccgccgggagctctgagctaattcggaagagtaggaagccgatgacgtcactgggcacgtgggcgagctacgcctccgccggttgccatggcagcggcagtctctccgcggctccccggggacacctgctggtcggaggcgccaggactttcattcatgagagaggacggacaggcccgcccttgaggcctcccagggggcggggcgggggaataaccggcttcagtgccggacagccctggtttggacttagttctgctgcttcctggccgcgaggacttggccaaattagctaatctctgtcagcccctttcctcctgagacagcgacacgggaacagtccagttcatggggccagaggaatgaatcaaagccccgagctcagtgctgcaggcactgggcgctccacacgtgggccgtgtccaggcattagatgctaggagtcccggagttagggaatttgagagtcaggagacgctcgcagtgattgtcctgagctcctttagttcttcacctaagtgtaggctagaaagcactcagccaggccgggcgcggtggctcacgcctgtaatcccagctctttgggaggccgaggtgggcagatcacgaggtcaggagattgacaccagcctaaccaacatggtgaaaccccgtctctattaaaaaatacaaaaatgagctgggtgtggtggcacgcgcctgtaatcccagctactcaggaggctgagggaggagaatcacttgaacctgggaggtggaggttgtagtgagcagagatcgagccactgcactccatcctggtgacagagtgagactccgtctcaaaaaaaaaaaaaaaagagcactcacccttctaccgtcccacggctgt

SEQ ID NO: 29776 - DNA, 882 bp, Artificial sequence
  DNA replication origin
gcggggtctccaggctcgaggggtcctggggacgctgggtgagggttcggggagagcgcggcgggctgggcgcggccttaggtccctgacccccccgacccccgtccgccgcaggatgggcagcagctcgctgtccgaggactaccgccagtgcctggagcgcgagctgcgacggggccgcgcgggcgtgtgcggggacccctcgctgcgcgcggtgctctggcagatcctggtggaggacttcgacctgcacggggcgctgcaggacgacgcgctggctctgctcaccgacgggctgtggggccgcgccgacctggcgcccgcgctacgcggcctggctcgcgccttcgagcttctggagctcgccgcggtgcacctgtacctgctgccctggaggaaggagttcaccaccatcaaggtaggcgccaggccaggaggagcgcgcccctcgtcctggcctgcgggtcgcggggccgccgaccatgggggaccacgcctttcgagagagaggggcttcaagtgtcctcagtgcctggtgggctcctcaaggctccgagcgctgaggggtcgtgggcgtgtgggggcacccactcctagggctgagaacatggggtgggcgagggcaggcttgggtgctgcctacggggtcctgccctgagagcttgcgtcagtgtcttccctaagaggcctcgcggccccagttgccatggaaatcttaggacgggggcacagaagggacttgagttcccatggtcatcctaattcctccaggttatgggccaatcccatttgcagaggaggccgccgaggctgggaggactgcagatgggtgcatccctgtgaagtctcagggctgggctcagacctagtgaactccacggc

SEQ ID NO: 29777 - DNA, 1826 bp, Artificial sequence
  DNA replication origin
ttctctagagacgcgcttccgcccgctgagccctctcccgaccagagccccttcgcccggcagatggagctgcggatcccgcgggtgacggcgctacctgtctgtccccagcggtctccggccgccgcggatcagttcgggcctccccgcgcgccgcgcgcttccgccgggagtcggctccgcccggggtccgcggccgtgacgctgggggcggggcggggcttggcgcaggccccgcctccgaataatttaggaggggcggggcctggtgaaaggggaggaggaggtgtcagcccggccgagcccctgcgcgaggcaccccgagagcctcctgtcaccgcgtcgcccgtctcctcgcgggaccggtatcgttcacgacgccgctgggccgagggctgcgggctcatggcaggcgctcagggaacgttgtgcctgggccgctcctccccacgagacagggacccagccccaggcgacccggccgcggggaagcaggtgcgcgggctcgtcccctggggggtggggccaccggcattacctggcggggattggctggatcctgggaagagcctttcctgcggggcggggccacctgcattacctggcggggattggccggatccgggggcgggcctcccctgtggggcggggccatccccttgagggaggggcccgcggcacggaaggtgggcggaaggacaagcctttcagcctcgtctgaaacagcagcctcaggtggatgcggggacctcagattctgtttatgctggctccgcttcccggcctcctgcacttgccatctgcagcccttgagagcatcgtctgggcgggtctctgaggcagggcgaagccgcccccctctctaggctaaaagctgacctgggctgcggatccacccaggctaaatctgggccacgacttcccggggacgttttcttcgctcgggttcctctgttctgtgctacagccactttctcgcattgcccagaagtagaggaggatgagggagacccttggaggtcccagccgaaacccacccctaccccacacccccgctttgggcaggctttgctacttcacgtctgtgtccctcatctctccaggccaccaaaaccaaggcccaagtttgttgaaactttccctgggcctgggcggcgaggtcccccctttttcttagattttttacctggaagttccctgctggcatcttagaaatagtgatcatgaccgggtgcggtggctcacgcctgtaatcccagcactttgagaggccgaggcgggcggatcacctgaagtcaggagttcaagaccagcctggccaacatggtgaaaccccgtctctattaaaaatacgaaagttagccgggcgtggtggcacatgtctgtaagcccagctacttgggaggctgaggcaggagaattacttgaacctgggaggcagaggttgcggttgcagtgagctaagatcgtgccactgcactccagcctgggtgacagagcgagaatgtctggaaaaaaaaatcgtgatgcagtcggtggatctccctgagttatctaggtggccacctctggacagggagctcttttacttactgtttactgaactcactcttggtgcccagtgccaccatgggtccacaccagtcctcaggacagctaacttcgtaagtctcatctttattcttcttctgatgcggaggagggtggaggtaactgttctgcctttgtcctcactgaatttggcaacaccagtccatccatccagcagtgggcctagctctcctcccataggcctgggtgggtttttgcacctgcctcaacccatg

SEQ ID NO: 29778 - DNA, 1461 bp, Artificial sequence
  DNA replication origin
gactgagctccagccacagccctgcttctgtccccagggcaaggtccctggggcagcttagcctggcctctctctgccccaggagcgtgcaccgagcccgggaggctgccctgagcaggagcatggagctctacaggaatgcaccccccaccgccattggcatccccaccaagctcctcccccagaaccctgaggccaagggggccactggctacccctactgcgcggcggcccaggagctcggactgctggtcctggagagctgcccccagaagaagctggagtgcataggtcagcaggttcgagagtcagggggagggacaggctcccatcccagtaggtgacctggagcctgtgtcttcaccactgagcttctcttgtcacgtgccggtggggaggttgggggaccagaacaaaagtggtgtctgagcaacatcgccagggtcaccgtggctcttcccagccgtgcacatcaggaggtgggtgggtgggcggggtataaggggtggctcaggctgctggacggggttaactgcccctgaaaccctgtctggggcgcagtgcggaccctgcggatcatctgtgtctgtgcggaagactactgccccaccccagaggccacaccccaggccgggcccccgcccatcgctgcagctgccatgtgagtcccaggagggcgaggtgtggccagggaggaagggccctagaaaggcaatggtcacgggagggactatcttcctgccccttagccttgtgccagctggctgcactgtagaagcaggagggccgtgtgggcccagccctggctccgcagtacgggagctccctttagggacagcctcaccatgcccagctgccttccggtgcctctgcgcagaagggcacagagatggcggccagcacggccaggatggctccacagctgctgggtttgcggagtgagaggctcctggccccaacccaaggccgctatgccctcccgacagtggtgccgatgacctgctgcccatcctgtccttcgtggtgctgaggagcggcctccctcagctggtgtcggagtgcgcggccctggaggagttcatccacgaggggtagaccctggcgggtcagggtgggggtctctgtgcgaagagcagggacctcatccctcaacctaaacggtggttgtcagtagcagctggggagggtagcgtgtggctccgtcacagccatgccttcgggcagcccctgtgggtccacctgtgcagagtgcctgctgccacatgtcccgtggcccttcgcttagctcagcctctcccagacagcaggagctgggggctgtcccctgagcagcatctgcctggggaggggataaggatccagtgccatccctggctctaccgtccaaggacgagcacatagtgggtgggaaaggcctcctctagcccagccgccctgacagccccacctgcccaccctcag

SEQ ID NO: 29779 - DNA, 1874 bp, Artificial sequence
  DNA replication origin
ggtggggcagtagtcttccgcacagacacagatgatccgcagggtccgcactgcgccccagacagggtttcaggggcagttaaccccgtccagcagcctgagccaccccttataccccgcccacccacccacctcctgatgtgcacggctgggaagagccacggtgaccctggcgatgttgctcagacaccacttttgttctggtcccccaacctccccaccggcacgtgacaagagaagctcagtggtgaagacacaggctccaggtcacctactgggatgggagcctgtccctccccctgactctcgaacctgctgacctatgcactccagcttcttctgggggcagctctccaggaccagcagtccgagctcctgggccgccgcgcagtaggggtagccagtggcccccttggcctcagggttctgggggaggagcttggtggggatgccaatggcggtggggggtgcattcctgtagagctccatgctcctgctcagggcagcctcccgggctcggtgcacgctcctggggcagagagaggccaggctaagctgccccagggaccttgccctggggacagaagcagggctgtggctggagctcagtcctggagaaaactggctatgtatctcaagcaaaaagccccagcgttgccaagaccccaggcacgggagagtggcaataatcctacctgcaaactggaagcccctgaggatggcctcagggtaaagcacaggctagggggagcaaacacgagtcttggggatggaggggagcagacagtgccagggagcagggcaggcctcctgggggactgggctggaagacactaggccacgcaggtggttgtacagctgggtccatacctgtacagggccagcagcagaggccacagcggggagaaaaagggttcctcaatgcaggccaggcagcggtccttggaggcagctgtgtttaggccttcgaaggccagaagggtcagcgagagcagcctgtctgctaggaacagagccggggacgtccacagaggctcctcccctgctgggtcaagtggctctaagccacggggcctttctccgcccaagaaacctctttccaccgccttcaagcctcctgcacccacccctgaccctcctcggcccagggcagggagtccgggactggaaacggtcacctacagctgctgccctgttgggccagcagcctgagaagaaaccggagaatgatccttttctcaaaaggggctttacccaaaactgcaggaaccagggaagactttagatccaaccccctgtgggtggggaccctgaccaagttccttagtgtgtgggcagcacagtgagaatgacgcctggactgttgggcctccctcagtggttcttagaaaactctgggctgggcgcggtggctcatgcttgtaatcccagcactttgggaggccggggtgggcagatcaactgaggtcaggagtttgagaacagcttgaccaacatggtgaaactccgtttctaccacactgtttccaaaatgagaagggctgaggcgtgagctgggtggatgtaagtctgatcagagtctctgatcaacagacccttccccaaacagaagcttgaaacggaccaataagcaggggtgaagagctgcggcggctctcccagggagggcctggcctcacctacggcattgtggatctcctccaccgcggtcttcagctgctgcagctggggctccggctgtaccccacggccccggccctgccgctcagacgtccccaggaactgctccaggtcctcgaacgagctgtccttgtctggcaatccagatgcggtgtcccccaggggtgagggagaccccacggggccgggttgga

SEQ ID NO: 29780 - DNA, 1312 bp, Artificial sequence
  DNA replication origin
acagcttgaccaacatggtgaaactccgtttctaccacactgtttccaaaatgagaagggctgaggcgtgagctgggtggatgtaagtctgatcagagtctctgatcaacagacccttccccaaacagaagcttgaaacggaccaataagcaggggtgaagagctgcggcggctctcccagggagggcctggcctcacctacggcattgtggatctcctccaccgcggtcttcagctgctgcagctggggctccggctgtaccccacggccccggccctgccgctcagacgtccccaggaactgctccaggtcctcgaacgagctgtccttgtctggcaatccagatgcggtgtcccccaggggtgagggagaccccacggggccgggttggagtgggggcgtggggggactgtcctggggccgcggggctgcgctgggctcgggcggggacagcatgcaatggaggctctgcgagggccgcagccgtcggcttccggggttgggggtcggggggcagcagcctggggctggcgcggctgctctgctcacggcgggatacagggcgctgtacacggagcactgcagccgcctcaggagctgcgcgatcgggtggtcggggaggctgcgggagaagaggacgtgagaacgcggccagcctcggcctctccgtggcatccacaggtgccgcgctatgcccggtttcagagaagcgacttgcattacctcctgacagtgaatgttggaaagtctgccccccgcccccgctggggaggttggagaagccgaggaaacgccctcagcgcaaagggagctgcagtgtccacgtggccgggcacaggctccctgtgtcagtccagcccctctccggcacctggcaccaggcagaggtgcccaaggccggtgcgcaggggctctgtggggcctgaaggcccagctacctgagcaggtgtgagaccaggctggtcacgagtgacaggtcccccggattcctcttgagcttggccttccagtgcttcggccagtcctacgggacagggggccttgaaggaaagcacggtgggtccgccacgaccggacgcgcctcatctcccaccagtgccgacccctagagactgtgggagcccgtcctggggtgcaggagacccagcgccagcaggccccgcgacccgcccccgcccccacccacacccgagggaaaccttaggcgaaccctgggcctgcaccctcgctgggaccctccctcctcgcagggaccctccctcctcgctgggaccctcccacgcgacccctgacctcgcctcctcgctctgc

SEQ ID NO: 29781 - DNA, 1854 bp, Artificial sequence
  DNA replication origin
gtggcccaccgtgtctggcaaggtggggacgggtaagggcagtttccggggggagtcgggggctaaatcggggcgggatgagaaaatgggagtctatgagaagttttctgtgaagggcagcagggaggtgggtcaggcgctggggcggtgggtccaggggcgagtcacagagaggcagctcccacggcgcgcagaagggctgtgtgagcaggtccatggtcgcgcagaggtgctccatgccaagctacgggaaggcaggactttggggacacagccggtgggagatgggtgaggcgatcccctcagcacgtccttgtctctgtaaaacggccacttcccagaggcctgcagttgcaagtgaagctgagtgagcactaaaggcctgtttagggtcgaggctgtgacgggcctcgatgaggggcccacagccttagcagactcaggaggcaaaaccagggcagatgattagaaatgcgtgggtggggggacttgcctggggtccatggtgggggcaggggccttgcctggggtccatgaggaatagtcggcttgcccggggtcagtggggggtggaaggggcagtgggcttacccggggtgaggggatgggggggcagtgggcttgcctagggtcagtcagttgggggacgggaggggcagtgggcttacccggggtgaggggatgggggggcagtgggcttgcccagggtcagtgaggggatgggggggcagtgggcttgcccggggtcagtgggggtgctgaggggggcagtgggcttgcctgccttttccgttgcctcattttatctcagcagtaagtaacagtggtagagccgactgtgaccagccttcttgtccctcccccagaagctggggaaactgtgccccccgacacctccaagatgctgaagctagcacagcagtgtctggagagggcccagtcgacggccgccaagcttggtgggtctcctgcagtaggcggctctcctggggcatcccccaagcccgcatctcctctgtgggatgtggcccaccgcttgacccctggttacccatggcttgcagggaaaacacgcctgaagccaaccatgcctgcagctgctcccattccccagcctgccggccgacaccgccgtgtatactccgatgaaggaggaaagctctctccttttctgccacccgagatcttccagaagcttcagggggcagagtcacaaagctgtaagaagtaagatggacaagatgggaggtgggatgagcctgggattgggtttttgaggctgagaaagatgagctgatgacagcgattttttttttgttttttgagacagagtctcactctgtcacccaggctggagtgcagcggctcaatcttggctcacggcaacctccacctcccgggttcacaccattcttctgcctcagcctcccaagtagctgagactacaggcgcccaccaccacacccagctaattttttgtatttttagtagagacggggttttgccatgttagccaggatggtttcgatctcctgacctcgtgatgcgcctgcctcggcctcccacagtgctgggattacagcgtgagtcaccgcgcccggcccccacagtgctgggattacaggcatgagccactgcgcctggcctgacagcgaatgtttttaaaatgagtcccagaatgggaatatcccctggccggacacaagcaaatgcaggcggcctggtggctcacgcctgtaatcccagcactgtaggaggccgaggcgagcagatcacctgaggtcaggagttcctgaccagcctggccaacatggtaaaaccccgtctttactaaaaatacaaaaattagctggc

SEQ ID NO: 29782 - DNA, 2134 bp, Artificial sequence
  DNA replication origin
cagctcgtccctggctctctctctctctcaggtcctgatgtcttttccaagtctggagagcagcgatgctgcctgtgccctgcgcagaaaaccgtgttccggctgcagctaaccaccgcaggctcaatgtctctgggtgtatctcagagataagcaggtggtggtgttccttgcttatcccacaagggcacctggccggaataatggagtcacttccctccactggcctgaccccactctttctctttcctggacacaggaggcatacacggaatacctgaggagcatccactatatctcccaggtgttactagaagaagtggaaaccactaaaggtacggctcagccagccgggcgcggtggctcacgcctgtaatcccagcactgtgggaggcagaggcgggctatcacctgaggtcaggagatcgaaaccatcctggctaacatggtgaaaccccgtctctactaaaaatctaaaaaatcagctgggcctggtggcgggtgtctgtagtcccagctactcgggaggctgaggcaggagaattgcttgaacccgggagcagaggttgcagtgagccgagatcaccccattgtactccagcctggaacaagagcgaaactccgtctcaaaaaaaaaaaaaagaaaagaaaaagaaaaaggcatggctgagccctgctgcttcctccatgctggacaaattgtgggcatcctagcccttgatgggtgccaggcttcggcgggggtctcttgtatccttctagcctgaccatttgtagtaggtggaccagcccacactcagtgtgatatagtggcaggaagggaccagcgttgtggataagaagatggagactggggtgtggcaagacactggctccagtgagcggcacagacgtggggcagcattccagctgtggggtgtgcaaaggccctgaaataggagtgggcggggtggggctgtgtgcatgccttgggtggaactggggccgttctggtgtgcagggaaacttgaagagactttgagctttgagggagaggacagcctgggagtggagcctcaggtgaggactgaggatggcagtggccagaccacccaggatgggagcagtaaacggcctcggggtgcgtcctgaaggtggaacagagcagacttgcaggaggcagatggggcaggagcaaactggcaaggagaggaatagcaagttccgcaatgaacacattaagtttgagaggccagcagccgctgcacaaaggatcacagaggtcagggggagccactggacatagagcacagaggtcagggggagccactggacgtgggatcacagaggtcagggggacccactggacgtgggagcacagaggtcgggggagccactggacgtgggagcacagaggtcgggggagccactggacgtgggagcacagaggtcgggggagccactggacgtgggatcacagaggtcgggggagcccctggacgtgggatcacagaggtcggggcagccactggacgtaggatcacacaggtcagggggagctaacagttgccccagctccctagggagccggtgagctcggctgagctctggcgctccaagattgaggagttgggtggaggagtggcagaggatcccctggggagagcaaagtcccagaagacagaggaactccagtggcccaccgtgtctggcaaggtggggacgggtaagggcagtttccggggggagtcgggggctaaatcggggcgggatgagaaaatgggagtctatgagaagttttctgtgaagggcagcagggaggtgggtcaggcgctggggcggtgggtccaggggcgagtcacagagaggcagctcccacggcgcgcagaagggctgtgtgagcaggtccatggtcgcgcagaggtgctccatgccaagctacgggaaggcaggactttggggacacagccggtgggagatgggtgaggcgatcccctcagcacgtccttgtctctgtaaaacggccacttcccagaggcctgcagttgcaagtgaagctgagtgagcactaaaggcctgtttagggtcgaggctgtgacgggcctcgatgaggggcccacagccttagcagactcaggaggcaaaaccagggcag

SEQ ID NO: 29783 - DNA, 1184 bp, Artificial sequence
  DNA replication origin
tctcgccagccccgtctcaagacggcgaagaggcccggctccgtcgcgacaacccacccggactctgccgcccccgccactaacacccgtggggcccgcagtacgcgcggagggggcccgtcgccggaagtgcggccgcgtcccttcctgcggtccgctgctcgggcggctccagcaccagcgccggctgcgttccgggcctccggtcgcccgtccagcccctcggctaccgccgccgcctcccccgctcggcgccatggccgctgcggccggggacggcacggtgaagccgctgcagagcgccatgaagcttgccaacggggccatcgagctggacaccggcaaccggccccgggtgaggcggggcgggggcggggcttggccgctgagggtggcccctggagggacccccgcccggggagggcgaggacggggccggctcgggctggagacttgggagcgggcgccagccgggatcccgggccgcggttcccgggcgaggacgggggcggggcgcagccgggcgtgcagtgaccttggacagctcagatcctgcggaccttggctttccactccgctcgctgagccggtgcatcacagcctgggctccacctgtagaggagatgtagcaggagggtccgccaggccaccttccaaaatccgagtgacgggcaggtccgtgcgttcgtgcatttttctgggcagagatggtagatttaatccggttgccacaggggacggcatgcagagaaggccacatacctgctcatttgtgatgctgtttgcagtcgtcttaggaaggaaaagcaggccggaggggtgtggcccgttcctgagatggggccgaatctaaggttggcgaccaggtagagaagctggcccagccacacccggctgcccaaggagggaaggagcctgcctgtgcctaggagaagcctcgttcctgaatctgctgctttccccaagttggtttttagggcagcaggtgcccccgcaagtcagaaatcctgcctggattatatttcgtctttctctctgaggcatagacttaaagataggaaacttaacagctagggataaaacaaaaaaacatagcatattgctgggcgctgtggttcacgcctgtaatcctgacactttgggaggcccaggcggtggatcacctgaggtgaggagtttgagac

SEQ ID NO: 29784 - DNA, 1634 bp, Artificial sequence
  DNA replication origin
gcgtcgggataggcgctgggcggccggctcggttttcctcgcgctccgtgacgccggcgtcgccggcccggcctccccggccgcgggctcggccagaagggacccggcgtgaggagcgctgtcaccgcgggcaggtcgccctggggtgcccgcgcgtgggaatcgccctcccctgcttcgtgccctcgcggagccggaaaggaggcggcacctgcaattggcagacaggaaaccgcggcgtttcctggagggcgcagcgcctgccccgggtctcgcggtcgctgggaggagggtgcagttccaggtttcactcttgaagttgcttcgctggagaggccttagaggcctttgaaatttgaaagatttcttggaccagcggccacatcccccacagggcggcttgtcccgccgagagccgcgcgcccgagccgcttgctgtgtccgggagccgcgcgaagggcgctgcaggcgctgccctcggacctggagtccgggacgccctgtgctcaggagcctcctttgccagctgctaacacttcctgccgctctgtgcaggagcaggccgggctctcgccatgggtcactgtcgcctctgccacgggaagttttcctcgagaagcctgcgcagcatctccgagagggcgcctggagcgagcatggagaggccatccgcagaggagcgcgtgctcgtacgggacttccagcgcctgcttggtgtggctgtccgccaggaccccaccttgtctccgtttgtctgcaagagctgccacgcccagttctaccagtgccacagccttctcaagtccttcctgcagagggtcaacgcctccccggctggtcgccggaagccttgtgcaaagtacgccctagtctgttcagagcacgttcaggctgtcagtactgcagtgtgacgggtgttgagagagggacagggcgtgcctccgcgggagcctctgggtggggggaatgggccatgcccgggttcagtgccaacagccctgggactgttgtggagagatgaactgggaggagctggggtgagggaagagaaagttgcctatggggaccgctgaggtttgagatctcgagagggtcccgtacgacgagcgctgtgaacctccgcctgcttgtcctgctcatggccacactgatcctttgcagggtcggtgcccagcccccaacaggggcagaggagggagcgtgtctgggtgagtcctcccccggtggagggtgggctgggtgccgaccagccgtggatctgacatctctgttgactctctgcagtggatctgatcacatccagcccccagtgcctgcacggcttggtggggtgggtgcatggacatgcggccagctgcggggccctgccccaccttcagaggacactgtcctccgagtactgcggcgtcatccaggtcgtgtggggctgcgaccagggccacgactacaccatggataccagctccagctgcaaggccttcttgctggacagtgcgctggcagtcaagtggccatgggacaaagagacggcgccacggctgccccagcaccgagggtggaaccctggggatgcccctcagacctcccagggtagagggacagggaccccagttggggctgagaccaagaccctg

SEQ ID NO: 29785 - DNA, 1052 bp, Artificial sequence
  DNA replication origin
ggcctgggtcaggcacagccagtgctcaccttcatgccgtcagcgcctcggtacacggccgtgcagccctggtaaggacacttgtagatggtgggaagctcctccctgcaatgaagagcatgcatggagccccggccccgacaggcagggcgagcctcgcgttgcaggcatcacctctcacaacgaagcttcttcttccatccgggcttgggtcccggcttcttccgaattcttggttcttcagacttcttggcttctttgctttcactcttcttaccagagactctgaaaaaaagaggttcccaaattcaatggtttctgatctccatttgcaaaatgttttttgtctctccaacctgagaaatggtcttttctgaagcttccctgagttgcttctgtgctgactgaccctcagaatctacctgaagccaccaaagccagagcaactctggacaggaggcctcaggggcgagcacagcagagggcaagggcgcaggacacagcagggtcaggggtgaacacagcagagggcgagggcgcagggtacagcagggtcagggcaaacacagcagagggcgagggcgcagggtacagcagggtcagggcgaacacagcagagggggagggcacagcagaggatgagggcgcagggtacagcagggtcggggtgaacacagcagagggcgagggcgcagggtacagcggggtacagcagggtcagggcgagcacagcagagggcaagggcgcaggacacagcagggtcaggtgaacacagcagagggtgagggcgcagggtacagcagggtcagggtgaacacagcagagggcgagggcatggtacagcagggtcaggggcaaacggcagaggacgagggcgcagggtacagcagggtcgggtgagcacagcagagggcgaggacgcagggtacaggagggtcagggcaaacacagcggagggcgagggcacagggtacagcaggggtgggttctgagaactaaagcttcaccctgtgctacacataaaacccacaactagaggtatcaggacggc

SEQ ID NO: 29786 - DNA, 1121 bp, Artificial sequence
  DNA replication origin
ctgctgggtaggtgggcgcggcaggccgcgggagtgggcggcgtccggcccgggacggtttcgccggttccccgatcccttcccgccagagcctccgccggtcggatccccggacgccgcgcccggggggctgtgcggggtgggcgcccggctggggcggcgcggctgcctcggacccggcccctcctgcgcctgggcggacgcccccagccgccgcccgcggggcgctcccttctttcccgaacgccgcccccgccggccgccctgtcaggcgggcctggggtgcgcggcctggggctcccctcagcgcagaggccgcccctcgccagccgtccccgggctcccctgcctcgggccctcctgggccgtcttccccggcgtccgcggtggggccgtctccgttagtttcccgagacctgcgccctggggaggagccccggcccctcttcgggagggtgtcgctggtgggtttctccgcggcgtccacctgcgcgtcgggccggggaccccgtgtgtgaattgtgctgtgatggtttcgaaccgacttctctccgtagcgggaagggtcaagagggaaaaatataatcctgaaagggcacagaaattaaaggaatcagctgtgcgcctcctgcgaagccatcaggacctgaatgcccttttgcttgaggtaagaggaagctggtgtccgtctgcgggcagatttaggttcggggtttttgagtccagccaccgcacagctttcctaagaaaacacccgaggcggcgggcgcggtggcctggcccgcagaggggagggtcgcctgagcccgggagttctggaccaacctgggcaacggggtgagaccccgcctcttttattaaaaacaaaacaacaacaacaaaaaaacaggccgggcgccgtggctcagggctgtaatcccagcttttggggaggccaaggcgggtggatcactcagggtcaggagttcgagaccagcctggccaacatagtgaaacccggtctctactgaaaatacaaaaattagctgggtgtggtggcgcacgcctttaatcccagctactcgggagcctgaggcaggagaattgcttgaacctggacccgggaggcagaaattgcagtg

SEQ ID NO: 29787 - DNA, 1529 bp, Artificial sequence
  DNA replication origin
acatggccttggcgcctacagccccggcggcggctccctgcgcccgagcccgcgctgccttcctattggctgcggccaggcgcgcacacccgttggctggcggcggccaggccacgcccctcaggtcgaggccttgcgtcgtggccatgttggtcctgggggaggcgcctgcgcgcggtgaggtagtttttgcgtttggctttgccgccgcggtgtagtccgcgggggcgtctcgcgcgggcagactgccgcccctcaagcgtggttcctgccgggaatgactggggttggtcctgaagagaccacctggccaaccaagccgaggcaggctcagagcgccgcggggagcgcaaagccgcgcgcgcctctgagctccgggcagccgctgttcctcccggcggccgaacggtccgcgcgcagggcggtgtttcggcagccggagaccgcgcggtagccgcgcctgtattcccagcgctttgggaggccgaggctggagggtcgcttgagcccaggaattccagactagcctgggcaacagagcgagaccccatcacttttgtttcttttcttttttttttttttcctttttttgagacggagtctccctctgtcgcccaggctggagtgcagtggcgcgatctcggctcactgcaacgtctgcctcctgggttcaggtgattctcctgcctcagcctcccgagtagctgggattgcaggtgcgcgccaccacgcctggatgatttttgttatttttagtagagacagcgtttcgccatgttggcccaggctagtctcgaactccggacctcaggtgatccgcccgcctcggcctcccaaagtgctgggattacaggcgtgagccaccgcacccggctgagaccctatcttttaaccagcctgggcggcagagcgagactctgtctcaaaacaaaaccaaacataagaattcgtaaaagcgagtgcctaggcgaagctaatgtgcctcaaagtcctgggtaagtagaggccctggagacccgtccgcatcctctggcagtggccttggaaccaccgaagggattcagccgaagggccgcgttcccggcaggcgtctttattgtgttgattacgtagatggcgtagatgacgtagatgacgttcagcaccacaaacgaagagccgaggcacagagtggggccttggattcatgagatggggatggagcagaaatgagaattcggagtccatgaaacccccacaaagactcctgcacggcccgactcggacactttgcaatctgctggttgagggggatggtgtgaactcagggaacagcctgagatcgcgccgctgcactccagcctgggcaacagagcaagaccctgtttcaaaaacaaaaaataacactaagcaattaacaggactagactcagaggtgatcgagaaattgaaacaggctggaaatttaaattaactgtgattaatatgtggaggtctcttgtacgaaaggtgaacaatatgcatgaggaggaaactcatcaaattataag

SEQ ID NO: 29788 - DNA, 1526 bp, Artificial sequence
  DNA replication origin
cccggcgagccccgcagcccgcggcagccctggaagcacacggcccacgcctgctcctcgttgagcggctgctcgtaggccttcagcacctcctccagggacagctcccagggctccggccgccctgcgcccgccgcggcgccgccgcagctgcccgcccgggccatggcggggccgtcatcgcctcccgcgcgccggacccgcgtccatgcagccgcgccttccgccgcgcagggtcagcctggccgccccgccccgcgcgagcgcctcaggttgggggcggggcggcgacgggggcggggcgcggagggcgcggggggcggggcgcggagggggagggacgcggggcggggcggggagtggagggcgcgcggggagaggcccggagggggacgggtgaggggcagggcggggcgcgggtaggtgcggaggggctggggctcagggctggggacgcgggggcgcggggccgaggccggggtgcgaacccctccggggtgctgggcaggaccggggggagggttgggggctgcagacatgggccagggcccgcgcgctcggacacgcggtgacacccccggcgctcccccgcagacccagacggccgatgcccacaaaagcccgggccggcatccagcccgggacactgcggtgaccgcggggggcctgggaggtttgccgctgggaacgcgggagggagccgggaggagctgagcagacaaagcccgcagtggcctccccgagccccgggcaaggtgacctccaggggttgtcgcagggtggctggggtgagggcgactccccgcatccggccttcgggtatgaagcccttaataaatgcctctgcctagcagggaatgtgcctgcagtgacgtctccagggtgtccgtgaaaaataaacacacacggttggccagtgatggcgtgcatcgcatttggggcgtgtttgtgtcttcaggccgggtcactcctggacactgggtgtttgcctgagggacgcaaggggaactcggctggggctcatcccgaggcctcttcatagttgtgccagatctgaataagtgggcaagaaaatgcagttggggcataaacggtcccaagcctgggtgctgccagtaccacccgggggcaagaaatgcagattcctgggctccagggctggagattctgatgcaggtccgaggtgaaacttggggcacttaaagttcgctggtctcccaggagttctggacctgcctggacaacacagtgagatcccatcccagaaaagaagttccacaatgatttttttttctttttttttttttagagacaaggtctcacccaggctgaagtgcaatggtacaatcgtagctcactataacctcaaattcctggggtcaagtgatcctcccacgtcagcttcctgagtagatgggactaaaggcatgaaccaccacgcccagctgattgtttttattttttgtggagatgggatctcaccatgttgcccaggctggtcttgaattcctgggctcaagcagtca

SEQ ID NO: 29789 - DNA, 1396 bp, Artificial sequence
  DNA replication origin
cgcgcgccctccactccccgccccgccccgcgtccctccccctccgcgccccgccccccgcgccctccgcgccccgcccccgtcgccgccccgcccccaacctgaggcgctcgcgcggggcggggcggccaggctgaccctgcgcggcggaaggcgcggctgcatggacgcgggtccggcgcgcgggaggcgatgacggccccgccatggcccgggcgggcagctgcggcggcgccgcggcgggcgcagggcggccggagccctgggagctgtccctggaggaggtgctgaaggcctacgagcagccgctcaacgaggagcaggcgtgggccgtgtgcttccagggctgccgcgggctgcggggctcgccgggccggcgcctgcgggataccggggacctcctgctgcgcggggacggctcggtcggggcgcgggagcccgaggccgcgggtgaggccgggggcggggcagccggcggggaccgcggtctggggcgtccgtcccgccccctgggtgggggtggtcccggcggagaggctgcgaccggttctggagcgggagatccccttctctgcgggacccggagctccctccctcccactctccgtccctctttccctctctctttcctccctccttctctccctccttcctctccctccccggccctggacgttcccctcccggacccccccacctgacgcctctcccagcgcggagcgggctgctccccagtggcctggcttcctccgggagagggacttgggccggtggctcagggagcacggagctggcctttgctggggcgactcctcccctgccttcagcaggaaaggagacagaagcgtccccttggggcattttctcctgggtggaaggtggggggctgcgcctcacttggcgtctgaactgacactaaattcctgggtttaactgggagaggaaggggtgtgtaaagttggggggacaacctgcttggtgtttctattcttaaccatcaaccagaaccaacaattaagccctagaaagatacttgaagttagtgagaatggtgagcttaagtgattatttaccctttacgaaaaaaaccgaaagtgatttcttccctggagagctggagtgctggcttggagcatgtgatatgaccccaaaagctggtaccctgccggggggcagaggcaggctgtgtgtttgccgcactctctccaggcctgagagctgtgggtttgcatgagcaggcctatgtggaggaccaggaagggccagggcaaggccagacagaagcaagctacagagccacgaggggtgggggccgttgtgccccacccaagggcccttgttccttcaccaggtcctgctcatcctggagcccccccctcagctgcctccacactcc

SEQ ID NO: 29790 - DNA, 936 bp, Artificial sequence
  DNA replication origin
ggtcagacgaggcaggttccagggccttctgcggcgtttctgcaggacagatgaggcaggttccagggccttctgcagtgtttctgcaggacagacgaggcaggttccagggccttctgtggtgtttctgcaggacagacgaggcaggttccagggccttctgtggcgtttctgcaggacagacgaggctgtgttcttgggccttgtcctggcctgactttcacctgttcttgttctgcccggctcaggatcaggtttcctgggctcccagcagtgggtggtggggaaggaacacaggaaatgagaggccaaagggcccccctgcagggccactgaggcaaagcggccccaggaagtggacagtgcctgggggaggcgtggctccatctgccacaccatggccccccaccctggcagtgtggcacagagctgagagaggggccatgagcagccgcccgtcctgatccagcttgggcagtcgagactgtgttcaaggggaccgacctctccatgcctccgtccctgtccccacgtcagtgtggctcgaggtgaggttggtacgtgatgtgcagggcccggcacagcatctgacataaggagtgctgtcgttatatttgtgtgtgtgggtctttctttccttgttgtaaagcgaaactatgagaaccctttaagacatggaacacagcactgtgcagctgagagtgtccgtgtaattgtccatcgacctcctgtgtccgactgtgctgcctctgcctgcctgtcccagcagacctggccacctggggaccacctgggcctgtgggcctggaagtcggtgcagacgatggtgactagggtgggcaggtcggcacccccatatcactccacagaaccactggtgcccttcgtggtagattatgaaagtcagggtccctgtcaagtaaaatcgagaaatgc

SEQ ID NO: 29791 - DNA, 1141 bp, Artificial sequence
  DNA replication origin
ccagcactagttaacttcgaaaacaccttctgccaccgaggcaagagggaatcccctgcctctccaaggcctggcgttctcctccatgagatgctgacgggataaaaggcagagcccatgtgtgcagagaccccacgacacagaaacacatcagctcccttggggcagcagccgtgcccagggagaggctgagagagtcagagagggatggttgctcctaactctgagtccacggagagataggaggcccaggggagagctccggcttgggagccacgtcggagcctagcactgcccgactcttgctttgtggcttcgggcaagggtcccagccttagagcctgcacttgctcatctgtcaagtgacccctccacctgtaaggggcaggagaatgaggctgggttgtcacaggcccagcaagtgggctttctcaccgaacggcccgtccccacccaaagctccaagcaagtcgctgagcctccctgtggttcctgcgtatagagggggccacctttggcatcatatttcagaaggaaccagggcctggagaggctggtggggaggcaggaggaagggcgctctcttgcagatgtaaaagtggaggaagagagaataatgcgcgctgggagaggataacaactcaggcaacgggagagagcagttggggaagaggctgagcccaccacttaacttctctggtaagaagaaagtgtgaggccaggcgtggtggctcatgcctgtaatcccagcactttgggaggccgacgcagatggatcacctgaggtcaggagttcgagaccagcttggccaacatggtgaaaccccgtctctactaccaggcatggtggtgggcacctgtaatcccagctacctgggagcctgtggcaggagaattgcttgaacctgggaggcggaggttgcagtgagccgagatcgagccactacccctccagcctgggtgacagagtgagaccctgtctaaaaaaacaacaacaacaacaaaaaaacaacaagaaagcgtgaggattaagtgggaatacataatgccagcggcagtcgcaccgacgacctgactttctgtccacgaagagacgtccttgccagtcccctcccacccactgctcccctccctggcctcc

SEQ ID NO: 29792 - DNA, 835 bp, Artificial sequence
  DNA replication origin
tgggatctggggggtggggggaggatggaagatgggccatgggatctggtgggtggggagaggatggaagatgggccatgggatctggggggtggggggaggatggaagatgggccatgggatctggggggtggggggaggatggaagatgggccatggaatatggggggtggggggaggatggaagatgggccatgggatctggtgggtggggagaggatggaagatgggccatgggatctggtgggtggggggaggatggaagatgggccatgggatctggggggtggggggaggatggaagatgggccatgggatctggtgggtggggagaggatggaagatgggccatgggatctggggggtggggggaggatggaagatgggccatgggatctggtgggtggggggaggatggaagatgggccaggggatctggcgggttgggggaggatggaagatgggccaggggatctggggggtggggggagagccgtccaaccttggcacacgcttgggctgcagatgaggccgagcagctcaggctgccacccggcgtcaaaaccacctgcaaaggctcagagggttcgggaagctggccaggaaccttcctcggttagaggacaggagagacacagcaccataaagggtcagggaggaatgacagaccagcactagttaacttcgaaaacaccttctgccaccgaggcaagagggaatcccctgcctctccaaggcctggcgttctcctccatgagatgctgacgggataaaaggcagagcccatgtgtgcagagaccccacgacacagaaacacatcagctcccttggggca

SEQ ID NO: 29793 - DNA, 1289 bp, Artificial sequence
  DNA replication origin
gtcacgcacgatctcggtggcacgcagcctctgctgtcacgaagtcccaactctagagaagcacctaccctttggcacagcccccacaaccaaggcagaaccggtcaccctggcttcggccccaggtacccgccacactgctttgggacactccctgggcagcgtgaggtgtgtgtctgcccacaggcctcatgtatgccagcccagggcaaagggcacagagggtggcactcctgtccttccgggaacacctgtacctgttcctgagcaggccgctcctggccaaaatgccaacagacacagctacaccccatggagagacccttctctcacttggtcctactaccaattccccaaacttcgcctcagtcaactgcctgcatacagagccgtttcctcctaaagaaagtgctttctggccgggaacagtggctcatagctgtaaccccagcactctgggaggccgaagtgggaggatcacttgagcccaagagtttgagaccagcctgggcaacagagtaagactgtgtctctaagaatgaaagagctttcactgggtaagaaactgatctgagcagcagaaaacagcctgatcagagacacaacagcaggaggaccgtctgctaattgtggggaacgttagaagcatgtcccaggaggccaagggggagctgagagagaggacggaagatgggccatgggatcttgagggtgagagggaggatggaagacgggccatgggatccggggggtgagagggaggatggaagacgggccatgggatgcggggggtgagagggaggacggaagacgggccatgggatccggggggtgagagggaggacggaagaggggccatgggatgcggggggtgagagggaggacggaagacgggccatgggatccggggggtgagagggaggacggaagacgggccatgggatccggggggtgagagggaggacggaagacgggccatgggatccggggggtgagagggaggacggaagacggatcatgggatccggggggtgagagagaagacggatgacgggccatgggatccggggggtgagagggaggacggaagacgggccaggggatctggggggtggagggaggatggaagatgggccaggggatccagggggtggggagaggacggaagatgggccaggggatccggggggtggagggaggatggaagatgggccatgggatctggggggtggggggaggatggaagatgggccatgggatctggtgggtggggagaggatggaagatgg

SEQ ID NO: 29794 - DNA, 1087 bp, Artificial sequence
  DNA replication origin
caccacgacctctgcatccaggctgcccctctgcgtctgccccgctcaccatgaccttgcgcagcttgtagttccgggcccggatgtcctgcatcagcatctcgaagggcgtgagctggaactcggtggggagggggttgaactcctgctcttgcaccttcttcagcttcactccgcggcggagctcccgcatgagctgaacccacagtcgggcctgggccccaggggaagagaatgggtctcagccccaggtgaagctccacggccccccaggcagagacccttggcaggctgggccgcgtcagtggcccggtcaggtgggagtgagccttacccagtctgtgtgacccaggctgtccagctctgcccgaggcgtctccagatgcggctcgtcctcccgaagcttctgcagcatctgtgaccacacgtgctcgtcagtccaggggaggtacgagaatggcagatgcaagacgggccccgtccgtcagggacacgaccacgtcacgggggctccactcgaccagccggaaaagagacagctgggcattttggcccaggccataggactcgaaaaggtatctggggaaaccgagccatcgccacaggcggcggacacaggtgtggagactccactcagtccacacagcatttcctcaggtgggccatgcaccctgccacccccgagtccccgcagctgctctaggtcccagccaggcctttacgctgagctgcttctctgagtagcgtctggggctcagcgcagtgtggcacaggccagtctttgtgcatggcttgggtgaatggatacgtggtggacaggtggatgggagggtggatgagctgctgcctggcaagtccagggaaacagacatgggtatgtactttgtgaactggggaaggtgccaacactgtggtgagggcctgtttgggaagcgctctgtgctgagaacttgggaagaaggcgcggcacctgctgcctccgtcacgcacgatctcggtggcacgcagcctctgctgtcacgaagtcccaactctagagaagcacctaccctttggcacagcccccacaaccaaggcagaaccggtc

SEQ ID NO: 29795 - DNA, 1459 bp, Artificial sequence
  DNA replication origin
ccccacccctcgcgccaagagtgcgcaggcgcgcagccagctcccccgcccccgaccccgcgcgaagagtgcgcaggcgcgccgacagccgagttttctgcgcttccttctccctctctccagacgtcgtggtcgttcggtcctatgtcgcgccgggccctccggaggctgaggggggaacagcgcggccaggagcccctcgggcccggcgccttgcatttcgatctccgtgatgacgatgacgcggaagaagaagggcccaagcgggagcttggtgtccggcgtcccgggggcgcagggaaggagggcgtccgagtcaacaaccgcttcgagctggtgaggagcgcggcggcccgggtgggggtggggtggcccttgacgttgtggggcggggcgagcgtccagccgggtcggggagcggggttgtgatgccaggggtgggaagggtgacgtgggtcccagccgcagtggggagggcggggccgtgcgtcggggccagggcgacgcgggtgggcggtggcgtggggtgaagacggcgggccgcggagttagactgggttctaaccccggtgaggtgggcggggctaagggatggggcggggccgtgctgtcggggcggggcgaccgaatgggcggggttaagcggggtccgggttgtggagggtgcggggccttgatgccaagggcgtggccaacgtccgcggggccgggccacgacgtgggcgggattaaatgggcctgcggccacgtggctgtcgtggggccgtgacgctaaagggcgtggctaaagacgggggggtggcgaggcgatggcgtgggcggggttaaatgaggcctggggccaccgtgggggtggggccacggcgtaggggcaggagtcgggtggggcttccctttctcgagtctagaggggccttctctcggttccagggttgaggacttgccaggcctctgcgagcattctgctttaatcctcacaacaactctgcctaacccagggccttgctcttcgcgcatccccatcagcctaacccagcggattagtcttactctttgctgcatctccggcagctcgtttctggcacagggaagtaacagtttgactgtatggtttgctcatgcggtcctgtgacgttttctcctaagccctggcctccgtctgtaactctgcctctgcgggctctgcgatcctcccacctcagcctcctgagtatctaggactacaggtggatgtcaccacgcccggctaattttttttttttttcttttttgtagagaagagttttcgccttgttgcccaggctggtctagaacttctgcgctcaaacaatctgtccacctcagcctcacaaagtgctgggactacaggcgtgagtcaccatgcttggttgactgcccttctcgcatcaagtccacctttagtggtccccaagacccccgtcaaggttcagtaatttgc

SEQ ID NO: 29796 - DNA, 1166 bp, Artificial sequence
  DNA replication origin
cagaaggaccctagaaaaaactgggcattccacatcacactggtgtgctcacctcctcaggcaaacagggttgggacttgtggctccaactaaacggcaacaaagctacacccttgtctcaggacacagtcagacgaggacgaagggcaatgatgaaaacatatttttttctgatgacagactagctccagtggagggttctgtacccaccatgcaattaacccataagcatgggacagatgtcagggcaaacagcaagtgtcccacgggtcacaggagcaccagaactagaagggatgtccccatcagatcacacattcccacagagacacagagcagagcgccaaccagtcgaggaacaagggtaaaaacaagaagcagcatttagaaagtaactttcccttttctttttccctgatctcttagttatactcctaataggaaggaataaaaatactaagtaagcttctttcaacaccaccttggaaaacagccagaagagaatggagagagcgtcaggcagagggagagggcgtcaggcagagggagagggcgtcaggcagagggagagggcgtcaggcagagggagaggggcgtcaggcagagggagagggcgtcaggcagagggagagggcgtcaggcagacggagagggcgtcagacagagggagaggggcgtcaggcagagggagagggcgtcaggcagagggagagggcgtcaggcagagggagaggggcgtcaggcagagggagaggggcgtcaggcagagggagagggcgtcaggcagacggagggcgtcagacagagggagagggcgtcaggcagagggagagggcgtcaggcagagggagagggcgtcaggcagagggagagggcgtcagacagagggagagggcgtcaggcagagggagagggcgtcaggcagagggagaggggcgtcaggcagagggacagagcacagccaggcccaactcacgtaccgatgcttctcccgtgctgcttttcttgtttttctgtttttttttcttcttccggagtttgccacttgcatgagactaatgatagaaacacattttcatcagtagaatgagaagtaaatcttaagaagtgagaattaaagcagcaagcgtgactccaccctcacctaagcagcccctacctctccc

SEQ ID NO: 29797 - DNA, 2078 bp, Artificial sequence
  DNA replication origin
gcactctagcttaggcgacagagtgagattccgactccaaaaacaaaaacaaaaacgggggaattaccgggtcgacactcacaacgtccccccaactcaaaataggctagttattattgctaagctgaaccaattatatgacttaaagcaagaactcagaacctgacatgcccaggccaggggccacctaactccccactaagccccaagaaagaggaatggaaagcagcagcctgcttttcccacagggagatgacggggagctctgcggaggctgtccggggttgcaaggggagctgtccggcggctgcgtgagggccgcccgggggctgtctggggctgcgcgggggccgtccggggctgcaaggggagctgtccaggggctgcatgagggctgtccagggttgcaccggggctgtacggggactgtccaggtccggggctgtctggggctgcgcgggggccgtccggggccgtgtgggggccgtccgggggctgcacgggggccgggaatctgagctgctcgcctgcactgagccgcaggaggcaagggcagcagtgagaagccccagagtcctgggcctgcatcacacggcactactgcgacggtccccaggaacggctgagagagcagcgctccagcctctcctctgagtatggatggagctcgcttggcctagagcctccgaacacatctccttctggtcacagggccagaccgccctgcagagactggcacccttcctgttgggaagggcaggaggcagcatgcctcccccagccaccagggaagcaggcggcccagggcagtggtggctacatggcccctgctcctgtcaggggctgcagggaccacgcaccacgatgttgttcggctccatagactccacggccaccaggaacttgtgctgagcctgctggtactcctcactgtgctcaaacgcaaagaaggagaggcctttttttgattccagcagccgcatggacagacctgggaggggagagtgctcagggagggtgtgccgggagcagggacgtgggcagctccgagcacagccctcaccttcgtggtgttctggatgaggcctctgcgatatcgacaaacttgacctgagtgtgtactcatgggtgtcaccagctccggacaccttcccaaaacacccgccgtctggtctacaccaggagacggcatcccgtctgctttagtttcctatcaagacgtgtttgcctccagaactcggatacagctctagccccactggcctggagggaatgtcagggacaaggacacacacagtccacagatcgccagatctgaccacgccgagcactgtccccagaccacgtctgattgaggagaatgtccggggtggctgtggaaggacagggttggagtgcggtggcacaggtggccacagcgccaggcctctgaagccacagagctttgtaacgtgtgaccaccctctcacttggctcctcttgtctgactgggtgtatgggacccagtttcttctgataaacctggaaagctcagcctcccaggacctccatggactaggtcccctgtagtgataccttcttgatggccctgcccaaggccccagtcctgcaggaatacatggccatggaacccctgtctgcagtgagcaggggttcctgccaggaagggaaggggccgtgagcagcggggttcaccttctgacagcacaggcctcgctcctagatgtgtccttacagaatgtatgcaggcaatctccggcacccccacagacacaggcgcaggagaagcggccgtgggagccatggcagcgctgacagcagcagccatgccgatcaccaagggcaccacacagctcccttcccacaagctgtccttgccctggcccctgagggcccccacagttcagccactgcagagtggaggccagtgtggaaggcctcctgacacttccccacaccacacaaccaagcacccaacactccatgcctgtcttcactgttgcaattcatcttaaaatcacttattagtttgcaataatatacaaaatattgcagtttaaaatgaactcgattgcttc

SEQ ID NO: 29798 - DNA, 1430 bp, Artificial sequence
  DNA replication origin
gagggcagacatgcccctgggcaccctggatgccacgctgcatttatttcaaccacagaacttgtgagcttgacatggtaacactttcaacaccatgaggcacaactgctgccacgtcctgacagaaccaggcgtccatgtgtgcagcacagatgtgtccacctaagactgcgtgtgcatgctgacgtaagcactattatttacaacagcccacacggccgtcaactaatgatggatacacaacatgtggtccgtccacacagtggagtattactaagccataaaaacgaacgacgttctgatcgacgctacagtgaggatgaaccttgaaaacttcattgtaaataaaagccagagggcggggcgtggtggctcatgcctgtaatcccagcactttgggaggctgaggtgggtggatcacaaggtcaggagatcgagaccatcctggccaacacggtgaaaccccatctctactaaaaatacaaaaaattagccaggtctggtggcgggcgcctgtagtcccagctactcgggaggctgtggcatatattaaacaccaacaaacaaaaactttaaatgggtaagttttgtgctacgtaggttgtatctcaataaagctgtcatggatatcctggcaacccctgtcatcttacaccatcgcatctgtcttgatagcttgaggtgctcccacagctgaggggaatggggtgggggctctgccttacctacgaggtctcgagccatctcctgatcctcttgaaagcggcaggcatcgctgagctgcaggagtgagtcaacgtggtaagggctcgtctggagcagaacctaccagaagggaggacagccctggaggaaaggcactcagcaaggccccagctcccaggcatgcctttttttcagacatttaaaaccagcggaggctgggcgcagtggctcacgcctgtaatcccaccactttgggaggctgaggcaggaggatcacttgatatcaggagttcaagaccagcctggccaacgtggcaaaacctggtctctaataaaaatacaaaaattagccgggtgtggtggcgtgtgcctgtaattccagttactcggaaggctgaggcaggcgaatcgcttgaacccgggccgagactgcgccaatgcactctagcttaggcgacagagtgagattccgactccaaaaacaaaaacaaaaacgggggaattaccgggtcgacactcacaacgtccccccaactcaaaataggctagttattattgctaagctgaaccaattatatgacttaaagcaagaactcagaacctgacatgcccaggccaggggccacctaactccccactaagccccaagaaagaggaatggaaagcagcagcctgcttttcccacagggagatgacggggagctctgcggaggctgtccggggtt

SEQ ID NO: 29799 - DNA, 3124 bp, Artificial sequence
  DNA replication origin
aaagccagacacaccggccgcctggcagttggccctcttgcgccgcagccctgctctcccggtctggccatggggcttttgttctctcaatgtgccgtgtgctctgctcctggcacagggcctcggcacatcgtgactctgctggggaacacaaggaccctctcccctgagcctggtgagggcacattcatcctctccgtctcagcacagccaccatccttcctccaaacaccttactggaggattttttttttttttttttttgagatggagtcactctgtcacccaggctggagtgcagtggcgtgatctcagctcacggcaaccccctccttccgggttcaagggattctcctgcctcagcctcctgagtagctgggactacaggcacaacccaccacgcccaatttttttttttttttttttttttgagacggagtcttcctctgtcgccaggatggagtgcagtggcacgatctccactcactgcaacctgtgcctcccgggttcaaacaattttcctgcctcagcctcccaagtagctgggactacaggtgtgcggcaccacgcccagctaatttttttgtattttagtagagacgggttttcagcacgttggccaggctggtctcaatctcttgaccttgtgatttgcccaccttggcctctcaaactgctggaattacaggcgtgagtcactgcacccagctggctaagttttgtatttttagttgagacggggtttgccatgttggccaggctggtgcagttttgattttatgtttatttctacattctaaaattaatatgttttccccacttcactgcacacctgcttccactgtgtcactcgcacctgccacagaggccgacacgcaagcgcttgtacattcggtggagatgggaaagaacgtggcctgcaaacgcagagctgtgacccccaaataacactgttcctctcctcctctcccttcctgtgaggggaaagacccacttagccctgagccccatctctcagcatctgggtctgaaagaggcagccagtccctgtgagccccaaagccctgacctcagagctgcaggagagagctgggagctgcgaggtgggagctgggagctgggagctgcgaggtgggagctgggaggtggaaactgggaggagggaggcgggagctgggagctggcaggtgggaggcaggagctgggagctgggaggcgggagccgggaggtgggagctgggaggcgggaggtgggagctgggaggagggaggtgggagctgggaggtgggagctgggaggtgggaggtgggagctgggaggtgggagctgggaggagggaggcgggagctgggaggtgggaactgcgaggaaagaggtgggaactggaaggtgggaggagggagctgggaggtgggagctggaaggtgggaggtgggaactgcgaggaaagaggtgggagctggcaggtgggaactgggaggtgggaactgcgaggaaggaggtgggaactggaaggtgggaggtgggagctgggaggtggaaactggaaggagggaggtgggagctgggagctggaagatgggagctgggaggtgggaactgtgaggaaagaagtgggaactagaaggtgggaggaggaagctgggaggtgggaactgggaggagggaagagggagctgggaggtgggagctgggaggtgggaactgagaggagggaggcggggttggaaggtgggaacttggaggagggaggcgggagctggaaggtgggagctgggaggagggaggcaggaggtggcaggggaggtgagaggagggaggcgggagctgggagctgggaactgggaggagggaggagacaggggctgtaaggtgggaggcgggagctgggaggtaggaggtgggagctgggaactgggaggagggaggcggtagctgggaggtgggaggcgggagctgggaggtgggagctaggcggcgggaggagggaggtgggagctgggaactgggaggagggaggcaggagctgggaggtgggaggcgggagctgggaggtgggaactgggagctgggaggtgggaattggaaggagggaggagggaggtgaggtgggaggtgggaggagggagttgggaggtgggagctgggaggtgggaggtgggaactgggaggagggaggcgggagctggaaggtgggaggcgggagctggaaggtgggaggcgggaggtggcaggtgggaggtgaaaggagggaggtgggaggtgggaggagggagctgggagctgggaggtgggaactaggatgagggaggcgggagctgggaggtgggagctgggaggtgggaactgggaggagggaggcagaagctgggaggtggcagctgggagctgggagatgggaggtaggaactgggaggagggaggtgggaggtgggaggagggaggtgggagctgggaggtgggaggtgggaggagggaggtgggagccaggagccgggagctgctaggtgggagctgggagctggaaggttggagctgggaggtgggagctgggagctgggaactgggaggagggaggtgggagctgggaggtgggaactggaaggagggaggtacctctctggcctgacgtaggagtagattgtgtccgaaggaggcagaggatcaaaccccatcacagactgcgtggtcacgtccttcagaaagggacataaaacgaagatgctacagatgctgccagggggcctctacctctcccagcagagtccttctgtcgactccagcatggactggatgcatctgctgagagatagccacagagtctgacagaaacggctgtgctttttgtaccaacgagctttgggtgagggtgggacagtccttctgccaccaggacactcacgggagtcgagatgaacctgcacggcgtctgccctgcacaccagagtgtgtggtggggaaggaagggggtcacgtgccgctcaagcctgccaacatcttcaccacgtgtcagaagctcccacttcagcaaatgcaggctacagggaccctgagctgccctcgggttgcacagtgccacgtgctgccactctactgaggagagtcagaagctcacagccccag

SEQ ID NO: 29800 - DNA, 1122 bp, Artificial sequence
  DNA replication origin
ggcttcctcacctggggaggcagccacgttttccgggactcctttcttccctctcgactctcacccctgcccaccttcccctcccccatccctccacccgcaaacttcaagcactttctggaaggggctaaggtgggtgatgctgagtcacatttattaccagactttcctggccccatgctcacaggcactggtcactgagtcaggcatttgccagggctgtctgcttgggcgactgctgcaggaaagcaggctgaggccccagtgcccagtctgagccttagaaccggccctcaggagggctcagccccataccactaggggggctcctgcaaacctggtcccttggcctgaggcagggatttcacctccttttgcaggagccgctgcaaggctgtggatgaagctttctggtcacaaagccccttctcctggggctgctgtgggagtagctcttggcacacacttccacccagagacttcacatcccagctgacgagggcacggtcctgagagctggcagcaaagatggggtggggtggatgctgctcagtcattggagcagacggagtgtcccaggagtgggcggaaaatgtctctttaggagcctgaggttggcccctggtgcccggagcctgaggccccacaacctccccatgtcctcctccgttccccacgactgctggtgagaagtcctgcctggagttttgcagggacccctccctggacccagaagggtccgcgcttcaacactttcagagatcatttagtccatcctctttgacaaacggggaccagggaggtaaggaactgcccagggtcacacaggaaccagaccacacaatatcaccacctccctctgcccagcacacttaaagccgcgtgcaccgcgctcaccaggagcatgtcagcacctccttgagcgtcctgcggagctcctggctgtggaaggcgtagatgagggggtcgatgatggcattgcagatgatgagggcgagaaagaggttgaagttcttgaagatgcagccgcacgtggggtgctcggggcagaggacgatgagtgtgagatgcaggaagaaggggccccagcagaggaagaaaatgcccagcaggatggtgagg

SEQ ID NO: 29801 - DNA, 1442 bp, Artificial sequence
  DNA replication origin
tgaagcgcggacccttctgggtccagggaggggtccctgcaaaactccaggcaggacttctcaccagcagtcgtggggaacggaggaggacatggggaggttgtggggcctcaggctccgggcaccaggggccaacctcaggctcctaaagagacattttccgcccactcctgggacactccgtctgctccaatgactgagcagcatccaccccaccccatctttgctgccagctctcaggaccgtgccctcgtcagctgggatgtgaagtctctgggtggaagtgtgtgccaagagctactcccacagcagccccaggagaaggggctttgtgaccagaaagcttcatccacagccttgcagcggctcctgcaaaaggaggtgaaatccctgcctcaggccaagggaccaggtttgcaggagcccccctagtggtatggggctgagccctcctgagggccggttctaaggctcagactgggcactggggcctcagcctgctttcctgcagcagtcgcccaagcagacagccctggcaaatgcctgactcagtgaccagtgcctgtgagcatggggccaggaaagtctggtaataaatgtgactcagcatcacccaccttagccccttccagaaagtgcttgaagtttgcgggtggagggatgggggaggggaaggtgggcaggggtgagagtcgagagggaagaaaggagtcccggaaaacgtggctgcctccccaggtgaggaagccacagccccagaggccccaaatgcctggggagtgtggaggtcccaaccaggcttgcgctgaccctgcttctcggttttctctccgtgctgacaaaccccagcctagaggaaggacgagcaggtgcagcagggccccagtcccctccactcttgacgctgtcctagctgcagaagaggcgggttcccagccttccctgtgaccacatgtgacctcagccgggacacatccctttgctggccctggccctgagtccctccagccatgatgagccgtgaatgggaccatccctgtccactctgagatgcctggaagggggctcagtgcaggtgggctgggggctgggtctgctgtctgcccagcactgccattctgggagtaggcaggtggggaaggggtcgggggtggagggtctgtgttcagccagtcctgggaaatgcttgatgtgaggcttctgaagatggcagtgaggcagaggcccagccggcggagaagtccctgggagtgagtacctggggatgaactatgctgcctggtgctggggagcagtggcgcccctgggccatccctctgctgaaacctgggcgtctcgctgaagagaccacctccatttcctctgcagagactgagcactcagtcagcccccttcctgggacaggctcaatggaggctgcagggccatcagccgactcctac

SEQ ID NO: 29802 - DNA, 1125 bp, Artificial sequence
  DNA replication origin
agggaggacaatggcccctcttggccctgggaaccccgcccccagctaccctctcggttccgcccttgcgacagccccaccctgcggctttgtacggagggtcttttttccccacgccggtttagagaccaacccgcaccatcccagctccctgtcttttggcagacaaggtgctctgagcttttgccggttttgggtgggggaggtaggtaaaggctggcccaggccctgaacccactgagaagaaacaaagcgtcggatcagagctcggaagggcgcgaacacagaggggtggcggcggccgagagcgagctccgtgggtcgccggcttccgcagtgggcggggagggggtgggcacccgacctcctccaccaaggggctgccatgagcgtccaaaggagctttgtgggcccgggcgcgcacagcacctggacgtgccactgcccggtgcgcatccgtgtcaggaattgtcacaaggacgcacaagccaggcaagaacccggccagggtgggggagggtgggcagcggcttctatctgactcactctctgaggtcggagactgcgtgcaggggggcctcgggggagcgactggagatgcgtttactggtcagagaaggaagggagcaaaggactcgccggcacggcactgacctcctcctgggccagatattacagtgccaccaccttagaacaagggccttctgatacttcagtaacaaaaatccttcaggaagggtctgacagtgcacgatgtacagacgaaccccacccggcccccaaatcagcattcacttcacaaaatgagcagctgcgaacttgcctgtggacgcctgtgtccggtctgtgtgcacagggctgtgtgtgggtggcgtggacctgtacctgtctctctcttttctctcaagaagctctccagtttggaaagtcgagaaatggatcttttgttctcaagagatgcccctccctgccccacagtgtgctcgtgtggctgctgctggggtctagctgcctggggttcctccctgtccctgttcaagggagtccggggtgagtgtctgaggtgcctccctgtctccacgagggaagaagttttgcagcctcagggcagccagctcctgctcc

SEQ ID NO: 29803 - DNA, 852 bp, Artificial sequence
  DNA replication origin
gaggtgcaggcgagagtcccagggcgggggccccgcgtcccggccgcccggcgcggcgctgggcgcatccctttgttgcaggttcgcaggggcgggggcagctggaggtgcggcccgcggggcacggcgcctccctcctcccgccccggggcccgggacaggccggggcgcgcagcctcaccttggccccgatctggttgccgcactggccggcctggatgtgcacgatctccctcatactgggcgcgtctggcgggcggctgcggacgggcgcgggcgggccgggctggctgctgagggtcggggaccgcggccgcgcgctcttatagccgcggccccgcccttcgcatcggctgatgtcaccgcgggtggccaatcgggaggcgccgccgcagagccccgcccggcccgcaggctccgcaccgcgcgtccccgcccgccgcgcgcaatgcggcgcccctcccgcagccaaggatcccccagcgctgggccgggcgcggtctgagggccccgcgcattcgaaaggaggggctgtctcccagaggagctggctgtgggggcgccgggctccagggaggacaatggcccctcttggccctgggaaccccgcccccagctaccctctcggttccgcccttgcgacagccccaccctgcggctttgtacggagggtcttttttccccacgccggtttagagaccaacccgcaccatcccagctccctgtcttttggcagacaaggtgctctgagcttttgccggttttgggtgggggaggtaggtaaaggctggcccaggccctgaacccactgagaagaaacaaagcgtcggatcagagctcggaagggcgcga

SEQ ID NO: 29804 - DNA, 2633 bp, Artificial sequence
  DNA replication origin
cccggcccagcgctgggggatccttggctgcgggaggggcgccgcattgcgcgcggcgggcggggacgcgcggtgcggagcctgcgggccgggcggggctctgcggcggcgcctcccgattggccacccgcggtgacatcagccgatgcgaagggcggggccgcggctataagagcgcgcggccgcggtccccgaccctcagcagccagcccggcccgcccgcgcccgtccgcagccgcccgccagacgcgcccagtatgagggagatcgtgcacatccaggccggccagtgcggcaaccagatcggggccaaggtgaggctgcgcgccccggcctgtcccgggccccggggcgggaggagggaggcgccgtgccccgcgggccgcacctccagctgcccccgcccctgcgaacctgcaacaaagggatgcgcccagcgccgcgccgggcggccgggacgcggggcccccgccctgggactctcgcctgcacctctctgcccctgcccaggtgacctcgggctgtcgaggcgcagctcacgtcagtcgcgaagcctcagccccctccacacctgcgccccctccacacctgcaccccctccaccgggcctccgcaggtgcagctgggagccctgtctgggcgtggccctcttttttggggccgcggcatagccttgagtgagacgggtggggtaggcaggtttgggtggggtggggggttctcctcacagccgtgatttcctcggcccgaaccccccactggagtagccgaacgtcccccgagaggctagagccgccccgatttccccagcctgctccgacacccctcggcgtcctagctccaccctgtccctttgttggaggggttgggcctggactcgagatgaccttggtccaggaccaggctctccatcggcgcagccgctcctgggcaacccccgcggggcttgaccgcgcccacccagggtctaccagtctggggattggatgtgggaacaaagccgggctgtggggtgtggaggctgcaccgtggcgcgcccctccctccattgttagcccacctcgcagatgttggggccacgcagaaaggggcgttggtgcagctgtgcagggacccctgcctaaatcattaaggggacgtcgtgtcccctggtcctgggaggctgtccctggcccaaggtcacacagcaggtgcgagagagctgggctggcccttggttctcatcccctgcaggagccaacctggggctcgggcggggcgggttgggggcgctgcttgccaaaggatctgccctccgaacagtgttggggaacaggggatcggggggggaggctggctttgtcaggaccaaggccagggacccagctcagggctggtgcagcgctgattctgggaaggagggggtgcaggagacggtcctggaggggaaggggccagagaaaggcagcctccggaggctgttgccatggaaaccaggcaggaacaaaaagctaattacaacagggccagccacgtggctgacatgtaaattgcaactttggctccgggtggaggcgcctctgagggtgggaggcccagtagtggggagactctaatcacccaaggagacagctgtgcctgccaaggagagcctgggggaggggagacctgggggacagtggcctcaaatcaaaccaggactcccggagcagcctctgacagctgccttggcctgatgggaggggctgagggctcattaatgtggtcactggggccaagcctcccctgagcatctgctcctgggagggtcaggggtcgctggggggagggagggcaggcagccctggggctcctgggagggtcaggggtctctggggagagggagggcaggcagccctggggcccacctggggtttctccttctatggctgggatgggcccagagctgtggtcccacaaggcacttgtcaggcaagagctgggatctagaagtcaggtgcacatgcagacatcccctgaggctccacgggtagcagagggagcccttgtcccctggaccgtgtccttggctgccttgtgctctgcttctgaacactggagctcttagtttgcccgctactttttattccttttgagttgtttgttttttcttaatatatttctttttaaaaattaatacctggccgggcacggtggatgaggaatctcatgtaatcccagcactttgggagactgaaactggaggatcactttagcgaaggagttcaagaccagccgggataacatggtgaaactccgtttcttaaaaaaaaaaaaaaaaaaattagcctggcgtggtgggccgcgcctgtagtcccagctacctgggaggctgagatgggagcattgcttcagcgtgggaggtcgaggctgcaatgaactatgaccgcaccactgtactccagactaggcgatagagtgagatcctgtctcacagtaataatagtatctgattctttttaacaatgaaagcaacagagaaggaaattttctcgggggcgggggcggcaagagcgtgttcctttgctctgctgcccttgtggaatcaatgggaagttccttggccgttctcggcctccactcccgcagctgatagggggtgcaacgcggctgct

SEQ ID NO: 29805 - DNA, 1533 bp, Artificial sequence
  DNA replication origin
agtgagggctaaaaggcttcacaagggaaagggcctggctggggctatgggccggtgccgaccccccctctcccactttgtttgcagttctgggaagtcatcagtgatgagcatggcatcgaccccagcggcaactacgtgggcgactcggacttgcagctggagcggatcagcgtctactacaacgaggcctcttgtgagtgcctgccccagcctccctatcccagccctggactgaccaggtctcagcgtctgactgaccaggtctcagcacctggactcaccagctctcagcatctctgtcctcccatgggttaggttggctgagatgccagcaggcgtaactggatgtcaggcatccagacgcacagaacagacaataaatcacagtcacaaaagtgagagccaaacatattagtgccatgagggcctgtgcgtgtccaggggcacagacagggatggggcaggccagagactttggaggccataagagggcctagagaaggggtcacctggagggcttagtcaggggctctttagcaactggtgtgaagtgatttccatatcaaagtggtgatacacccacctgcccacatggacatgtgatttaaaattttatttaatttaatagagacagtctcgatatgttgcccaggctggtctcgaactcctggactcaagcgatccacctgccttggcctcccaaagtgttgggagtgcagacacgagcccctgcatctggtggacgtctgactgaatcctgcctgtcctgctccgtcctgtcctgctccgtccttaaacacagtgaggcttaagggtgaagaaagttgctgaagcttgcctttggtccaggactctgacttcagagtacaggctcttaggatgtgagcaggaggatggcaggcgggcacagaattcagaaagaatgagggagaggctctggccctctgtgacccgaatcaccgagcccctctctcccctcagctcacaagtacgtgcctcgagccattctggtggacctggaacccggaaccatggacagtgtccgctcaggggcctttggacatctcttcaggcctgacaatttcatctttggtaagttccccctgctccaagctctgatggcagaccccatcacaggcaagcccaggtcggtggacggggacggctgtgagaaacaaggaatggtcagctcctcacatgatcctgaatggtgggaactcatctctccattttacagctgggcattggaggcccagagaaagggttctgtggggagaacagaaaccactcatgcatttcaagtggaatgaagtgtaaagcagacagaagcttacagaattgctagagagctggtgagacagaacggggcctccagaggactccggggtccaggagcacgaggccttgctgcggtcaagagatcaggacgttcccatgcctgtgtcctggggttgggccgtggatgccacgttcccatgtctgtgtcctggggcggggccgtggatgccacgttcccacgtctgtgtcctg

SEQ ID NO: 29806 - DNA, 1452 bp, Artificial sequence
  DNA replication origin
cctcggccgtggcgtcctggtactgctggtactcggacaccaggtcgttcatgttgctctcggcctcggtgaactccatctcgtccatgccctcgcccgtgtaccagtgcaggaaggccttgcgccggaacatggccgtgaactgctcggagatgcgcttgaacagctcctggatggccgtgctgttcccgatgaaggtggaggacatcttgaggccgcggggcgggatgtcacacacggccaccttcacgttgttggggatccactccacgaagtagctgctgttcttgctctggatggccagcatctgctcgtccacctccttcatggacatgcggccccggaacacggtggccaccgtcaggtagcggccgtggcgcgggtcgcaggcggccatcatgttcttggcatcgaacatctgctgggtgagctcgggcacggtcagggcccggtactgctggctgccccgggctgtgaggggggcgaagccgggcatgaagaagtgcaggcgcgggaagggcaccatgttgacggccagcttgcgcaggtcagcgttgagctggcccgggaagcgcaaggaggtggtgactccgctcatggtggccgataccaggtggttgaggtccccgtaggtgggcgtggccagcttgagggtgcggaagcagatgtcgtagagcgcctcgttgtcgatgcagtaggtctcatccgtgttctccaccagctggtggatggacagcgtggcgttgtagggctccaccaccgtgtctgacaccttgggtgagggcacgacgctgaaggtgttcatgatgcggtcgggatactcctcacgcaccttgctgatgagcaacgtgcccatgccggagcccgtgccgccccccagcgagtgggtcagctggaagccctgcaggcagtcgcagttttcacactccttccgcaccacatccaggaccgaatccaccagctccgccccctccgtgtagtgacccttggcccagttgttgccggccccactctgacctgtacagggagaagaggggtaagagacaggggccagggactctgcagtccagacctccagcccctgcctgaacatcccaagggcagccgtggcagccccatgcctgttctgtcttctgtaaagtaggccccactgagcaccccttctcatacccgccgtggcttccctgagccgatgctgctgagtgctcaggacgagggctctggacagagtcttgagaacttggggtcacagcagagcgaggctctgcctcctgaggggatcctgggtgaatggatcagccctcctgctccagcataccttccttccgactggcagtgccaggagcccaaacagccaccccagaatccctggcagctgggggctggatgcgagttggcatctaccagctggatgtgctgcggtcgggaaggcagaagtgaagcgaggccctc

SEQ ID NO: 29807 - DNA, 1409 bp, Artificial sequence
  DNA replication origin
gacacggtggtggagccctacaacgccacgctgtccatccaccagctggtggagaacacggatgagacctactgcatcgacaacgaggcgctctacgacatctgcttccgcaccctcaagctggccacgcccacctacggggacctcaaccacctggtatcggccaccatgagcggagtcaccacctccttgcgcttcccgggccagctcaacgctgacctgcgcaagctggccgtcaacatggtgcccttcccgcgcctgcacttcttcatgcccggcttcgcccccctcacagcccggggcagccagcagtaccgggccctgaccgtgcccgagctcacccagcagatgttcgatgccaagaacatgatggccgcctgcgacccgcgccacggccgctacctgacggtggccaccgtgttccggggccgcatgtccatgaaggaggtggacgagcagatgctggccatccagagcaagaacagcagctacttcgtggagtggatccccaacaacgtgaaggtggccgtgtgtgacatcccgccccgcggcctcaagatgtcctccaccttcatcgggaacagcacggccatccaggagctgttcaagcgcatctccgagcagttcacggccatgttccggcgcaaggccttcctgcactggtacacgggcgagggcatggacgagatggagttcaccgaggccgagagcaacatgaacgacctggtgtccgagtaccagcagtaccaggacgccacggccgaggaagagggcgagatgtacgaagacgacgaggaggagtcggaggcccagggccccaagtgaagctgctcgcagctggagtgagaggcaggtggcggccggggccgaagccagcagtgtctaaacccccggagccatcttgctgccgacaccctgctttcccctcgccctagggctcccttgccgccctcctgcagtatttatggcctcgtcctccccacctaggccacgtgtgagctgctcctgtctctgtcttattgcagctccaggcctgacgttttacggttttgttttttactggtttgtgtttatattttcggggatacttaataaatctattgctgtcagatacccttgcttggtgccagagatgtccttttattctggaaagttgtgtccagtaggtggaggggctgacagggaggcccgggtggacaggcaagaagagctcatcctctcccaggctggcggctgagagaggcctgcgctgggggccggaatgtgtctcaaggcacagcccgtggggagaccccggaaacgggaagcccgggagaaggaacgggaagtacctcattccagacctcaagatgcagccctcccgacttggaaataaccccacactcgttccctggcctcccacagagcgg

SEQ ID NO: 29808 - DNA, 1765 bp, Artificial sequence
  DNA replication origin
cttggaggagggttcccattgcttctgtagacactggttcagatccacaaccggttctaacatgcatttgggcagtgggccacctgctgggaggaacctccttcctctcagggccagcctcaaccggggacccattcctttctcagtccatgcaaggaagcaccctctgtgtccaggcactggccattaagcagcaaagaaggccaacaaaatgctgcctacggctctttgcttctggtggttggggctggggggcagaaataataaagaaaaatgtgcaaaaccgaagacatcagacagtgacgagtgattagggagaaggtgagtgagtgaggggaagggccctgcctcccagagatcactgaggactgctgagcagaggcaaggaggaggtgttggggttactggggaggactgctccacagaggctcagccaggcaggggccccggtgggggtgggcctggcttgttggggagacgagccaggaggtgaaggtgggggtgggggtgggcctggcctgttggggagaggagccaggaggtgaaggtgggggccgacttcttcccagggtccctctcactgccaggctgaggatgtactgtggggcccaggtgggagctgagatggggaaggcctttccagaaggaggagctgggagagaggccaggtggacgtggaatctctaggactggggaccttgaagcagcagatagagcggcggctcagggcagtctccctccaggtctgagtgcatggagggacacggcgtccgaagccaccctaagctggggtggaatctcactgcaccctttctgagcgatgtggccttgggggggccgatggagttgcctgtcctgtaggtgactgctggcccccaggcttccgtagggttaaatgagatggtgttggcaacacgccccccaaaacctggccataaactggtcccaaaactggccataaacaaaatctctgcagcactgtgacatgttcatgacggccatgacgcccacgctggaaggtcgtgggtttaccagaatgagggcaaggaacacctggcccacccagggcggaaaactgcttaaaggcattcttaagccacaaacaatagcgtgagcgatctgtgccttaaggacatgctcctgctgcaggtaactagccagacccatccctttatcttggcccatcccttcgtttcccataagggatacttttagttagtctaatatctacagaaacaatgcttatcactggtttgccgttaataaatacgtgggtaagtctctgttcgaggctgtcagctctgaaggctgtgagacccctgatttcccactccacacctctctatctctgtgtgtgtgtgtctttagttcctctagcgctgccgggttagggtctccccgaccgagctggtctctgcaaggtggtgtgtggctcccacttgggaggcctccagttactggcactgtcatcaccatgcccactgaacaaagtggaccaagccccagaggcagccaaaaccacacctttctgcagggagggtaaactgagcccgcgagctcagggcaagcgcaccaggcgcatatgctggccttcatctgtcctcagctcctccctgcgggcacaagcgggggcagctgaatcttccacgcgagaagcctaagagtagggatacgggggcggggagcagcaggcctgctctgtgtgtaaacaacgggaaagcaggaataacgccagggcccgcggacaccagctgcctccgaagtc

SEQ ID NO: 29809 - DNA, 1392 bp, Artificial sequence
  DNA replication origin
gggacggggccggcggggacggggccggcggggacggggccggcggggtcggggctgggagggacggggccggcggggacggggtcggcggggtcggggctgggagggacggggccggcggggacggggccggcggggacggggccggcgaggtcggggccggcggggacggggctgggagggcggcccgcccggcgcaggggcctcgagacctcggccgccccaccccggggacgccgccgctgctccggcgtccacaccagctgcgtgcggagcacccgggcggctcaggggacccgcgtggccgtgcccccgccctgggctgctccgagcctcagtttccccctcggtggaacgggtgggtgggagagacctgcccccgaggagcccgggagaccgggcgagctcccgcgggtgtggtgggtggggaggcacagtgctggggtggcttctccctgcagcaggtgccgaacccacggccaggcttccgtggccagcagccctagaggaatggccatcctgtccctgcgagcccctgggccctggcaggcgatgcaggtatgggcagacaggacgctgttgactccgcacaccggggtgacttctcaggttctcggggtggcagctgcagtgatgacaccgcttcctggtggtcacgccgcgggcaggacgcgggaggccaggtccgtgcatcccgcgtgtcctgagcttcggcccagggtccctccgtgccccggaaccccgccggctttcttcggcttcctttcattgctaagttgtggggtcctccccgatgagagcagtgggctctagaggaggggcagggggtggccagacctcttgctttcactcttccacttcctgcccgctcctttctgaggccaagtcccacatctgggtgcagaactggtggggtgagcctggtgagaggggcaggctggcgttctgctcagagtcggccactgtggccggcatccccaggtctgtgtgagcagaagctaaggctgcgaggccagcggcctcccctcattcatcccctgcccgtgcgccaggcctggggctggcactgactgtcagtaaataggcaaataaaagatgccttttttcacagcccggaggagagctggtagcctagagtacagctgctgggcagaacggaggtgtccctgccagcgtgccttccttgacgctcctctggccatgttttaaacaccaggaggtttccagcggcttccccaggcgtagctcctgcacctttttcctgggctggtcaccatatgtgatgacagtgccagtctgttctgagcagctctgggctcctggcttcactgacatcataaacaagtccttagcccttccatccaccccagaaagtaggtgttccccctgatt

SEQ ID NO: 29810 - DNA, 1099 bp, Artificial sequence
  DNA replication origin
aaagggaaaggacctagcacgtgttagggtggagtgaatgtgactttagggcagaatgtaaaggcatcacgtgactttgttttttgtttttgtttgtttttggtttggttttgtttttgagacggagtctcactcaatcgcccaggctggagtgcagtggtgcaatctcagctcactgcaagctccacctcccgggttcacaccgttctcctgcctcagcctcctgagtagctgggactacaggtgcccgccaccacgcccggctaattttttgtattttttttagtagagacggggtttcaccgtgttagccaggatggtctctatctcctgatcttgtgttccgtccacctcggcctcccaaagtgctgggattacaggcgtgagccaccacgcccagccggcgtcacgtgacttttaagcaaaaacttgaaggtcagggagcaagccaagacaatatgtctggaggaatgttctggtgggggcagccctgtggttgatgtgtccagtgccttaaggaggagcagagagccaggtgtggctgcagctttgtgtctggaggactgttccggtggggacagtgctgtggttgatataaggaggagcagagagccaggtgtggctgcagctctgtgtctggaggaatgttccggtgggggcagccctgtggttgatataaggaggagcagagagccaggtggggctgcagttctgtttctgggggaggtgggctcagaggtggctggggcttttctttaagtgcagtgggggccacaagtgggtgctggacatacttgagctttaataggttactgtggctgctgactgagcttggactgagagggaggtgactgagaagagggggatgactctgattgggctggggtaggtggtgggagtgaggagtcgctaagggcagtccagctgaaggtttggaaacggaatgtaacagattagaaaatagtctgactgagtgcggtggctcacgcctgtaatcctagggttttccagtgcaaagatgggaggatcgcttgggccctggagtctgaggctgcagtgagctctgattgcacgactacactccagcctgggcaaaaga

SEQ ID NO: 29811 - DNA, 1028 bp, Artificial sequence
  DNA replication origin
tgatgccgatgcccgatttaagataagtctaaaggcgctggctatccccttagggcccagctgtctgggcagggcgaggctgcgctggcgatcaaaccctcgaacggtcaggcgacggcgtggacacccaagacggggccccagccggcgccgcgcccctgccgcgcctgcgcgagtcctccctgcgctcgcggggccctaggaccgctctcccattgcgcatgcgcgcgcccgggcggcgcgggatctgggtctggggatgtggtaccggctgctggcggcggccggcagtagagcggtggccaggccgctggccttgctgtggcgatgtggtggcccaggaggcggcaggacggccaagaccagcgcgagggccctgggcaaggcccgacaggtgagcggggaggcgctctccgccggtgccgggcggctggtctgctctggacgccgcgtgacgccattcgcctgcgccggccgcgggggagcgcgggagggcggcggccctgacctggtccgcgcagtgaggccgacagcacctggccagagcttcccgcccccccgcctcctccgtctccaaactcctgctcttctcctcgctacctcttccacccacttcttgcggaattcccgctgtttactggatgcccggtcccctcggacatcggaaccgggacctccagcctccttgctcggctttgtaaagcgccgggcgttgagcgatttgcgcttgagtcccacctcctcgcgaaccagctttgtggccccgcgtgccagcccgtgtcctcctgggctcggcggcgttcggctttatccacctcgcagttactcagtgaaccagacacgataagaggcgtgaaagggttttgcaaactgttctttatacagcgaccagtcactgtcgttaacagctaatgctgagagctaagggctttacgcggattatctaagtcttatacccgccctataggtagatatcgctataaccctattgttatttattatattatttttaaaaatttgggagcggg

SEQ ID NO: 29812 - DNA, 893 bp, Artificial sequence
  DNA replication origin
tccccaggctcccttttgggcagccctgacccatccttccaggtgctgggggtccctgcacacaaccctgtagctcccatgtagtacctgacacttggtcgttcttttggttttttttgagacagtcttccgctctgtcgcccaggctggagtgcagtggcgcagtctcagcttgctgtaacctccacctcctggcttcacaccattctcctgcctcagcctcccgagtagccgggactacaggcgcccaccaccacgcccggctaattttttgtatttttagtagagagggggtttcactgtgttagcaaggatggtctcgatatcctgacctcgtgatccgcccacctcggcctcccaaagtgctgggattacaggcatgagccaccgcccccggccgacacttggtcattctaagcttccagtggctctcatattatcttggatttccgctgcatcgtatgttcttaaagtaattatgaacacaagggcaaagaccagatgaaatactctgtgcgtcccaggactcagcacagaagtcagtgttgctaagcgtggatcctgttttcgtgttttcacttcctgggtttgtcattgctctgtcttctgcggcccttctgccctgaattggaaactgaaccgagagagagtacaaatccagtaccagctttagccaggagggtgtaaaaattggaatcgtagtggtgtgggcggtttctttgagacgtatgtttaagcacagagtaggggctgcagtggggtgagagaaggtgaggcaggtagaattctggagattctctctcagattctagtggcagggcccgaagtgcctgtggtctcctgctggatggagctcccggatgtcatctgggtgctgtttattgctgacttgg

SEQ ID NO: 29813 - DNA, 1034 bp, Artificial sequence
  DNA replication origin
ccgccccacgtgcacgtaaaggtggcccgggccaggggagggagtcacagaagtcccgccccacgtgcacgtaaaggtggcccgggccaggggagggagtcacagaagtcccgccccacgtgcacgtaaaggtggcccgggccgggggagggagtcatagaagtcccgccccacgtgcacgtaaaggtagcccgggccaggggagggagtcacagaagtcccaccccacgtgcatataaaggtagcccgggccgggggagggaatcacagaagtcccaccgcacgtgcatgtaaaggtagcccgggccgggggagggagtcatagaagtcccaccccacgtgcatataaaggtagcccgggccgggggagggaatcacagaagtcccaccgcacgtgcatgtaaaggtagcccgggccgggggaaggagtcatagaagtcccaccccacgtgcacgtaaaggtggcccgggccaggggagggagtcacagaagtcccaccccacgtgcatgtaaaggtagcccaggccgggggagggagtcacagaatcccaccccacgtggtggtaaaggtggcccaggccaggggagggattcactccccagcaacggagtcgctctcaacacactcctgtcccagaggccactggcactggtcctggggaggtaccagatgaggccaaaactcctgcccactgtcattactcatgaaatggggtggccatggagcctgaccagggctgacatgccttctgccaggcccacgggtctctgtgtgtttccgtgctgggctctgaggggagaagcctggacctcccctacatgaaaattctcagcaaggtgtcctatgaccatggacccagaaacggcctcagtcagtgatgtatcttctgggaagggtgcacagctactggcaggtacacgcattccaccccattccaccttcccttctggcagagggagggaggcaggcaggctgagaaatacaggggctgaaggctcgtgtccctgcagggtgcacagaccgctacagcac

SEQ ID NO: 29814 - DNA, 759 bp, Artificial sequence
  DNA replication origin
cagcatgcagcacagggctggccagggacgcagctggagctctcagccatcacctgtcagcctgttcctgatcatggcgtggagatgggaaccagggatcccggttcagggcccagcagagggagcaggaagtccccacttgctggcttaggttccctgggtcctgacctggggggacgtggatctctgaaggaaggtgggacagaggtggcgtctccccttgtagtccccctctcactgggcggggcccctcatctagacgaaggctctgattcattcattcacccaaccaagacttccgaatcaccctctgttctggggacatggcatagacaaaatagatgattcctgcccttctgagggacggccagtgccagtgagcagtgcggggctgtgctcccattttagggggcatctggggagggtgctctaccaaacttggaggaggagcctggaggtgggagggagccgtgtgatactgggtggggcggggggggacatgcataaaggcctgagcagagtgcatttgaggacagctgggggctgtgaggcagggcaggggtggtgtgtgcaggtcgtgtggagatcgtcaggactttggtttctatactgagtaagctgagagaagccgttgaagggttttgaatggagtgggacagcatctacctgaatttttaaattattattattattattttttttttgagatggagtctcgctctgtcaccaggctggagggcaatggcgcgatctctgctc

SEQ ID NO: 29815 - DNA, 969 bp, Artificial sequence
  DNA replication origin
ctggggacatggcatagacaaaatagatgattcctgcccttctgagggacggccagtgccagtgagcagtgcggggctgtgctcccattttagggggcatctggggagggtgctctaccaaacttggaggaggagcctggaggtgggagggagccgtgtgatactgggtggggcggggggggacatgcataaaggcctgagcagagtgcatttgaggacagctgggggctgtgaggcagggcaggggtggtgtgtgcaggtcgtgtggagatcgtcaggactttggtttctatactgagtaagctgagagaagccgttgaagggttttgaatggagtgggacagcatctacctgaatttttaaattattattattattattttttttttgagatggagtctcgctctgtcaccaggctggagggcaatggcgcgatctctgctcactgcaaactccacctcctgggttcaagggatcctcttgcctcagcctcccaagtagctgggattacaggcgtgcgccaccatgcctggctaatttttgtatctttagtagagatggggtttctccctgttggccaggctggtcttgaactcctgacctcatgatccgcccgccttggcctcccaaagtgctgggattataggtgtgagccaccgtgccgggccaatacctgcatttttacgacgaggccagcaagggcacagtccagagggaggtaagtctgcaggcaccctctgcttgtgctgagatggaggtcccaagcaggacctcagccaaacagcaatccccttccccatcttgcactggagagggggcatgcgaatgccagcagtcctcattatagatcctggggtcccaaggggctacagacagcttctgggacaaagctctagccctgtggaagcttcacagcagccctgtgtggaatgaatatcatagttgactcttaagaagtatcctttcggc

SEQ ID NO: 29816 - DNA, 1431 bp, Artificial sequence
  DNA replication origin
ctgccgcagctgttggggcgcccgggccaggcgacgccgccgtcgcccgtgcccctcccagaccgcaccggccgcatggagcccccggagggcgccggcaccggaggtgagttcagccccagcccccgagacccccgcgcagcgcttccccgcagcgagccgcagcccctccccccagggctcacccttcgccgctcccgggagtcgcgaagacccctttggcagctcggggtcgtccggcgggccaggggcacctcccgggcgcggtccccgcgcggggctgggggcacacggaccgagtctccgcccccttgttctctgcgctcccggcccgggaagccgtgcccggcacgctccttggtgggtggcccggagtttcgtcctgagccccctcccagccaagccagccggtgacccggggagcgggggaggggggttccggggctggagtttggggtccctgtcggtggggcgtgagggcgacgctggccgcttgcaagcgcgtccgctttgttcgcccagccgcgagtcccggggggcgagggccgtagactcgcgggcagggatcctgccaggggcgaggggctgagatgggtcttggggatgtggggcatgcacgggcgcggcctgccggggactccagagctgcaagggtggctggtccgggagtggcccaggcgcacgctcatcggggagggtaggtgcgcgtggagcgctccctgccctgatggtggaggccctactgcaggaccttggagtcggtaacgggaagaaagctctcagaacctccccccttcccgatcagagacttttccaaaagggctttcggggttccatttgcctaggtaggaacttggatgcaaactgcagactcctccacctgcccagccaagcccaccacctcctggtttcctagagctcccattccagggagccagcaggtgcctgagggcacaggcaggccagcctgccgctctggaactacatgggaacctctcagtcccccagccgcacacagtggcatcctctggagcccgaagggctgtccccgggaggagcaggtccacccaccctgtgtatctgcagtccaaggtatagggacaaatgccccagggctggtgggtttgggttttgatttgtcatttgtgggagggaccagagctctttcttaacactgatagtcccaggctcctgggtattcccagtagcagctttgtggacataggaagcctggaggttgggagtgagggcttgggggtctccgagctgtttccagctgtgaactgtgggcagtcaggcccctgtgagcctcaatttccatttctgtcagtggagacagttctgcttcccctgcagggctgtgggagcccaaggcatttgggagtggaggttaatatgttttccctcctcctttgggaaaaaaggaggact

SEQ ID NO: 29817 - DNA, 1295 bp, Artificial sequence
  DNA replication origin
cgccctccgggggctccatgcggccggtgcggtctgggaggggcacgggcgacggcggcgtcgcctggcccgggcgccccaacagctgcggcagcgactcggccccggctccgggcgcagcgcatcggggcagcaaccggggggccgcggcggcagggaggagcccgcggggcggggcggggcgcgcagctgctcccgggccccggccccctcccggcgcccccccagccgcaggacaggtgcggccccgccccggcccgcgcgcgccccctgctggcccctggcccagcggacccctcccccgccgacccttccctcgcgggccgcgccccgccgcggacaccaccgggacctggctgcgccctcccgaccccggccgggcgtccggggctcctgcgcactcacttggcggccgcgcccgctggcgtcctcttgttctcttccaggtacttgcgtgtggggcgccgactgtgtgcgggcgcccctcggggctggcgaggggcacaggaggggcctgactcgcgctgggtaatgacagactcacagagcgccctggatggcgcgaattaacgcggggggcgggtgggggcgagggcgtgtgcttgggaggctggaaggggcgggatgggggatgggaggtaaggagagggcggcgggcccgggctgcagagagcgccaaggcagtttcgatgaaactgacccccatgtccctatcgcccagattcagcgattgccagctcctggcctgggccactgcttctctgtcctcattcacttccctccactgctgggtcattttgaagcaaattatatacacattagatcattgcatttgtaagtacttcaatatttatctctcaaagaaagtccgtttgcaggagcattgactcatgcctgtaatcccagccctttgggaggctgaggtgggagcacagcttgagctcaggagtccaaggctgccgtgagctatgattgtatgtctcaaaaaaaaaaaagaaaagaaaagaaaagaaaaagtctagtcttcataaacactcttgttaacccagcatccaggccttcactgagttgatgccgtggcctgaggcggtttacctggtggatagtgggtggcaggaagcatcagacatcagacagagggcagtcggtttgtttgtattaacatttgctctgggattttgcaggaaactcagatgccatttatctgggtttctgagctgcacagcttgacactgaatgaaagtatcttaagccacatatgtgaagaaaaggctcttttctaaaaatctgaactc

SEQ ID NO: 29818 - DNA, 1378 bp, Artificial sequence
  DNA replication origin
ctggccaggtggaggagcatgtcagccgcatccgggaggagctggaccgcgagcgggaggaacgaaactacttccagctggagcgggacaagatccacaccttctgggagatcacacggaggcagctggaggagaagaaggctgagctgcggaacaaagaccgggagatggaagaagccgaggagaggcaccaggtggagatcaaggtgagtggggccggcctgcacgtgctaacctggtcaccacagagccccagaggagctggatccagtgagggtgcaggtgggacattttctgttcttggctttgggagtcacagccttaaaggtgttttttataaaagcctgagggagagaccctgcaggtcctgagggtttaaaatgctgcctccacaacatggaaggaatatgggctctgggggcagactggcctgtttgcaactcagctctgccacttaataccccatgagctggggatgcacctcacctcccagccttggtgtcctgctctgtgcctcaagtgtacaggtttgcataggtgaacaggcatgtgtagctgtgtaaaggtgaggcatgcaagtgagcaggtggatgcaagtgagcatgtgtgtgcaggtgaggaggcgtggccaggtgaggaggtatgtgcaggtgaggtgtggggaggtgagcacgtggggcaggtatgtgcaggtgagcaggtaggtgcaagtgaccaggtgtctacaggtatgtacaggtgaggaggtgtagtacaggtgtagtgcaggcgaccaggtgtgtacgggaatttacaggtgaggaggtgtacaggtgaccaggtgtgtacaggtatggacaggtgagaaggtgtggtacaggtgtggtgcaggtgagcaggggggtacaggtatgtacaggtgaggtgtgttacaggtacggtgcaggtgatcaggtgtatacaggaatgtacaagtgaggaggtgtggtacaggtgaccaggtgtgtacaggtatggacaggtgaggaggtgtggtacaggtgtggtgtgggtgagcaggagtgtacaggtatgtacaggtgaggaggtgtggtacaggtgaccaggtgtgtacgggtacggacaggtgaggaggtgtggtacaggtgtggtatgggtgaccaggtgtgtacaggtatggacaggtgaggaggtgtggtacaggtgaccaggtgtgtacgggtacggacaggtgaggaggtgtggtgcaggtgtggtatgggtgaccaggtgtgtacaggtatggatggacaggtaaggaggtgtggtacaggtgaccaggtgtgtacaggtatggacaggtgaggaggtgtggtacaggtgtgctatgggtgaccaggtgtgcacaggtacggaaagg

SEQ ID NO: 29819 - DNA, 1157 bp, Artificial sequence
  DNA replication origin
ggttaacacggtgaaaccccatctctaccacaaaaaaattagctgggcgtggtcacgggcacctgtagtcccaactcgggaggctgaggcgggagaatggcatgaacccaggaggcggaggctgtagtgagccgagatcgtgccactgcactccagcctgggcgacagagcgagactccatctcaaaaaaaaaaaaaaaaaaaaaaaaaaagtgtgtggctttctgggtcaataactaccaaaccttcacccacagagtgggcctgtccaactccacggagcgtctgtgttgtgtgccctggtcccttatcagggttctgaataaccgtggctttgcccatagtcacttctggaaaacctcccatcattcttgccagctggtctttaaagtgtgcgcttctgctgtgattagaaagagcaggcccgaacaaggtggctcacaccagtaatcccagcactttgggaggccaaggtgggtggatcacgaggtcaggagttcaagatcagtctggccaagatggtgaaaccctgtctctactaaaaatacaaaaattagccgggggtggtggcaggtgcttgtaatcccagctactcgagaggctgaggccaagaattgcttgaactgggtaggtggaggctgcagtgagccaagatcgtgccactgcactccatcctgggcaacagagagactccatctcaaaaaagaaaaagagcatagcacgctgggtgtggtggctcacgcctgtaatcccagcactttgggaggtcgaggtgggtggatcacctgaggtcgggagtttgagaccagcctgaccaacgtagagaaaccccgtctgtactacaaatacaaaattagctggcgtggtggtgcatgcctgtaatcccagctactagggaggctgaggcaggagaatcgcttgaacccaggaggcggaggttgcggtgagctgatgccacgccattgtactctagcctgggcaagaagagtgaaactctgtctcaacaacaacaacaacaacaaacatagcgtgtgtgcatgagggtaatgagtctctgtgaccctgcacgggacgcccagcccacacagtgctgtcctaattgctcaggtgggacctggacccctcgtgtctcagcttttgtgaaggaccacacgactg

SEQ ID NO: 29820 - DNA, 1102 bp, Artificial sequence
  DNA replication origin
gtcgagggcccaggaaccggggcgcggaggagagcccagttccgggagaaccaccccaggggctggaactgagggcctggggggaaatggccatttcgtggggccgtgggcgggacagtgggtgtccccagtggggcaggggagccacagggattggtgggggagggtcggcaggcacaggctgcgctgtttacgtttggtgcctcatcagctgcctgggcacttccggtcacccttgccccctgtcccctgggcagctcggagaactctgtccagagggctgtttaagccccacagctggtgtggacgcaggattggtgtgggtaggcgggcacagggctccagaggctcaccctggcctccttctcctggcccagggcagcagcacggagcctccggacaacctactgaccacccacgtgctggacaccgcctcagggctcccagccagaggcctctgcctccgcttgtgctggctggaggaccacggccagcagtgggcggagctgaggacaaggtaggagagaggccctgggagggggagtgccgccctgagacagatggcggggactaaggggccaggcagtgaggctggagggcggagctcaccgctgccgaccctcctctcagcccgggttgggagtgaggttaggggctctctcttctgcttctctcagcccgtttcctcctctgaaaatacagggatgaggagaggagctctttcctccctccctccagcctcaggcccctgtgaccctgatggggtgggagtgagtttctgcctctccctggcagctgtgccagggcgagggcggggggtggtggtgaggtgaggcctgaggtggcatcgaagagctcactgagatcacgggtaaccttgtgccaggcagtacgctggacattatttccactcttttcattctccatacaccccgtgggccagcaccataattcacccttctacacatgggaagactgaggtagcaagcccaggtgcgtgctgggattcccagccaggcctgaggggcagtgtgtccctcagcctccatggggtcttgcccactgccccaggcacaggctctgcgcggcacttccagaggca

SEQ ID NO: 29821 - DNA, 2072 bp, Artificial sequence
  DNA replication origin
gccctgccggactgcgacgcccgcgggcaaagggaagggcggggccggtcaccccgccccggaccacctcgtgcccaccaggagggccccagcggggctttgcccaggaaggtgcgctggtggcgaatcagggcgcacagacctggggcccagaagcggagtcgcgaggacctgctggggggtggtgggggcggggacgggggcggggccgcggtgagaaggggcgggaccgcggtgagagggggcggggggcggggccgcggtgagatggggcggggccgcggtgagggggcggggccgcggtgagagggggcgggaccgcggtgagagggggcgggaccgcggtgagagggggcgggaccgcggtgagagggggcgggaccgcggtgagagggagcggggggcgggaccgctgtgagagggggcggggggacggcgggacggggggatggggggatggaggggatgggggcgggccaggtgggtcccaagaagacctgcgcgagactggggacggcgcggggcccatctctcccctgggaggctcagaggcccgcaggtttctcatggaagcccctcacagggtaagtttcccccgacaggccatgtgaccttgcctcggttttctcatctgtaaaatgggagcagtggtgactcctcagattgttgatatggctccgtaggtgaagctctctgagctgacctcccccccgcccttcctccccgcaacgcgcggtggatgagcgcagggtggaggcccgtgccctgcagaaagtgagaaaagccatagaactgcgtgtgccggcgagtatccatcgttgtattaaccttacgtaatatacagagaacacattttgactatatgttatatatgtgaagtcctcattagggaaagggaggcaggggaaagcaaacagagaaagcagacaagctactagtctgccttcttcatgctccaggacacacagccctccagacacacggcaaataacacattcttcctgcgccccagtctcaccagacgcctgaaggttattaacgcacactctccagcaaggctttgtttctgtgcagtcagtttctcttctgctggctgcccgtcttctctctggcaacgtattttcctactttctctagtaaatctgccttctcttacatacaactgtcttggtaaattcttttatcctcaagccactggcagtcgttcacctgccacaatgtattaatgaaataacggacattctctatttaaaatctgggaaacgctgcacccgcatgatggtggactggctgtcctgctctgggatctgggaactttttttttttttgagacggagtcacactctgtcgcctaggctggagtgcagtggcacaatctcggctcactgcaacctccgcctccttggttctagcggtgagtagctgggattacaaacgcctgccaccatgcccagctaatttttgtagttttagtagagatggggtttcactgtgttggccaggctggtctcgaactactaacctcgtgatcagctcgcctcggcctcccaaagtgctgggattacaagcgtgagccaccgcgcctggccgggaacttctttcttcctgtcaagctgcatttccagttcttgggtgttcggcatgggtgatttgtagattaagaattaggccattcaaaggcaagggaggagacccctctcagcaaaggttgggagtattctggctacaactaccttgggactagttaggaaacatctatttgggatccacacacacgacatttgttgtggcttctgtttataggagataatcctaaagagaggctcacaactgttatggcaaatgcccatgggtgccagaggccagagacaaccagactggccccagtggggaaaattccataaacgccagggtactctgcagccctttaaaaagcatgaggcccatttgtgtgtaagatgagaattctcctggaaaaacaactagtgacaaaggacaaaacagtgtgtaagaggggggaagcttgtaaattcgtatctagctttcactgaattgcaaggattagctaattc

SEQ ID NO: 29822 - DNA, 994 bp, Artificial sequence
  DNA replication origin
ccccgagcgcacggagtccatggtgcccggctccagatccacgagcacagcgcgaggcacgtacctgccacctgcgtggggcgggagggcatgagcgaggggagggccgcgttcccaggagggcggtgggggaaggacgggggtcgcaccgctggcctcgcggtggtgcacgttgacgcgctccagcggcaggtggctgtccccgtggtaggtgccagcggagtcgatggcatgttcatcagagatcacctcccagaactgcggagacgggaggggccagacaggccggggctgagtcacggaggcgccccagccgctctcccacccccacccgcacccccatccctaggccgccctgtccctggggtccaccccggccgcctcgccagccacccggttccaccgtccccggcagggagcccaggggccgcaatgcaggggcaccgcccccgccgctgccaacatcttccccggccacccggcaggcccgggctgggccctcagagccccggctgccaaccttggccccgatctggttcccgcactgcccggtctgcgtgagcacgatttccctcatggccaaggcaggattagggcggcagcagaagcgcgagaaggaggagcagacgcgcagcgacccagcccggcctccgccaacgcttaaatagccccgcgcccacctccctcagcctccgattgggctcccagaataagcaacagctttacttccacacaggtgcacccacctgtgaatcccctggcgttgaacgtctgttggagaactcaggtgtccttgcgtggtcccttccacgttggggaaagctgctcagctggagaacttcctcccacgtctttagtaagactaaatccctagctgagctgaaactgaattttcctcccatgtgggaggggaagacgcttgtttccatattcagagtgcctttgcacctgtcccagattgatgacatatttttgtaattgatgagtcttttca

SEQ ID NO: 29823 - DNA, 1008 bp, Artificial sequence
  DNA replication origin
tcaggtttatggttcgggttagggttcaggttagggtttgggttgggtttagggttagggtttagggttagggtttgggttaggggttaggggttagggttaggggtgagggtgagggtgaggatgagggttaaggtttaagggttaagggttaggggttagggttagggttaagggtcagggtcaggggttagggtcaagggttagggtcaagggttagggttaggggttaagagttaggggttagggattatggtttgggtgagggtgaggtgtgagggtgaggatgagggttagcgttttagggttatggttagggttaagggttagggctagcggttaggggttaagggttaggggtaggataagggtaaggattagggttagggtcagggtaagggtaagggttatggttagggttttagggttagggttttagggttagggttaggggttaggggttagggttagggttagggttagggttaggattagggttaggggttagggttagggttaggattaggggttagggttagggttagggtactgtaaataatttcacattattactaataataaattattatttgtattacactattacataatgtaaaggctattaagacatgtttgtcttcaaagaatggccttggtttctgtgggcagtgcctcctcatggaagggtaatgcattcctgctaaatcatggacaaaacgggcttccaggagctacaggctgcagcagcagctcctcctctaagtccttcactgcctcaaactcttgttgactttgtaagcttctttcagtctagttttttcaacagagctagtatttcatgaggttctactacataccaggttccagaaatctaaatgccttttgtttgttatttttcactaaatacaaatcacaactctctcctcattactcacacaacaaaatttagctgagggagattgagtgactttcctagggtcacatagctactaagagcagagccgtgtt

SEQ ID NO: 29824 - DNA, 1344 bp, Artificial sequence
  DNA replication origin
gagtctggagggtccactgtgaggcagaggctggcctgtagagtccaacagtagacagaagttgggcaaaaggctgatttgaggaagttttgggcttcaagagtcagccacgaggcaggcactaggcctggaaatggcctcacagtcatgagttgggcctaaatgggccactgtgagggaggagctgtgcctgttgaggctgctggcaggcaggcagaaatttggcctgggcagctgccacgaggcaagagctgggcctggaaaaagcccctgggaggcaagagcagggcctgcagaggctgttctcaagtcaaagctgggcctgttgatgccaccgggaagcagaaggtgggcctggagagtttgacttgaggaagttttgggcctacattggccgccatgagctggacaggaactgggccaaaaaaggctgttgtgaggcagcagttgtgcctgtagacccagccaagaggaagaggtgggcctggaaaagcccccatgaggcagaggttgggcctgtagacgctgacaggaggcaggagctgggcctggacaggtcaacttgagattttgggccttcataggccaccaggaggcagcagttgggactagagagtctgacttgagtaagttttgggcccggagatgacgtcctgggacaggagttgggcgtggagaggccaccgtgaggcataagctggatgtagagaggccagtgtgaggcaagacctgggcctgtctaggctgctgggagacaggcaggaatctggccagggaaggttgccatgagacaaaagttgggcctggaaaggcccttgtgaagcatgagcttggcctaaagaggccactgggtggcaggagctgggtgtgtagaagctgctgaaaggttgggagcttggcttggggggtccacagtgaggtagatgctgggcgtgaagaatctgctgtgaggcagacgttgggactgtagaggctgacgggaggcagaggctgggcctggaggggccaccaagatgcatgagctgggcctggtgaggtcgacttgagaaagttcagggcctggagagaaggctgggaggcaggagctgggtctaaagaggccattgtaacgatggagctgtgcctgtggaggctgttgtgaggcagtagcctcatctgcggaggctgccgtgacgtagggtatgggcctaaataggccattgtgagtcatgagcttggtctgtagaggctgactggagaaagttctgggcctggagaggctgccgggaggtaggagctgggccaaaagatgtaagcacatttgcatttattaggcactttatttccattattacactgtaatat

SEQ ID NO: 29825 - DNA, 1705 bp, Artificial sequence
  DNA replication origin
cgtgggaggggccggtgtgagacaagggctcaggctgacctctctcagcgtgggaggggccggtgtgaggcaagggctcaggctgacctctctcagcgtgggaggggccggtgtgaggcaagggctcaggctgacctctcgcagcgtgggaggggccggtgtgaggcaaggggctcacgctgacctctgtccacgtgggaggggctggggtgaggcaagggctcacactgacctctctcagcgtgggaggggccggtgtgaggcaaggggctcacgctgacctctgtccgtgtgggaggggccggtgtgaggcaagggctcacactgacctctctcagcgtgggaggggccggtgtgaggcaaggggctcacgctgacctctgtccacgtgggaggggccggggtgaggcaagggctcacactgacctctctcagcgtgggaggggccggtgtgaggcaaggggctcacgctgacctctgtccgcgtgggaggggccggtgtgaggcaagggctcacactgacctctctcagcgtgggaggagccagtgtgagacaggggctcacgcctctgggcagggtgccagaggcatgagttgggcatcaacaggccatcgtgagggaggagctgggccgtacgcgggctgctgggaggcaggcagggacttggccccgggaggccgccgtgggggcaagagctgggcctggagaggcccctgggaggcaagggcggggcctgcagaggctgttctctaaccagtgctagaactgtacaggccaccaggaggcaggaggtgggccctcagagcttggctggagaaagttcggggcctacaaaggcggttgggagctgggcaggagttgagccaaaagagcttgcttacttgctgggaggcagggccgggagagcccgacttcaggacaacttgggcctgcggcggtcgccgggaggcccaaccttggcgtggaggagcccaccgaccggagaccatttggggcctggagatgccatcggagggcaggagctcatcctggagaggccaccgtgaggcctgacctgggcctggggagcttggcttgaggaagctgtgggccgaccaaggccgccaggagatgggtaggcactgagtccaaagaggttgttgagaagcaggaatcgggcctggagacgcaaccaggaagaagagctgggcccggagaggatgcccggagggtgcaagtgggtctggagaggccgacttgaggaggttctgggcccggagaggccgccggaagggaaaaactgggcctggaaaggccgttgtcaggaatgagccccatgggcctgaagaggccactggcaggcgggagctgggcctgccgaagcggccgagaggcaggagctttggactcgggaggccgcagtgaggcaacagctagctgggcgtggagagtccgctgtgaggcagaggctgggcctgtgcaggccttcgggaggcaggaggctgggccttgtcgaggcctgcagaggccaccgaaagtcaaaagcggggcttgggaaggccgccgggaggcatgagctgggctgggccgaaagaggccactgggaggcaggaggagctgggcctggagaggctgccgaaaggcaggagcttcgcctgaggatgccacagtgagacaccatctgagtctggagggtccactgtgaggcagaggctggcctgtaga

SEQ ID NO: 29826 - DNA, 946 bp, Artificial sequence
  DNA replication origin
ccgaggccgggcccgtgcaggccttcgagaggcaggaggccgggcctgcaaaggccgcctggagatcaagttctgcgcctgaagaggctgccaaaagtcaaaagcggggcctgggaaggccgccgagagccatgagctgggctgggccgaaagaggccactgggaggcaggaggagctgggcctggagaggctgactcgaggaagttttgcacctggagaggccgccgagaggacggagctgggcccggggaggccgacttgctgctcttccaggcccacttccaggccgacttgaggacgacttgggcctgcagaggccgccgggaggctggagctaagcctggagagactgacttcgggacgatttgggcctgcggaggccgccgggaggcccaagctgggcctagaggagcccaccgaccggaggccgtttggggcctgcagatgtcatcggagggccaggagctgagcctggagaggccaccgcgaggcctgagctgggcctggggagcttggcttagggaagttgtgggcctaccagggccgctgggagctgggcaggagctgagtccaaagacgttgttgggacctggagtcgggccagagtccgccctggagatgcagccgggaggaagagctgggcccggagggggcgccgggaggctgcaagtgggtctgagaggccaacttgaggaggcctggcctctgcctcccgcattgcccagctgttcctcctggctgcatctcccacctcccagcaaacaagctcttttggctcagctcccgcctgcgtttgtagaccccgaagtttctgcaaccaagctcttcagacccacatcccttctcccagtgactgaacagtcccagctccggctggagaagggcgtctgcagaccccgctgttgcctcccaggggagtctccaggcccagctctcgccccaccg

SEQ ID NO: 29827 - DNA, 947 bp, Artificial sequence
  DNA replication origin
gccgaggccgaggccgggcccgtgcaggccttcgagaggcaggaggccgggcctgcaaaggccgcctggagatcaagttctgcgcctgaagaggctgccaaaagtcaaaagcggggcctgggaaggccgccgagagccatgagctgggctgggccgaaagaggccactgggaggcaggaggagctgggcctggagaggctgactcgaggaagttttgcacctggagaggccgtcgagaggacggagctgggcccagggaggccgacttgctgctcttccaggcccacttccaggccgacttgaggacgacttgggcctgcagaggccgccgggaggctggagctaagcctggagagactgacttcgggacgatttgggcctgcagaggccgccgggaggcccaagctgggcctagaggagcccaccgaccggaggccatttggggcctgcagatgtcatcggagggccaggagctgagcctggagaggccaccgcgaggcctgagctgggcctggggagcttggcttagggaagttgtgggcctaccagggccgctgggagctgggcaggagctgagtccaaagacgttgttgggacctggagtcgggccagagtccggcctggagatgcagccaggaggaagagctgggcccggagggggcgccgggaggctgcaagtgggtctgagaggccaacttgaggaggcctggcctctgcctcccgcattgcccagctgttcctcctggctgcatctcccacctcccagcaaacaagctcttttggctcagctcccgcctgcctttgtagaccccgaagtttctgcaaccaagctcttcagacccacatcccttctcccagtgactgaacagtcccagctccggctggagaagggcgtctgcagaccccgctgttgcctcccaggggagtctccaggcccagctctcgcc

SEQ ID NO: 29828 - DNA, 1081 bp, Artificial sequence
  DNA replication origin
gcagggggtcacgctgacctctgtccgcgtgggaggggccggtgtgaggcaagggctcacactgacctctctcagcgtgggaggggccggtgtgaggcaaggggctcacgctgacctctgtccgcgtgggaggggccggtgtgaggcaagggctcacactgacctctctcagcgtgggaggggccggtgtgaggcaaggggctcacgctgacctctgtccacgtgggaggggccggggtgaggcaaggggctcacgctgacctctgtccgcgtgggaggggctggtgtgaggcaagggctcacactgacctctctcagcgtgggaggagccagtgtgaggcaggggctcacgcctctgggcagggtaccagaggcatgagttgggcatcaacaggccaccgtgagggaggagctgggccgcacgcgggctgctgggaggcaggcagggacttggccccgggaggccgccgtgggggcaagagctgggcctggagaggcccctgggaggcaagggcggggcctgcagaggctgttctccaaccagtgctagaactgtacaggccaccaggaggcaggaggtgggccctcagagcttggctggagaaagttcagggcctacaaaggcggttgggagctgggcaggagttgagccaaaagagcttgcttacttgctgggaggcagggccgggagagcccgacttcaggacaacttgggcctgcggcggtcgccgggaggcccaaccttggcgtggaggagcccaccgaccggagaccatttggggcctggagatgccataggagggcaggagctcatcctggagaggccaccgtgaggcctgacctgggcctggggagcttggcttgaggaagctgtgggccgaccaaggccgccaggagatgggtaggcactgagtccaaagaggttgttgagaggcaggaatcgggcctggagacccaaccaggaagaagagctgggcccggagaggatgcccggagggtgcaagtgggtctggagaggccgacttgaggaggttctgggcccggagaggccgccggaagggaaaactgggcctggaaaggc

SEQ ID NO: 29829 - DNA, 1152 bp, Artificial sequence
  DNA replication origin
caatatagtggcggcacgccgcctgcaggcagctagggacgttgcagggccctcttgctcacagtgtagtggccgcacgcccgcctgctggcagatggggacactgccaggccctcttgcttgcagtgtagtcggggcacgccctcttctggccgctgggggcacgacaggatcctcttgctcacagtgtagtggcagcacgacccctgctggcaaccagggcactgcatggtcctcttgctcatggtgtggtgcccgtacgccgcctgctggcagctgaggacactgcagggccctcttgctcacagtgtagtcgtcgtacgccccctgctggcagctggggacactgccggaccctattgctgtcggtgtcgtggcagcacgccacctgcgggcagatggggactaggcagggcactcttggtcccggtgtgacggcctcctgcaccactaaagtcagagcgccagttattaagccccatcagttctgtaaattcaaactgaaacggagctattactggggagagctgatgtcccagttcttgtttaacttggaagaaacattttcaccaagaggcagtacaaagatggcagataacttcattgaaaagaaacacagtgtaaagagtttattgtagaaaaatagggaggagtgggctgagcgtgcattaaaacagcctaagagtcctgtgcagggaattttattttggatttcttcacattcctgcctctgtctcaagtctccacctgttttctttgtctggttttcctgctactgccttagctccccaacttgccccacttaggcttgtgggacctcctcactgttggttgaggtacatgtgtggtgatcaatacgaatccactctggcagcagcctccatcccgccatcccaggcacgctgacagcgatcacgtttgtacctactgcgcctgcctcttttgaatgtccttctctgccctaatctgtacttatggtgccaggtttctcttaagaatgtcccctttggccttatcagcatgtagctagcaatattctgacatttttattgcagagtgaatgattggggcatcttcagaggagttctagagtgtttctttctgcataggtacctcttttccctcctacccacaattgacaagtgcccatcc

SEQ ID NO: 29830 - DNA, 1915 bp, Artificial sequence
  DNA replication origin
aacatgggtggggagccttggtgaggggacctggtgaggggacataggggggccttggtgaggggacctggtgaggggacataggggggccttggtgaggggacatgggggggaccttggtgaggggacctggtgaggggacatgggggggaccttggtgaggggacctggtgaggggacatgggggggaccttggtgaggggacctggtgaggggacatgggggggaccttggtgaggggacctggtgaggggacataggggggccttggtgaggggacctggtgaggaggacctgggggggaccttggtgaggggacctggtgaggggaacatgggtggggagccttggtgaggggacctggtgaggggacatgggggggaccttggtgaggggacctggtgaggggacataggggggccttggtgaggggacatgggggggaccttggtgaggggacctggtgaggggacatgggggggaccttggtgaggggacctggtgaggggacatgggggggaccttggtgaggggacctggtgaggaggacctgggggggaccttggtgaggggagcatggtgaggggaacatgggtggggagccttggtgaggggacctggtgaggggacatggtgaggggacatgggggggaccttggtgaggggacctggtgaggggaacatgggtggggagccttggtgaggggacctggtgaggggacatggtgaggggagcctggtgaggggaacacggtgaggggaacatggtcagggggacttataggggtgtcctgttggggggacctggtggtgagatctggtgaggggatcaaaggcagaagccattgtcttggtcacatagacagaatctagaacctgtcatcccacagagccacattctagagtttagagtgggggacctctccccaattctgtaagcccatgaggagagaggaaggcctttctctccatgctccttttgcctaaccctaaccctaaccaccctaaccctgactctgaccctgaccctgaccctgaccctgaccctgaccctaactggacccgcacatctgagcctgcgtttccgtttccccgagagaccccggactccctcccccaaggacaggaacgcaacgcactggcagagctcgctgattggatgggggagagaagtgggcggagtgagcactaggagatcctgtcattggataagaaagagaagtgggcagggtgggcactggtagagtctctactggttggataggagcgagaagcgggcggggctagcactgagatcctgcaattggacgggcatgaagtaggtggggcgagcactgaggagaccctgccaattggacaagagagagaagtgggcggagtaagcattggtaaagcctgctgattgggcaagagacaggagtggtaggagcaaggactgcggagaaggctgctattggatgttagggaaaagagggcggaacaagaaggtggcgagctctgcagattggacaggagagataagcaggaggagcgagcaatgaatggagccagcggtgaaaagagccctgataactagacaggggagagcagtggaaccagaattcaggttacggtcacggtgacagccggaaaggaaattccagcatggatgccgaccgcaccaacccaaaactatgacccgagtcctaacccaccctaacccggccaaaaccgaacacccaaccctgactaaatgcgaaacgctgacccggacctggacctggacctagtacgaacccaagcctgaaccctaacccctaacccctaatcctgatcctagaccctaaccccgaccctaaaccctgaccctgaccctgaagggggacatagaggaaagagattgagaggtttgcatattcaatgacatacattttct

SEQ ID NO: 29831 - DNA, 1131 bp, Artificial sequence
  DNA replication origin
aaacaacgtctcgcctttgccacaaaatagcgttgggaaaatccaatgattaggacaaaagaagggcccaggaatctctctccagggacagaaagctctttgaatacctgctggcttgatctataccccatagcatgtccccatcctctgcctgtccgttggatgtaattccagatacctgaggccagatgtggacaagaaatccaaacataagacagcggtgaagaaaaaaaccctgaacccggagtttaatgaggtatgaggggctggtgaagcttcatgaaggccattcctctgccccacagcagtgggggtgtggctgggttttcaaaaggtcatggcgggatggggagggtggtcagagacggtggggaggggccgcaccaagccacagacacaggggagctgggggacccctggaaagctcttggcaggacttgtcggatgtagggctggggggagggaagtgttgaggggagtcctcggttcctcatggaggcaacagggcaaagagggggtgaggaagatggggagaaactctgtgtggggcaaggggactcgagacaccctggggccccaggaagtcttccgcccaaggcggcaagtacggctggaaatgcggattccccccaaggaacaagaaggaaagaagagcagaggggccttgggtagagcccacaccacaccagtgatccagaggcaggcaggggaggtcaagatgcttccagagagtgaggggaaccccggatggaagggagggtcccacagagaagggaggggtcagcaaagccaggccccagagaggcccaggatgacaaggactgtggggcgtgcagtgcctctgcagtcaggaggctcccggggtgtggggagagcaggctcagggacaaggagcaagcgggcgaggggacaggggccctgaagaccccagtggagctcagggggaagtgggcgagacatgtgagcatccacccatcatccactctgagcactgatcacccccatccctcctctgtccctacacctcatacccctcctggcccccggcggaggcccaggcccaggcatcagccctaacactcccttcttgccagcaggagttctgttacgagatcaagcatggggacctgg

SEQ ID NO: 29832 - DNA, 918 bp, Artificial sequence
  DNA replication origin
gtgcctgatatcgtgccacactctgcccctgtcagggcccaggcatcttgtgcgtctcccaccccagaccagggcagggcttggggcaggagaagccagggctggccctacctgcgcacacctccaccatgcccagtgcgtctgaggcactggctgtgcccctcaccaccgccccctctaggatctctgtgtgtgacgaggacaaattccggcacaatgagttcatcggggagacacgtgtgcccctgaagaagctgaaacccaaccacaccaagaccttcagcatctgcctggagaagcagctgccggtgagaggattgattgagcacctgctgtgtacctggctcggtggcaggtgctgggaaggcagaacttcctgcctgtgatgggactcatgaggggcagagtgagaggggaggggagaccggggaggtgagcatggagagtcaagggggtggaggtgaggaaggaccctggctttcactctgagtggccacgggagggtgctaagctgagggatcatgggggatgacattttaccaggctcgctggcctgggctcaggatggcttgaagaagagggaggagagggcaggaggcctggggagatggggagagatgggcacaaccctggcctgaccttggcagcggtaggagggcttgattctgaaccagatgtgcaggcagcagataggacgtccttgggtgagggaagggcagatccgaggtttggggcctgagccactgaagcctgaggggctgtttgctgcactcagaggactcagcagggaccacgggtggacaggacgcgcaaggagcacgcttggaacatgttagacctgagtgcctgtgagatacgcagaggagacagcagagtatcctttcctagaaatggcatttgtctcaacgttatgtcaga

SEQ ID NO: 29833 - DNA, 1222 bp, Artificial sequence
  DNA replication origin
cgggaagggcggagctgcgtcccggggagacaccagttgctgccggccgcgcggtcgctccccgctcgccagccgctccgggagggcctcgcggccgagggtcggggctggggcgagctggggaggggcccgaggctgggagcggcccggcctcccgcgtggtcccggcggcccgcagagcgcagctgctttgctggcgcgcgagcagaggaccaggaggaccgcggggccgcttgtcctttggaaaaaccttggcgtttcctcctccggtgtccatggaccccgccgcagccctcgccagggccgcgcaccttcgcccacctgttacgcccgcggcccccgggcagagagggccccccagcccgctccccctcctcccggactgagccctgagcccccgggagcaggcaagcgccggagtcccgggaccgaggcccggccggtgggcgctcctggcgccttttcccgtccccgagggtgcctgtccggcccgagccgggactggctgggaaaccgaggccggaagaggtcgcagtccagtgaggagtcggtttgcgcggggtggggatggcatgtgagaaccccctcctagctcagctgtggctccagacttgtcactgagacctggaaaaccagcgtctcgtcaaaccccagcccttcccgggatgtggcccttctccagggctggtgctgcccctcccctgcgcagcagggatgtctgcgcctggcctgggcactcaccagggcctgtgggctgcgggcctggagtttcccaagcatcaaatgtgccaccagaagctgaaggtagggattaccagtgcccccggggcacagaccccccatcgccccacctggggaggcccatcagcagtggccggttagagcagggcccctgtaggggaaactgcctgctttgcactttctagaggcctggaccacggccctcgggccagcgcctggcacatgaaggccctgccctggggcgtgggggctggggagcagtcttgtccctccactttcctgccagcttggggagattgggtcggaagagttttttgccctcagggctgtgccctagatccaccccccctcccctctgcccctggcaccctgtgcgaagctcaccctggacttggtgatcccctgggtgggccctgagtgggacccaagtaactgctttggctgccctgaatccaaagcctcccccagaagaacggatggg

SEQ ID NO: 29834 - DNA, 1283 bp, Artificial sequence
  DNA replication origin
cttggcgcagtacaacatatgccatgtgtttctccagtgttttcaaaggccggtagtgcccgccaccacccagttcagaactcaccacaaaacatgaatttctcatcacttctcaccatgagtcttgtctttccaaaggaagggagaagggaaagccagctgagcacctcttacctgtctgtgctggatggggccttgccacaaggctgtgcagttggaaatagcctcacttcatagatgaggaaaccgaggctcaaagaggtcaaatagcctgccagaactgtgcagctggaagccacaggccaaggctttgcctctctttcctctgctccccatcactctgcaggggttatggtgggggaacaagagaggcttggagcccctcattcagatgcaccaaaggcacccactaagaagctaagtgtcttacacatcagtggaaaccagagggtaaacaggattccatccatgcccagggctttccgggaacacacctgtccaagcagcagcagttcccaacagagctctggtcccggaaagccggacagccagggctgggccctctgggatttgtttagtgatctgaccgtgtgggaggcctagagtaggagtgggggtggggggagcgtgccgcccagccttattgcatcactcaccgcccaggccctgccctcactccctcctgaccaggccctgtgcaggttctcagccaccctgccccggggggtccttcagactgtactcactgaccaagtgagggactgacccgaggttagagtgctgtgttgtatgtgacctgagaatatgtgtgcacagactgagccccggtgtccttgtgcagttgagcgtgtacatgtcctgcccgtgtgtaggcaacctgtccctacatgctaggagtgtgactccacgtcctgctagagggggaggagagaaggagttgtgcccagggtcccctgatcacttctatgggctcatgtttgtgcatcttgttaggggtgcttgggggtagggaagcctgtgccctgggtgcccttgatcacctgtgtgtgtgctccatcaggtgtgcgcgcctgtgcattgggggtgtactgtgtcacagcttcctaaaacaaccatgtgcgcatgcagacgtttgcgtgtgtgacctacggtgtgagcgagcggatgcttccaccacgtgtctctgcacacgcatgtgtgcacttgcacacctgcgtgtgtcccgagagagcgagcggagcccagcgtgggctggcacgcgcgggaacgtgtgggtgcgcgtc

SEQ ID NO: 29835 - DNA, 777 bp, Artificial sequence
  DNA replication origin
ctgtggtgggagtggggagatggggggtactgaatgagttacaaggacccttcatccctgagtctttgactcggaatgcagacagcaaagggctccccgcactgacccataagactggtggagcccacggcatcagtagcctccaggggagtgtgataggagggtgaccccatgccaaggccacaggacagatgcaataggagccaccgggcctccaccctctgccccgtagggccccttcacaccaagagctccagccaggctcaaccacaagcagctccccaaacaccacactcctccccatgcccggcctcagcacgtgctgttccccctgcctggaccccttcctccttcctgcagctctttgcctggctaaccttttctcagccttgaggtctcaggactgaggccaacgcagtgcctcctgctcttgccttagggcagaagaggggtcagggagacagcgggtggggctgcagaggtgggggctgccgtgtggttaacctgatgcagacccccagccctctgaggaaggctgggcatgagcctgaaggccaggccttgtagagagtccgggacccctgggtcattgtcctgtgggttcaagggaacggaggactggcccagccctggcaggtgccaccgaggatggtaagcaaagctcagctcagctcgccctccctcctcacccacaaagaactatgctctgccacctgcagccttaacatgttgggcaagcatgccccttcatgggggcaggggacagctaactgtcgc

SEQ ID NO: 29836 - DNA, 1236 bp, Artificial sequence
  DNA replication origin
accttcagtgaggatgagcccccccatgggatggtttggtggcagaatattccaggaggaggccctggacagtggaaaggccccgaggtaggtggggctgtgagcctgcacaggtgtgaaagtggggagggtaggacaaaagcatgaaatgggctcttcctgagtactaagacctttctaccaaggccctgtgggaaggcgtgagccacagtcaccaccggggctgctggaagccaggtgcggtaggaacagtctccccgctggccacacaggggtggactttgagccctgagctagaaccccagagggagccgggagccctggccctgcctcccagttgctgtatgaccttggacagctcaggccgcctctcggcctccgtttccacattcgcagagctggtgaaagctctgccggaactcccgcctcagaatactgggccccaccctgggcctggagcctgggctccctgggaatgggtcctgcgaatctcccagggggtcccaaggcaatcgagttggaccccacagctcaagggccacaaagatggtgatgccccattcaggtcctcaagcaattcaaccccgttggggagacacacttggacaataatcacgaagcgtggtgaggcccacaagggtggccatgccaggggaccactgtggaaagcttgtcggaggaggcaacacctgagtggggtgttgagggcagcataggagtgtgccaggtggtcaagggtgaatgaggctgcccagcaggctgagccatccgagcaggggcgtggtggctggagctcaccagtgtgtttgggcgctgggctgtggtgggagtggggagatggggggtactgaatgagttacaaggacccttcatccctgagtctttgactcggaatgcagacagcaaagggctccccgcactgacccataagactggtggagcccacggcatcagtagcctccaggggagtgtgataggagggtgaccccatgccaaggccacaggacagatgcaataggagccaccgggcctccaccctctgccccgtagggccccttcacaccaagagctccagccaggctcaaccacaagcagctccccaaacaccacactcctccccatgcccggcctcagcacgtgctgttccccctgcctggaccccttcctccttcctgcagctctttgcctggctaaccttttctcagccttgaggtctcaggactgaggccaacgcag

SEQ ID NO: 29837 - DNA, 1706 bp, Artificial sequence
  DNA replication origin
cccacagcaggggcctgcccagatcagtcgctgcaccttcttcccaggctctgcttccagacgtggcatggcaaggctgggttccctagagcccggctcctgaaggcagaagtcaaggcttattcacctttgggtccctagttagctgtcaagaaatattgctggatcaatggatgcatggatgcatgggtagatggaggggtaggggatgggtcagtgggtggtggaggggtgaggatggttgggggatgggtggatggcaggtgagtgaggagatggatggaggtctggatgagtgagggatgggtgaggagatggatgggtgagtgggtggaggagtgggggatgggtagggcgatagttgagtggggaatgggtgggggaaggatgggtgggggaggggttaacggatggctgggtgggggaagggtgagtgggggcatagggggtagttggatggatgatgattgggtgggggatggtgggggtgggtgggtggaggacagatgggaggatggatgatggacagactgatggagcattggacagatggatggagagacaggtgcatagatattctgcatggaccaatgtgctgaaggacatctgagaggatggacagatgaacagaggatggaccagtgtcctgatgggaagaaggatgtgtggatggatggaaacactccaggcccagggcctgtgtgctctgcatccctagggaggggccagcagatcaggagccccaacctacacttcccagaagctgtgggtcctcggccaggagcactcagttcacagcagccacaggaatcctgggcagagcagctcttgagccctggtctctgtgcctcagcctggtctgcgtacctcagagggcccttgtgtggagccctggtctgtgtgcctcagaggccctcgtggggagccctggtctgtgtgccccagcccgcctcagtgacccccaacaaattccccccctatcaaaatcactatagctgtagtcccagctacttgggaggctgaggcaggaggattgcttgagcacagaagttggaggctgtagtgagccatgatctcgccactgcactcagcctgggtaacaaaacaagaccctattcaaaaacagtaaataaatgaaagaaaacccactgccacattccttatgctaataaggctagccagcccttaatgtgtgtgcagatgagatcttactcaaactcattcacacagaagtacaggcatgtgtcacctaacaaccaggatacgacagggatacttccaagagatgtgttgtcaggcaatttcatcattgtgcagacatcatagagagcacggacgtaaatctaagtggcagaacctacagcacacctaggctatgtgggagagcctgggctcctgggctacaaacctgtgcagcatgtagcaactgcgacaccgtggaattatgtgtgtagctaatcatagaaagggtacagtaaaaatacggtataaaagatgttttaaaatgacacaggtgtatagagcacttcccgtgaatggagcttgcgggactggagtcgctgtgggagagtcagtgtgtggtgagtgtgagggcccagggcattactgtccactcgtatgtgactggcagtgtaataggtgtgttcacaccagcatcaccacaaacgagtgataacgtgttgcactgtgacattacacgccgcaac

SEQ ID NO: 29838 - DNA, 1273 bp, Artificial sequence
  DNA replication origin
ggagtgaggtctgacggtggagagagggagtgaggtctgacggtggagagagggtgtgaggtctgacggtggagagagagggtgcgaggtctgacggtggagagacggagtgaggtctgacggtggagagagggagtgaggtctgacggtggagagagggtgtgaggtctgacggtggagagagagggtgcgaggtctgacggtggagagagggtgggaggtctgacggtggagagagagagtgaggtctgacggtggagagagagtgtgagctctgtcggtggagagagagtgtgaggtctgtcggtggagagagggagtgaggtctgacggtggagagagagtgtgaggtctgacggtggagagagagcgtgcgaggtctgtcggtggagagagagtgcgaggtctgtcggtggagagagagggtgcgaggtctgtcggtggagagagagggtgcgaggtctgacggtggagagagagggtgcgagctctgacggtggagagagagggtgcgaggtctgacggtggagagagggtgtgaggtctgacggtggagagagggtgtgaggtctgacggtggagagagggtgcgaggtctgacggtggagagagggtgcgaggtctgacggtggagagagggagtgaggtctgacggtggagagagagggagtgaggtctgacggtggagagagggtgtgaggtctgacggtggagagagggtgtgaggtctgacggtggagagagggtgcgaggtctgacggtggagagagggagtgaggtctgacggtggagagagagggagtgaggtctgacggtggagagagggtgtgaggtctgacggtggagagagggtgtgaggtctgacggtggagagagggtgtgaggtctgacggtggagagagagggtgcgaggtctgtcggtggagagagagggtgcgaggtctgacggtggagagagagggtgcgaggtctgacggtggagagagagggtgcgaggtctgacggtggagagagggtgtgaggtctgacggtggagagagggtgtgaggtctgacggtggagagagggtgcgaggtctgacggtggagagagggagtgaggtctgacggtggagagagagggagtgaggtctgacggtggagagagggtgtgaggtctgacggtggagagagggtgtgaggtctgacggtggagagagggtgcgaggtctgacggtggagagagagggtgcgaggtctgacggtggagagagagggtgcgaggtctgaaagcc

SEQ ID NO: 29839 - DNA, 2596 bp, Artificial sequence
  DNA replication origin
gccctggataagaaggacattgaggaaggtgcctgatcaggccttgggacgggtctgcacacataggcggccgcggcacgcaccccgggggaggcaggcaggagccgtcatgggaatggtctggtaaacatccccgcttcccaccctcagtgaaggattcccggagtcatttcccctgtggccgggccagcctgggtttatgctccataccctgagactgaggcccacctggccaccaccccacctcctcggacacttgcccgctgtgtggctctccctggtttggcctcccacaatcctgctggtcagcatcactcaatgtggacgtgattggaccctgcctcgtgtcgctgagcgagtgccttcacgcctccgtgcagcttgtcttcccggcaggtcggcatgttccgggagggagcctgtcttgctttttcaactgtaatatcttaagtagcttccatttgttcaatccgttcttctgcaaatagtcactgtgccgggcacagggagcaggagggtgaacagaaatagacgtggcctctgcccttgggaagatgacggcccagcaggggaagtcacaggagccctgcagccacacagcggagggtaaaatcacaaccttgacagcggagaagaggcaggagcccattctggaggctctcattgtggaaggagtgttgcggaagtcttccttgaagatgtggtgcttttgctgaggtccgaggggtgtgtaggttaatgaagagacagcgtggccacacagagggggcaacacgtgcaaaggtcctgtggcagaaggaccaggggctgacaaacggcccacacggctggagctcagagggtcggggctgaggaagtagagcaggaggcagggccggcccgaatgccgtatgaagtgaggcggtggtcaccccagagcagcgggaagcctctgatggcttttaagttgggagggatgggagaggtgacatgattagatttgcctcttgagaaaatcggcctggctgccatgtcgggaaccagctggaggacagcgcggtggggtagagagatctgctgggcggccttggtgtgggcgtgggcggtggcagcagagatcagggacggggctgaaggggaattgagaggttggagagagatttgagttcttggagatggattatctgggcaggaaggagggacgatgggggcccaggatgagtgctgggttgtggcttgtgtgactgatggatgctggctgccttcactgagacaggcatggctataaaggtctgaggttgccgcctacctaaccttttatggtgctgagcactttcatgaccgtctcccttgatcccctcatctgcaacctggggtgtgggggggcctgttaccaccaacttacagatgaggaagtgaggctcagaaggcgagtaccgagtccaagttcacctctaaacggcacaccctgctctctcctgccccaaagcctgtgtcccgtgggcaggtccctggggaaccccctcccctgtgttcttgggggtagagagaatatacatttctttgcaaaagaagcacatggagggactgagacaggagtggggagagagggtgcgaggtctgacggccgggagagagggagtgaggtctgacggtggagagagagggagtgaggtctgacggtggagagagagggtgcgaggtctgacggtggagagagggtgcgaggtctgacggtggagagagggtgcgaggtctgacggtggagagagggtgcgaggtctgacggtggagagagggtgcgaggtctgacggtggagagagagggtgcgaggtctgacggtggagagagagggtgcgaggtctgacggtggagagagagggtgcgaggtctgacggtggagagagagggtgcgaggtctgacggtggagagagagggtgcgaggtctgacggtggagagagggtgtgaggtctgacggtggagagagagggtgcgaggtctgacggtggagagagagggtgcgaggtctgacggtggagagagagggtgcgaggtctgacggtggagagagggtgtgaggtctgacggtggagagagggtgcgaggtctgacggtggagagagagggtgcgaggtctgacggtggagagagggtgtgaggtctgacggtggagagagggtgcgaggtctgacggtggagagagggagtgaggtctgacggtggagagagagggagtgaggtctgacggtggagagagggtgtgaggtctgacggtggagagagggtgtgaggtctgacggtggagagagggtgtgaggcctgacggtggagagagagggtgcgaggtctgacggtggagagagggtgcgaggtctgacggtggagagagggagtgaggtctgacggtggagagagggagtgaggtctgacggtggagagagggtgtgaggtctgacggtggagagagagggtgcgaggtctgacggtggagagacggagtgaggtctgacggtggagagagggagtgaggtctgacggtggagagagggtgtgaggtctgacggtggagagagagggtgcgaggtctgacggtggagagagggtgggaggtctg

SEQ ID NO: 29840 - DNA, 2425 bp, Artificial sequence
  DNA replication origin
aatctaataatgttcaatcaaaggggaaagcacaggacgtggggcttggtctccaggggttcctgagttcattcagcatctgtggaggacacagtggtgccaggtacgagcccagtgtgaggtgtgaggtgtgaggagtgctgatgggatgaagagacgtacaaacgccagcatgggatggaccacttgagcccaggtgatcaagaccagcctgggcaacatagcaagaccccgtctctacaaaaaaaaaaatacaaaaattagccgagcatgctggtgcacacctgcagtcacagctacttggaagaatcgtttgagctcagaaggtcgaggctgcagtgagttgtgattgcaccacagcactgcagcctgggtgacagagtgagacccagactcgaattttaaaaaggccaacctgagtggacacagcattaagtctgaccaggactgaagaacacctgtgcagaaatggacggcagagggaatgcacatcagtgtgggagggacagaggagctgcagaaatggatggacagagggaatgcacatcagtgtgggagggacacagatgctgcagaaatggacagcagagggaatgcacacagtgtgggagggacagagatgctgcagaaatggacgggcagagggaatgcacatcagtgtgggaaggacagaagagctgcagaaatggacgggcagagggaatgcacatcagtgtgggagggacagagggaatgcacatcagtgtgggagggacagaggagctgcagaaatggatggacagagggaatgcacatcagtgtgggagggacagagatgctgcagaaatggacagcagagggaatgcacatcagtgtgggagggacagagatgctgcagaaatggatggacagagggaatgcacatcagtgtgggagggacacagatgctgtagaaatggaaagcagagggaatgcacatcagtgtgggagggacagagatgctgcagaaatggacgggcagagggaatgcacatcagtgtgggaaggacagaggagctgcagaaatggacgggcagagggaatgcacatcagtgtgggagggacagagggaatgcacatcagtgtgggagggacagaggagctgcagaaatggatggacagagggaatgcacatcagtgtgggagggacacagatgctgcagaaatggacagcagagggaatgcacatcagtgtgggagggacagagatgctgcagaaatggacgggcagagggaatgcacatcagtgtgggagggacagaggagctgcagaaatggacgggcagagggaatgcacatcagtgtgggagggacagaggagctgcagaaatggatggacagagggaatgcacatcagtgtgggagggacagaggagctgcagaaatggatggacagagggaatgcacatcagtgtgggagggacacagatgctgcagaaatggaaagcagagggaatgcacatcagtgtgggagggacagaggagctgcagaaatggatgggcagagggaatgcacatcagtgtgggagggacagaggagctgcagaaatggacagcagagggaatgcacatcagtgtgggagggacacagatgctgcagaaatggatggacagagggaatgcacatcagtgtgggagggacacagatgctgcagaaatggaaagcagagggaatgcacatcagtgtgggagggacagaggagctgcagaaatggacgggcagagggaatgcacatcagtgtgggagggacagaggagctgcagaaatggacagcagagggaatgcacatcagtgtgggagggacagagatgctgcagaaatggatggacagagggaatgcacatcagtgtgggagggacacagatgctgcagaaatggaaagcagagggaatgcacatcagtgtgggagggacagaggagctgcagaaatggacgggcagagggaatgcacttcagtgtgggagggacagaggagctgcagaaatggacgggcagagggaatacacatcagtgtgggagggacagaggagctgcagaaatggatggacagagggaatgcacatcagtgtgggagggacagaggagctgcagacatgaacgggcagagggaatgcacatcggtgtgggagggacagaggagctgcagaaatggatggacagagggaatgcacatcagtgtgggagggacagaggagctgcagaaatggatggacagagggaatgcacatcagtgtgggagggacagaggagctgcagaaatggatggacagagggaatgcacatcagtgtgggagggacagaggagctgcagaaatggatggacagagggaatgcacatcagtgtgggagggacagaggagctgcagacatgaacgggcagagggaatgcacatcggtgtgggaggg

SEQ ID NO: 29841 - DNA, 1652 bp, Artificial sequence
  DNA replication origin
ttgacttattttttagggttggaatatccttgatatgtcatgtctatgaggcatccaagtcagacaataaacttggcagttctctataaggttcgaggtggagataaagtctgaggtttacaaagttaagaactaacaacgtaactgtatcgttaaggttggcggctcatgcctgcatcccagcagtttcagaggctgagcaggaggatcgcctgaggagtctgaggcagcctgggcaacataacaaggcccagtctccacaaaaaatgagaaattagccaggagtggtggcgcacacctgtagtcccagctgcccgggaggctgaggtgggaggatcactggagcccagaggggtgaggctgccgtgagctaagatcacaccgctgcactccagccggggcagcacagcgagaccctgtctcaaaaaaacaatcacgaaaaaaaaaaagatttaacaactttgcaatgaattagatcacccagcagttataagaaagaggttggggggcagggaggaaggctgtactgaggttttaataattattgagcagtgaccgtgtttcaggaaagagatggggagggagggaggctgtactgaggttttaataattattgagcagtgaccgtgtttcaggaaagagatggggagggagggaggctgtactgaggttttaataattattgagcagtgaccgtgtctcaggaaagagatggggagggagggaggctgtactgaggttttaataattattgagcagtgaccgtgtctcaggaaagaggtggggagggagggaggctgtactgaggttttaataattattgagcagtgaccgtgtctcaggaaagagatggggagggagggaggctgtactgaggttttaataattattgagcagtgaccgtgtctcaggaaagagatggggagggagggaggctgtactgaggttttaataattattgagcagtgaccgtgtctcaggaaagagatggggagggagggaggctgtactgaggttttaataattattgagcagtgaccgtgtctcaggaaagagatggggagggagggaggctgtactgaggttttaataattattgagcagtgaccgtgtttcaggaaagagatggggagggagggaggctgtactgaggttttaataattattgagcagtgaccgtgtctcaggaaagagtggggcagggagggaggctgtactgaggttttaataattattgagcagtgaccgtgtctcaggcaccgttttaagagtttatcacatactttcctcattgcaatccttgcaaccgcccccgagataggtattattattcccgacttccaggtgagagacctgaagcagacagaggtgagggaatgagcccaggccgggaggacgcagggaggcagaatccagcgttctaaacctctgcacagtcctgtaagttactttttaaaattccgtcgagaggaaactagtaagaccaagagaagctaactcattaaagtctgtaatctgctgaggctcaaacaactgaggcactgaggctggtaccccaggccacccccaccaacaacataaccagaggggaaggaagtcaggccccttctcactctgagcagctggtgcctgggattttaggctgtcacgac

SEQ ID NO: 29842 - DNA, 1073 bp, Artificial sequence
  DNA replication origin
ggctgggtctgatggccttaccggccaggctgcgcacgtgcgtggggcctgcgtggagggctggtctggggtgggagcagatgtggggaaggggctcgtggggcatgttggcggtggagctggggttccaggggggctgggtatgtgttccaggtagtccaggctggatcccaggctgtgggtcagaaaggggctggggaagtcgggcgcagtggctcacacctgtaatcctagcactttgggaggccaaggtgagaagattgcttgagaccaggagtctgagaccagcctgggtaatgtagtgagacctcatctctactgaaaaaaaaaaaaaaatagctgggcatggtggtgcccagttacgtttccaactacttgggaggctgaggctgaggattgcttgagcctggaaggcttgagccccagaggcggaggctgcagtgagtcaagattgtgccactgaactccagcctgggtgacctgtttcaaaaaaaagaaaggagggagggagggagggaaggaagaaaggggctggggagggaggctggcagctcagaggcggatgtcatggggcgatgtgagtgatgtgagggatgactgagtgatgtgagtaacctgggagagaatgtgggcccaggttgaggagaggagcccaccaggtgtgggcgtggtgggagagtggccgggaagctgtcttcttccctcgaacctgcctgaatgtctgtgtggagacattcctgtgacctagtatctccactcgggtgtcctgctcttgagatgttggggctgggaccaccgctgggcacctgccgtgtgtgtggtcaggtcacccgatgtgggaggaatccagtggagaaggaaccgacctgtaaccttgtgaagctgcctggtgggacgtcaggggctaggaggttggtgtgagctgggcctccagggtggagtagcccttccctccccagcccccgcagctgccaggcaggcaccaccccaccctcccggattgtccctgtggggcctccgcagtgtggcaggtgcaggctgagggctgttacgcgccatctcgacgttgcctc

SEQ ID NO: 29843 - DNA, 1418 bp, Artificial sequence
  DNA replication origin
gacctgctgtggggaggacctgccgtggggaggatctgccgtggggaggacctgccgcgggatggacctgccgtgggatggacctgccgtaggatggacctgccgcggggaggacctgccgtggggaggacctgccgtggggaggacctgccgtgggatggacctgccgcgggatggacctgccgtgggatggacctgccgtggggaggacctgccgtgggatggacctgccgtgggatggacctgccgtggggaggacctgccgcggggaggatctgccgtgggatgggcctgccatggggaggacctgccatggggaggatctgctgtgggacaggcctgccatgggatgggcctgccgtggggaggacctgccatgggtgagctgcggcacctggggaggtgggggaggcccccgggctgcagagtggagcagatgtggcagccgggcctggagggtgggtgaccaggtgccaggagagggcacttcaggagcaggcacagctcggcagaggcagtgtgcccaggaagtgtgggggcatcgggcgcagctgggagtctggttatgctggggcatgagaaggagaggaagagaggaaaagggaagaagaggaggtcagaggggggaggaaaagaggccctgaggggtaagaagcaggtggggagggagggaaggagagagacgtgaggatcgggaggactctgtgtgccgggcgcaggggctgggcttgtgtcctgtaggcagcagagccatccaagggactaagcagggaaacgacagtctcatgggcccgtggggaggttaagtccagatgcagaggattcgtggatactaattatccaattcgccataatgaaggcctgaattaaggcaggagcagccaagatggagactctgaagacaggagttagccacgataaagctgccagcggtggagagctcactctaggggtaccaagcacccagctgattagcaaaaccacctgggaggtcacggtctcctcgttgcaggtgaagaaacggaggcgaggtggaggttagtcccttgccaggtcacacggcgggccagtgctgggtctgatggccttaccggctgggtctgatggccttaccggccaggctgcgcacgtgcgtggggcctgcgtggagggctggtctggggtgggagcagatgtggggaaggggctcgtggggcatgttggcggtggagctggggttccaggggggctgggtatgtgttccaggtagtccaggctggatcccaggctgtgggtcagaaaggggctggggaagtcgggcgcagtggctcacacctgtaatcctagcactttgggaggccaaggtgagaagattgcttgagaccaggagtctgagaccagcctgggtaatgtagtgagacctcatctctactgaaaaa

SEQ ID NO: 29844 - DNA, 834 bp, Artificial sequence
  DNA replication origin
tggaggtggggcacagagactacaggtcaatggaggtggagtcacagggactacaggtcaatggacgtggagtatagggactacaggtcaatggaggtgggggcatagagactacaggtcaatggaggtgggggcagagggactacatgtcagtggaggtggggcacagagacttgggaatggccaacttgcaggactcgggcagtgactcctgcctgggagaacgggagctggcagtgtgcttcctcctcctgtctctcaaccccacagctgctgtgaatattccaggtataggggcctgtggagaggcacagagcctggcctgtggtaaatattccagctataggggaccatgaagaggcacagatcctggcccacttcccctgggacagtccagggcctgtgctgcagaggccgctgctggtgtggctgtgcaacggttagtacaggtgctccttggagccatgtcttaggcaacagtggctgtcctggggaaggacctcagctggatgtgggtccccacgctactctggagctgtgggctggtccgggcgtttctgttgcagatggttcttggtgttgagcagactgaggtctcagtcctggcttgggtgatgaggccggggaatctttgagcttctgaggcttctgaggggcttgttccaggattgaggtgggaggggagtgtattaggggagcacagctggatggtgggcatttgggggctttggagggttcactcttccttcttggagaaggtggtgtcattcgttcattcatcttcattcattctgtaaataatagcccattgtgtgcaagccctgttctgggtcc

SEQ ID NO: 29845 - DNA, 3899 bp, Artificial sequence
  DNA replication origin
cagcctcctgagtagctgggattacaggtgcatgccaccactaccggctaatttttgaattttagtagagacagggtttcaccatgttggccaggctggtcttgaactcctgacctcaggtgatccgcctgcctcggcctcccaaactgctgggattacaggcgtgagccaccgtgcctggctgctagtcatggttttaagactggagttattatactgaagaagacagagaaggaattttcttgagatgatattgggcaagggaactaaaaaacaagtaatgatcaaataaacaagatgatgtcaggaaataataaaccctgggaagaaacaacagagggtggagggtggaggatggaggatggggtggggtggggtggggtgtgaactgttgagagaaccgggaaagatggagaagtcaaaagaaataaatgtggatgtggaacatgcaggccactggcaaacttgagggcattttcaggggcattcaaaagctggatgagaaaaccaaaggtacagtgaagttaacctgcccaattagtaagcaggaaagccaggacttcagctacctcatttcttttcctgcttttgtcatatgtggtaagggaaaactgggctgaggaaggtggattaactggcccaaaaatactggaggggagatgggggcctgggtgtaagactgtgcgggctcctccttcagccttgccaaggccctggactacaggtcagtggaggtgggggcacagggacttcaggtcaatggaggtgggggcacagggactacaggtcaatggaggtgtggagcacagaaactacaggtcaatggaggtgggggcacatggactacaggtcaatggaggtgtggagcacagagactacaagtcaatggacgtggggccacagggactacaggtcaatggaggtgggggcacagggacttcaggtcaatggaggtggggcacatggactaaaggtcaatggaggtgggacagagagactacaggtcaatggaggtggggcacagggactgcaggtcaatggaggtggagcacaggcactgcaggtcaatggaggtggagtacagggactacaggtcaatggaggtggagcacagggactaaaggtcaatggaggtggggcacagggactacacgtcagtggaggtggagtcacagggactacaggtcactggaggtggagcacagagactacaggtcagtggaggtggggcacagagactacaggtcagtggaggtggagcacagagactacaggtcaatggaggtggggtcacagggactacaggtcaatggaggtgggtgtagagagactacaggtcaatggaggtggagcacagagactacaggtcagtggaggtggagcacagggactacaggtcaatggaggtggagcacagggactacacatcactggaggtggagtcacagggactacaggtcaatggaggtgggggcacagggactacaggtcaatggaggtgggggcacagggacttcaggtcaatggaggtggggcacatggactacaggtcaatggaggtggggcacagagactacaggtcaatggaggtggggcacagggactgcaggtcaatggaggtggagcacaggcactgcaggtcaatggaggtggagtacagggactacaagtcaatggaagtggagcacagggactacaggtcaatggaggtggggcacagggactacatgtcagtggaggtggagtcacagggactacaggtcactggaggtggagcacagagactacaggtcagtggaggtggggcacagagactacaggtcagtggaggtggagcacagagactacaggtcaatggaggtggggtcacagggactacaggacaatggaggtgggtgcagagagactacaggtcaatggaggtggagcacagagactacaggtcagtggaggtggagcacagggactacaggtcaatggaggtggagcacagagactacgcatcactggagatggagtcacagggactacaggtcaatggaggtgggggcacagggactacaggtcaatggaggtggggcacaggaactacaggtcagtggaggtggagcacagggactacaggtcaatggaggtggagcacagggactgcaggtcaatggaggtgggtgcagagagactacaggtcaatggaggtggagcacagggactacacatcactggaggtggagtcacagggactacaggtcaatggaggtgggggcacagggactacaggtcaatggaggtggggcacagggactacacgtcagtggaggtggggtcacagggactacaggtcaatggaggtgggggcacagggactacacatcagtggaggtggagtcacagggactacaggtcaatggaggtgggggcacagggactacaggtcaatggaggtgggggcacagggactacaggtcaatggaggtggggcacagggactacaggtcaatagagatggggtcacggggactaaaggtcaatggatgtggagcacagagactacgggtcaatagaggtggggcacaaggactacaggtcaatggaggtggggtcacagggactacaggtcagtggaggtggagcacagggactacaggtcagtggaggtggagtacagggactagagttcagtggaggtggagcacagggactacaggtcaatggaggtggggcacagggactacaggtcaatggaggtgggagcacagggactacaggtcaatggaggtggagtcacagggactacaggtcaatggaggtgggagcacagggactacaggtcaatggaggtgaggcacagggactacaggtcaatggaggtgggggcacagggactacaggtcaatggaggtggggcacagggactacaggtcagtggaagtggagtcacagggactacaggtcagtggaggtggggtcacagggactacaggtcactggaggtgggggcacagggactacaggtcaatggaggtgggggcacagggactacaggtgaatgaaggtgggggcacagagactacaggtgaatggaggtggagcacagggactacaggtgaatggaggtgggggcacagggactacaggtcaatggaggtggagcacagagactacaggtcaatggaggtggggtcacagggactacaattcagtggaggtggagcacagggactacagttcagtggaggtggagtacagggactacaggtcaatggaggtggagcacagagactacaggtcaatggaggtggggcacagggactactggtcaatggaggtggagcacagagactacaggtcaatggaggtggggcacagggactactggtcaatggaggtggagcacagagactacaggtcaatggaggtggggcacagggactacaggtcaatggaggtggagcacagagactacaggtcaatggacgtggagtacagggactacaggtcaatggaggtggggtcacagagactacaggtcaatggaggtggagcacagagactacaggtcagtggaggtggagcacagagactacaggtcaatggaggtggagtcacagagactacaggtcaatggaggtggagtcacagggactacaggtcaatggaggtggggcacagggactacaggtcagtggaggtggagcacagagactgcctgtcagtggaggtggggcacagagactacaggtcaatggaggtggagtcacagggactacaggtcaatggacgtggagtatagggactacaggtcaatggaggtgggggcatagagactacaggtcaatggaggtgggggcagagggactacatgtcagtggaggtggggcacagagacttgggaatggcca

SEQ ID NO: 29846 - DNA, 2337 bp, Artificial sequence
  DNA replication origin
ctttggggaaatgtcttttcaaatcctttgcccatgtttaaatggaattgtcattttgttgttgagttgtgagaattatttatatagtgtagatactagacccttatgagatatatggtttgcaaatatcttctcccattctatgggctgtcttttcaccttctcgatagtgtcctttgatggacaaagttgtaaattatgacagatttacaaattacgataaagtcagccaggcacagtggtgtatgcctgtcatctcagctatctggggggccgaggtgggaggacaacttgagcccaggagtttgagatgaacctaaacagcacggcattaccccgtctcaaaaaaattatgataaaaaatccaatttgtctcttttttcttttggtgtgtatggtgtcatctaagaaatcattgccaaatcttagatgacaccaaaatgtagatgacacctattttttggtgtcctctaagaaatcactgccaaatctgaagtcatgaaaatttaccctgacattccttatacgaatttcatagttttagctcttgcattaggttttgatccgtttgagttaaattttgcaatggtgtgatgtcagggtccacgtcatccttctgcaggtggctctgcacttgtcccagcagatgttgttggaaggactgttctttctccgtcgtatggtctcggcatccttgttgaaagtcagttgaccacggatgtatgggtttatttctgggctctcagttctattccagtgccacagttttcagtaccatatgggcaggaggcatcctgctctgagggagtgtttggtccagtaggagaggtcagacacgttcaccagaaactgcgaagttctgggaagaggtaaaaacagtgtgcttatgaggacgaggcagcgattgcttcagccctgggcagtaagtgtggatgtggggagacctgggcaggggcagtgagtgtggatgtggggaggcctgggagggggcagtgagtgtggatgtggggagacctgggcaggggcagtgagtgtggatgtggggaggcctgggagggggcagtgagtgtggatgtggggaggcctgggtggggggcagtgagtgtggatgtggggaggcctgggagggggcagtgagtgtggatgtggggaggcctgggtggggggcagtgagtgtggatgtggggaggcctgggtggggggcagtgagtgtggatgtggggaggcctgggaggggggcagtgagtgtggatgtggggaggcctgggtggggggcagtgagtgtggatgtggggaggcctgggtgggaggcagtgagtgtggatgtggggaggcctgggtggggggcagtgagtgtggatgtggggaggcctgggcccagggcagtgagtgtggacgtggggaggcctgggtggggggcagtgagtgtggatgtggggaggcctgggaggggggcagtgagtgtggatgtggggaggcctgggtggggggcagtgagtgtggatgtggggaggcctgggtggggggcagtgagtgtggacgtggggaggcctgggtggggggcagtgagtgtggacgtggggaggcctgggtggggggcagtgagtgtggatgtggggaggcctgggtggggggcagtgagtatggatgtggggaggcctgagcccggggcagtgagtgtggatgtggggaggcctgagcccagggcagtgagtgtggatgtggggaggcctgggcctgggcatgaggtatgacaccaggtgtgtgtttgtctggagacaaatttggcaaggcacggtggagtctgtggatggccatgaactcccagctgaggaccctgggcttgattttgaggtgtttgggtggagcggggcctttggagagcctgtctgatggcaggattggccgggtctgagctggggagcctggagccagggggaccccttaggactatggggtgactgaggaggtctgggtgacacctggttcaggcagtgggtctggtggggagcaggggctgtctttgaaaatgccccagggctcagacaccagctcctttgtgcctctgctctgagggcctaggctgggacaacagtggcactgagggctggtgactgaggtcccacaggtcccagcccctgcctgctccgggaaacagccagcccgtctcctctgcaatccccttcaggctgccccggcccagttcttctcagaactcccgtttggccaattactgcgcgacttacagtttctgggaactctgtgctccccgctgctgggtgtgtggcaggtgctcggagaatacccggctcattgctttcgttaggcacctgtagg

SEQ ID NO: 29847 - DNA, 1358 bp, Artificial sequence
  DNA replication origin
tgaccaaaaggaagcaactaccgacccaaacaacaactggggtgaatctcaacaacgtcatgccaaatgagagcgagagacgcctttcacaaaagaacacacgttgtatgatcccatttacatgaagttccagtacaggtaaaattaacctatggtagctgggtgcagtggctcatgcctgtaatcccagcactttgagaggctgaggctggaagatcacctggggtcaggagttcaagaccagcctggccaacatggtgaaacccagtctctactaaaaatagaaaaatcagctgggtgtggtggcacacgcctgtaatcccagctactcgggaggctgaggcgggagaatcacttgaacccaggaggcggaggttgtagtgagcagagatcgcaccattgcactccagcctgggcaacaagagtaaagctctgtctcaaaaaaaaaaaaaaaaaaaattaatctctggtgaaaaaactccaaagagtggctgactgcagggggagtgggacagggattgacggggacggggtgtgagagtgactgactgcagggggagtgggacagggattgacggggatggggtgtgagagtggctgactgcggggggagtgggacagggattgacggggacggggtgtgagagtgactgactgcaggggaagtgggacagggattgacggggacggggcgtgagagtgactgactgcaggggaagtgggacagggattgacggggacggggtgtgagagtggctgactgcggggggagtgggacagggattgacggggacggggtgtgagagtgactgactgcaggggaagtgggacagggattgacggggacggggcgtgagagtggctgactgcggggggagtgggacagggattgacggggacggggtgtgagagaatgctctgggacagtggtcacgttctctattttgatagcagcctgggttgcacaagcctgcgtgtttatctgagctcatcagatggagcaggtaagatttgtgtatttcgttgcatgcatgttttaccatggaagaaaaataccataaacaactactgaactttagttcatggtaagcttactgaagcatttgactattttgttcaaaagatgcattaagatagataaaaagcaagccacaaactgagagacatatttgcagcataatagacatctgattagtaccagtacgcggacatacggagatctcctacaaatcaataataatctaaaagggaaaaaatgggtaaagaaaagtgcagtgtgcagatgagctaatacttcaagtcagttagggaaagagaaggatacctcaaatctagtaacaccagttcctggacccgaa

SEQ ID NO: 29848 - DNA, 1108 bp, Artificial sequence
  DNA replication origin
tccgggagggatgtggggggaggcttccgggaggcatgaggagggcttccgggagggatgaggagggcttccgggagggatgtggggggcttccgggagggatgaggagggcttccgggagggatgagggggggcttccgggaagcatgaggggggcttccgggagggatgaggacggcttccgggagggatgtggagggcttccgggagggatgtggagggcatccgggaagcatgaggagggcttccaggaaggatgagggcttccgggagggatgaggagggcttccgggagggatgaggggggcttccgggagggatgaggacggcttccgggagggatgaggagggcttccgggagggatgaggggggcttccgggaagcatgaggggggcttccgggagggatgaggagggcttccgggagggatgaggggggcttccgggaagcatgaggggggcttccgggagggatgaggagggcttctgggagggatgaggagggcttctgggagggatgaggagggcttccgggagggatgaggagggcttccgggaagcatgaggagggcttccgggagggatgaggagggcttccgggaagcatgaggagggcttccgggagggatgagaagggcttccgggaggctggtactgcctggttcctttaatggggtgtcagtcagagggctgcgttctttccatcaatgccaacgcttacccgttccatgtgtgtactcctctgtgtatgtgttagacttaatacaatggagcgaaacaggaaaaaaggctgcagggatcctaaacccgggacgtgaatacagacacaccattccaagaggccactttgacttcactgtacctgcagccttgggtttctcgtgacaggtgggaggtgacatgagggtgagcacctaggctccggaggggtcagctctgggaacgaggcagctgagcccgggctggctctggtttcttcctgtctacctccaccctgctgggtctggggagagctctcttagctacaaggtggctgcttgggttgggagagcccctgaagtggcccttttccttgcttttgggatgcttgggggtgtaagcacggtga

SEQ ID NO: 29849 - DNA, 1564 bp, Artificial sequence
  DNA replication origin
ccctctggatgtttctaagataaaggaaaacgagggactacctggaatgattagcacactgcccggcacgggacaacccactcaacaaacagctgcaatgattaagagctggaaaagtatatctcgcactcatgatacagtgggaggctaatagcagagaacaaaatactaaaccgtgtgggacaacctgcaacggatccatcaacaagcccagcaggaacgcagatggactggacgaacggaaccgtccaggagggaggtggtgcttgaactgaactctcaattgtattaaggatgctggggaggtgttcttggaggcctgagggtgggaatgcctccattgagtgcttgcagggcgcccagtcctggagagccagagagaaggggaacaagcttcccgctgccatcagggacagaaggggatgtgagatcagccgacagctgcagctggtggcctgagggcatcgtggagtgggaagggtccccggtgcagccagggaggtgagcaaagccagggaagggtccccggtgcagccagggaggtgagcaaagcttttccaaggaaactgcacctgagccaagtcccagagggtaggggcgagagggcccaaccaggggcaggaggcaagaagcttcaggattggaaattagtttgagagaatgaggccacgtgactgagggccttcaaatgcaggcaggggagctgagctttgcccaggaggacatatggagcctctgaagatatctcggtggggcgggggtcggtgacagggtgaaacgaaccatcattctagaagggacatgccggatggattgccacatggggctggagggggttcccacaggagagagaacagctaagaggcctctgtactctggactgagatgttcaaggcctgtaggaatccatcacaaaggagaggggagaggcagacacattttggagaccagtgtaaatgacagagaatgagggaaacccaccagcgggaagtgagtgagggcagctgcctgggaggagaccagtcgggtgcgctgagtttgcggtgacaccgtggcacccagagagcaagacagggtgggctggaagtcagagggggcattcccagaggactcctggagccagccccgtgagaagtacaacacagggcctgggaaaacagtcccaggaaagagggaaaaaggctcagcaaaggagaaggaaccaggagagaggcatgcccagaagtgacggcggggaggctgcaagctggacaccagcgcgcaggggtccgcttcccggggagagcgaccgaggcaccacagaagaggcgtgtttggaaacaaaacgacttttgggtttagaagtttcagcaaagtggccaccagcagccaggctgcagaggatggaggggggcggctggcggggagggggcggctggaggggagggggcagcaggtgccgagctcttgtgggaaaacgtgacagagaaaagaggaaacaagctgacggctccgatgccgggttttgtgtttttcaggagatgggagatgggaggccgaggggatgtcagagacgcggagtggg

SEQ ID NO: 29850 - DNA, 1107 bp, Artificial sequence
  DNA replication origin
agtaaaagggctgtatcaccagcccctccccatgacattggagtgaggggctgtgcagctgggtggctggttagggtggggtgcacacgtgtggagtgcggggctgtgcagcccggtggctggttagggtggggtgcacacgtgtggagtgaggggctgtgcagcccggtggctggttagggtggggtgcacacgtgtggagtgtggggctgtgcagcccggtgcctggtctagggtggggtgcacacgtgtggagtgaggggctgtgcagcccggtgcctggtctagggtggggtgcacacgtgtggagtgaggggctgtgcagcccggtggctggtctagggtggggtgcacacgtgtggagtgaggggctgtgcagcccggtggctggttagggtggggtgcacacgtgtgaacacctgtgtggcatcagcccccactctgcagtgagcatgcaggagcccccccaccccacccaccatgagaggatgaggccgcctcacactgggtcgggggaaggggagtggaacggtcctgagtgtgctgccttgtgggccaaggggacaaacgctggggcaggagagaagggagtggtttctggagttagccaggaggctgcacctgtgttcacctgttagctatcctcagggcacagacagaaaaagatggttttgttactgtcattcggaccttatgtggtaagacctgggaaaacaggggttaagtgaaacatgtgagaatcccgtctaggaagagctggcacagagcagaggtgcaacgagtgtttactgaaagctgtaatggtgaatagaaggttgggcgattgggttcgtgtgggctccacaggggtacagctatagccaagaggaaggcttcagggaggcagcctcgggtcacctatgcgtctttctcaggcggttggccatcccaaggaaggtcgagtcaccccagagacacggagtggtctacccccgtctgtgcaagcggcggtgcgagcagctcctgggggctggggggtgggctaaggccagcggaattcctgcacccttgaggctttagggttaggaggtgaggagggaatattaacattaagaatgctctccagct

SEQ ID NO: 29851 - DNA, 2334 bp, Artificial sequence
  DNA replication origin
aaactctgcactcaattcctagtcttagagtttgcatttgggggaactcaaacaaacacaacaaccaacacagcagccaacagtccctgtgccagggatgtgtgagcaagatgggagactgggttggatgctggatagatgggctgttggctaaggatagaaaattagaagtcatcagcatgtaggacatgattgcagctgtgaatgtagatgagaataccttaatatacagacagagcttcaagaacagagtccttaggccaagctcggaaaacaccaacattcagaggcttctcgacattccctttagaagggaaggtttatgtgcaaaggaggcggaatggcctagaatcacgaggatggtgtcccaaaagccgggcagatacaacatttcaagaaggaaagagtggtcaggagtgtcaaatgttgctggcaggtcagggacaacaaggacaaaggttgtccactggattcgatgactcggaaggacactggtgacgctcgatggctcggaaggacactggtgacgctcgatgactcggaaggacactggtgacgctcgatggctcggaaggacactggtgacgctcgatggctcggaaggacactggtgacgctcgatggctcggaaggacactggtgacgctcgatggctcggaaggacagtggtgacgctcgatggctcggaaggacactggtgacgctcgatggctcggaaggacactggtgacgctcgatggctcggaaggacagtggtgacgctcgatggctcggaaggacagtggtgacgctcgatggctcggaaggacagtggtgacgctcgatggctcggaaggacagtggtgacgctcgatggctcggaaggacactggtgacgctcgatggctcggaaggacactggtgacgctcgatggctcggaaggacactggtgacgctcgatggctcggaaggacagtggtgacgctcgatggctcggaaggacagtggtgacgctcgatggctcggaaggacagtggtgacgctcgatggctcggaaggacactggtgacgctcgatggctcggaaggacagtggtgacgctcgatggctcggaaggacagtggtgacgctcgatggctcggaaggacagtggtgacgctcgatggctcggaaggacactggtgacgctcgatggctcggaaggacagtggtgacgctcgatggctcggaaggacagtggtgacgctcgatggctcggaaggacagtggtgacgctcgatggctcggaaggacactggtgacgctcgatggctcggaaggacagtggtgacgctcgatggctcggaaggacagtggtgacgctcgatggctcggaaggacagtggtgacgctcgatggctcggaaggacactggtgacgctcgatggctcggaaggacagtggtgacgctcgatggctcggaaggacagtggtgacgctcgatggctcggaaggacagtggtgacgctcgatggctcggaaggacagtggtgacgctcgatggctcggaaggacagtggtgacgctcgatggctcggaaggacagtggtgacgctcgatggctcggaaggacagtggtgacgctcgatggctcggaaggacactggtgacgctcgatggctcggaaggacagtggtgacgctcgatggctcggaaggacagtggtgacgctcgatggctcggaaggacagtggtgacgctcgatggctcggaaggacactggtgacgctcgatggctcggaaggacactggtgacgctcgatggctcggaaggacactggtgacgctcgatggctcggaaggacagtggtgacgctcgatggctcggaaggacagtggtgacgctcgatggctcggaaggacactggtgacgctcgatggctcggaaggacagtggtgacgctcgatggctcggaaggacagtggtgacgctcgatggctcggaaggacagtggtgacgctcgatggctcggaaggacagtggtgacgctcgatgactcggaaggacactggtgacgctcgatggctcggaaggacactggtgacgctcgatggctcggaaggacagtggtgacgctcgatgacttggaaggacagtggtgacgttcgatggcttggaaggacagtggtgacgttcgatggcttggaaggacagtggtgacgttgtaaagcggctttgatggcacgatggtgccagaactacaactgtagtgggctgagaagggatgggtcagtgaggagacagagactgcaaaggagaccaaatggaatgatgcacaattaaaatacctgtaaacatttagattagctttcct

SEQ ID NO: 29852 - DNA, 1264 bp, Artificial sequence
  DNA replication origin
tgcctgtggctggagctgccatctttgtccgagaggtagggtaagttctcaggggcctcctcggcattggggtcagtgtggaagcccttgagggcctcggggtcggggtggaagcccttgagggcctcggggtcggggtggaagcccttgagggcctcggggtcggggtggaagcccttgagggccttggggtcggggtggaagcccttgagggcctcggggtcagtgtggaaacccttgagggccttggggtcggggtggaagcccttgagggccttggggtcggggtggaagcccttgagggcctcggggtcaatgtggaaacccttgagggcctcggggtcagtgtggaaacccttgagggcctcagggtcggggtggaagcccttgagggcctcggggtcggggtggaagcccttgagagcctcggggtcggggtggatgcccttgagggcctcggggtcggggtggaagcccttgagggcctcggggtcggggtggaagcccttgagggcgtcggggtcggggtggaagcccttgagggcctcggggtcggggtggaagcccttgagggccaagcaccggtaccgttttctccgattcagtttatagatgcgaatcctttccttctctgcctccgggtcagcaagaattccatcccaacgcagactttcgttgatccgattcgcaaggttctctatttcggcaaagtcggggaggctgacggtggaggagtcagaagggaggtgcttcttttccactttgctctgtctgtgctctggtttcgggccacgctctttgcaaggacttaagatgtcatgaaaggaggaagaaagcggctggctcttcaggctctgactctgatgtttatctgctgagtagatgagcaggttagtgtttgtggcaatgtctgaccttggcctgctggggatggtgccaaaatcacccaagatggaagaggaggatgggggcccctccgtacccagggctcaggctgccaagcccaccagcctcgtgcccacctgcctgtgtgattttgctgaaatcatttcagggcaggaggaaccattcattgagcacacagtctgagccaggccgtctgggtaaaggcgatcggccctattcttcgggtgaggaaaccgaagctccaaaaggttcaggaacttgccaatgtcatgagcgagtggcagagctgggacctgagtgcaggctgggcccccaatgccccattctttccactgggccgtgctgccctcatccatcc

SEQ ID NO: 29853 - DNA, 1175 bp, Artificial sequence
  DNA replication origin
  misc_feature (764)..(764): n is a, c, g, or t
  misc_feature (1151)..(1175): n is a, c, g, or t
cctcttggcctgaacaccgggaacccggtgtccctcacatgacgggtgggaggcctttgggtgggtggaaactttcacggagtaatcctcttgctttactttaaaatgttcatttaaagaaaagactccaccgaatcttttgccctgggactcgctcggatgttggtgtttgctgcctttacttagaactctggggaagccacatcctgcccgcggtctcagaaaagctggagcggggccgcagcccggccctgccccccggcatggggacttcctccccccggtgaaggcggccgctgccgtccctagggatccccacgagaggttcctggggacccccacgggagccccggcggtgctggtggtctcgcccctcccaccctgtctctcggtgggcatcagggcagtttcctcatcgccatcccaaggcggggctggcttcaacttggccttcagcgccctcccgtccggccccatctggcctcgtcgtccacctgccctggccacaggccggacacatgcaccacaccagcgcttctgctgccgccctccacccgcgtgcccagggcctcttacctctcccaggaggcgtcctgctggcccctcaatgcccagctcatgtcacctcctctgggaggccttccttgatgcttcccaggggccagagtccacgacgacatccccattcctgtggcccttcgttcatgtgtctgttatgacctccgctgcctcacatcaccccagccccagcctggagcgagggncgtgctcagggagggtctgtcgggtgggcagggatggaaaagcagagaaggcgacagaaccgagtgctcctgccgatgcctggaggaaggcggtagggggttcagagatcacccaccttcccatgaggtgcccccttctgttgggcagggtctggcagccagagagtgggggcagagcagggcctactgtcactatttggaggctgtttgcagaagccaatgcccacaccttatgtgccctcccccccacaccttaggtacccccccaacacacacacaccttatgtaccccccaacacacacacacacaccttatatacccccaacacacacaaacacacacacacaccttatatacccccaacacacacaaacacacacacacannnnnnnnnnnnnnnnnnnnnnnnn

SEQ ID NO: 29854 - DNA, 1281 bp, Artificial sequence
  DNA replication origin
gcggcaccgagcgccaaaggccccccagcccggggtctggcccccagcgcgctacaggtggacgcggggacccgctcgcgccggggccctgggggcgcgttgacccctcgccctgtcccagcgggacccgggaggcgctaacagcttccgagctcgcggtcgggggacccatcccgcagaggcctggggagccgcgcgaagccggcgagcaaacagctggaaattattaccagttaatgcgctccgtgtggccgcagccgcctgttggccccggaaggcgggccctggcgctcctgcccgtcccggaggagaggcctgtcctcgggggctccgcaggcgcgggtcacccctggtgctcagctggacaggctgtgtggccacgcaggacacgcggggcagagaccttctgcggctggcgcaggctcgtggacacgctcagcagggtgaccgcgggctgcgtctagggccaccggccgcccggtgggggccacggcttctccctcaccggggctaaccgctctgcccaccccacccccaggagaatcccttctgaaaaacagacagcacttctccccaccccttcggtttgacagcgaagccttatcctgagtgggaactcgtctccgtagctgcggggtgtaggactgggctgttgctcacgggtctccgaggtcagcagaaagtgcagagtccccacgccacctgcagccctccccgggggttctgatgggtattcagccgagggcctggagctgaagcctcacccagacctacaggacagctcaggagtcacaccctggacgtccctggctgagacagtggcagcccagtgcacatccttgtaaagataaaggatatttgtcctgcttgggccagacctgttaaactcagaaactcagagcaggtagatcttagagacccgctggccaagttccgtcctcttacctcccttagctgtcactttcatgtaaggaaacagagagggatttcacttgccccaagtcacacagctgatccgagacagcttgctgagaacagaaagtcggcatcatccctccacagaaggtaaaacctggcacgcgcctgtgtgctggcaggtggttcattcattcagggtctgcgggaagagattgcaaaatccacagtgcacggtcctggccaaatggtattgcaagtgttactgggaaggggtcccgatccaggccctcagagaggattcttggatcttgggcaagaaagaattcaggacgagtccatacagtgaaagcaagtttattagga

SEQ ID NO: 29855 - DNA, 1277 bp, Artificial sequence
  DNA replication origin
ttaacgagcatgctgccttcaagcatctgtttaacaaagcacatcttgcactgcccttaatccatttaaccctgagtggtcacagcacatgcttcagagagcacagggttgggggtaaggtcacagatcaacaggatcccaaggcagaagaatttttcttggtacagaacaaaatgaaaagtttcccatgtctacttctttccacacagacacggcaaccatccgatttctcaatcttttccccacctttcccgcctttctattccacaaaaccgccattgtcatcatggcccgttctcaataagctcttgggcacacgtcccagacgcgctgggcagaggggctcctcacttcccagtaggggcggccgggcagaggcgcccctcacctcccggatggggcggctggccgggcggggggctgacccccccacctccctcccggacggggtggctgcccggcggagacgctcctcacttctcagacggggcggctgccgggcggaggggctcctcacttctcagacggggcggttgccgggcagagggtctcctcccttctcagatggggcggctgggcagagacgctcctcacctcccagacggggtcgcggccgggcagaggcgctcctcacatcccagacggggcggcggggcaaaggcgctccccacatctcagacgatgggcggccgggcagagacgctcctcacttcctagatgggatggcggccgggaagaggcgctcctcacttcctagatgggatgggggccgggcagagacgctcctcactttccggactgggcagccaggcagaggggctcctcacatcccagacgatgggcggccaggcagagacgctcctcacttcctagacggggtggcggccgggcagaggctgcactctgggcactttgggaggccaaggcaggcggctgggaggtggaggttgtagcgagccgagatcacgcccctgcactccagcctgggcaccattgagcactgagtgaaccagacaccgtctgcaatcccggcacctcgggaggccgaggctggcggatcactcgcggttaggagctggagaccagcccggccaacacagcgaaaccccgtctccaccaaaaaaatacgaaaaccagtcaggcatggcagcgcgcgcctgcaatcgcaggcactcggcaggctgaggcaggagaatcaggcagggaggttgcagtgagccaagatggcagcagcacagtccagcttcggctcggcatcagagggagaccgtggaaag

SEQ ID NO: 29856 - DNA, 825 bp, Artificial sequence
  DNA replication origin
ccggcccccatcccatctaggaagtgaggagcgcctcttcccggccgccatcccatctaggaagtgaggagcgtctctgcccggccgcccatcgtctgagatgtggggagcgcctttgccccgccgccccgtctgggatgtgaggagcgcctctgcccggccgcgaccccgtctgggaggtgaggagcgtctctgcccagccgccccatctgagaagggaggagaccctctgcccggcaaccgccccgtctgagaagtgaggagcccctccgcccggcagccgccccgtctgagaagtgaggagcgtctccgccgggcagccaccccgtccgggagggaggtgggggggtcagccccccgcccggccagccgccccatccgggaggtgaggggcgcctctgcccggccgcccctactgggaagtgaggagcccctctgcccagcgcgtctgggacgtgtgcccaagagcttattgagaacgggccatgatgacaatggcggttttgtggaatagaaaggcgggaaaggtggggaaaagattgagaaatcggatggttgccgtgtctgtgtggaaagaagtagacatgggaaacttttcattttgttctgtaccaagaaaaattcttctgccttgggatcctgttgatctgtgaccttacccccaaccctgtgctctctgaagcatgtgctgtgaccactcagggttaaatggattaagggcagtgcaagatgtgctttgttaaacagatgcttgaaggcagcatgctcgttaagagtcatcaccactccctaatctcaagtacccagggacacaaacactgcgga

SEQ ID NO: 29857 - DNA, 755 bp, Artificial sequence
  DNA replication origin
gctggagaccggcctggccaacccagcgaaaccccgtctccaccaaaaccagtcaggtgtggcggcgcgagcctgcaatcgcaggcactcggcaggctgagtcaggagaatcaggcagggaggttgcagtgagccgagatggcagcagtacagtccagcttcggctcagcatgagagggagaccgtggaaagagagggagagggagaccgtggggagagggagagggagagggagagctgcaagtcattttgtattgtgggctttcagatgaaatttttttttgaaccagaggttttatgtaatttaaaaaaaaaatggccgggaatggtggctcatgcctgtaatcccagcactttgggaggctgaggcaggccgatcacctgaggtcaggagttcaaaaccagcctgaccaacatggtgaaactatgttgaaaccatactaaacaacatggtgaaaccatactaaaaatacaaaattagccgggcgtggtggtgcatgcctgtaatcccagctactcaggaggctgaggcaggagaatcgtgtgaacttgggaggcggaggttacagtgagccgagatcacgccattgcactatagcctgggtgacagagtgagactccatctcaaaagaaacaactaaaccccctaatctagctgatccacccaccatttcatgggctattactgattagtaataacacttacatgccagtgactaatgcctccacccacgccatcccttacctcctgctgc

SEQ ID NO: 29858 - DNA, 1297 bp, Artificial sequence
  DNA replication origin
ccacaaagccgccattgtcatcatggcccgttctcaatgagctgttgggtacacctcccagacagggtggtggccgggcagaggggctcctcacttcccagtaggggcggccgggcagaggcgcccctcacctcccgggcggggcggctggccgggcggggggctgacccccccacctccctcccggacggggcggctggcctggcagaggggctcctcacttcccagtaggggtggctgggcagaggcgcccctcacctcccggatggggcggctggccgggttgggggctgacccccccccccacctccctcccggacggggcggctggcctggcagaggggctcctcacttcccagtaggggcggctgggcagaggcgcccctcacctcccggacggggcggctggccgggcatggggctgacccccccacctccctcccggacggggtggctgccgggcggagacgctcctcacttcccagacggggtggctgccgggcagagaggctcctcacttctcagacggggcggctgccgggcggaggggctcctcacttctcagacggggcggttgccgggcagagggtctcctcacttctcagacggggcggccgggcagaaatgctcctcacctcccagaccgggtcgcggccgggcagaggtgctcctcacatcccagacggggcggcagggcagaggcgctccccacatctcagacaatgggcagccgggcagagacgctcctcacttcctagatgtgatggcggccgggaagaggtgctcctcacttcctaggtgggatggcggccgggcggagacgctcctcactttccagactgggcagccaggcagaggggctcctcacatcccagatgatgggcggccaggcagagacgcttctcacttcccagacggggtggtggccgggcagaggctgcaatctcggcactttgggaggccaaggcaggcggctgggaggtggaggttgtagcgagctgagatcacgcccctgcactccagcctgggcaccattgagcactgagtgaacgagactccgtctgcaatcccggcacctcgggaggccgaggctggcggatcacttgcggttaggggctggagaccggcctggccaacccagcgaaaccccgtctccaccaaaaccagtcaggtgtggcggcgcgagcctgcaatcgcaggcactcggcaggctgagtcaggagaatcaggcagggaggttgcagtgagccgagatggcagcagtacagtccagcttcggctcagcatgagagggaga

SEQ ID NO: 29859 - DNA, 896 bp, Artificial sequence
  DNA replication origin
gcccggcagccgccccgtctgagaagtgaggagcctctctgcccggcagccaccccgtctgggaagtgaggagcgtctccgcccggcagccaccccgtccgggagggaggtgggggggtcagccccatgcccggccagccgccccgtccgggaggtgaggggcgcctctgcccagccgcccctactgggaagtgaggagcccctctgccaggccagccgccccgtccgggagggaggtgggggggggggtcagcccccaacccggccagccgccccatccgggaggtgaggggcgcctctgcccagccacccctactgggaagtgaggagcccctctgccaggccagccgccccgtccgggagggaggtgggggggtcagccccccgcccggccagccgccccgcccgggaggtgaggggcgcctctgcccggccgcccctactgggaagtgaggagcccctctgcccggccaccaccctgtctgggaggtgtacccaacagctcattgagaacgggccatgatgacaatggcggctttgtggaatagaaagtggggaaaggtggggaaaagattgagaaatcggatggttgccgtgtctgtgtagagagaagtagacatgggagacttttcattttgttctgtactaagaaaacttcttctgccttgggatcctgttgatctgtgaccttacccccaaccctgtgctctctgaaacatgtgctgtgtccactcagggttaaatggattaagggcggtgcaagatgtgctttgttaaacagatgcttgaaggcagcatgctcgttaagagtcatcaccactccctaatctcaagtacccagggacacaaacactgcggaaggcctcagggtcctctgcctaggaaaaccagagacc

SEQ ID NO: 29860 - DNA, 1736 bp, Artificial sequence
  DNA replication origin
aagtgattcattccttccctcatccactcaacaaagggatatgcttggccctaggagtagagcagtgagaaagacaggccagcctccgccctcatggagattagagtctgctgggggagacagccttcaatccaacagtcacacaaacagtgagaagggccaggaaggaaaagcagtcgtcatggaaacgtgcaacagagggccgcagccgtccctaaagaaaagatgtctgagccagagctgaaggatgcctcagagtgaaatatatgaggggtggagggcggagggaacagcacgtgtctgccgctcactcaacaatgatgtactgggcatccactctgctccaggcactcttgggtgcaccagggatgcaagtgaggaagatggattagagaggcggcactgtagtggtgagaagaaaactcagggagtgggatgagctggggatgagggtgggaaagtgcttctacacacagggtcatcagaaaaggtctctgaggagatgacggctgagctgagtaagaaggaactgctcaggcaaaacccaaggaagggtgttctcagcagggagacccggtggagacgctggaaagcatatggtgagtctgagggacagaaaggaagatgggggcctggggtaagaggggtggcgggagtcccatcatattggtgaatcagggatggaaaggaagatgggggcctggggtaagaggggtggcgggagtcccatcatattggtgagtcagggacggaaacaaagatgggggcctggggtaagaggggtggcgagagtcccatcatattggtgagtcagggacagaaaggaagatgggggcctggggtaagaggggtggcgggagtcccatcatattggtgagtcagggacggaaacgaagatgggggcctggggtaagaggggtggcaagagtcgcatcatattggtgagtcagggacagaaaggaagatgggggcctggggtaagaggggtggcgggagccccatcacgcagccttttgtgggccatggtaagggtcggttttcttctcactgcaattgggcagtcgctggtagttttcaacagcgaagtgatgtgatctaatttggattttaaaaatattccactgctgtaggggaatggattataatgacagcaggcaaaccagtttaagaggctgctacagtgctccaggaaagggctgatgggaaccggactaagccagtgttccaggaaagggctgatggggaactggactaagctggtgatggacgatagaaaaaagtgtccatcggatttggggcacagttaggaggcagagccaggaggctttgctgagagagtgagaacgagggtgagggaatgaaaggagtgaagggacagtcactttctggtctgagcaactgcacggctgatgttgcccttaactgagatggggcaccctcgtgtagtggcaagggcacaggctccgtatctgacagacccgggttcgagtccaggttccaccatggggtatgctgtttaacttctagcctcagttctcctacctgcaatgtgaagggataggaatacctacctcgtatggctgccatgaggatgggatgaggcatgcgtgtcaggcgtgagctacacagttacgtgctgccatgaggatgggatgatgcgtgcgtgtcaggcgtgagctacacagtcatgcaccacatcaccatgtttccatccatgacgggccacggtacaaggc

SEQ ID NO: 29861 - DNA, 1013 bp, Artificial sequence
  DNA replication origin
cctgcctcagcctcccgagtagctgggactacaggcacctgccaccacacctggctaattttttgtatttttagtagagacggggtttcaccgtgttggccaggatggtctcgatctcctgacctcgtgatctgcccgcctcggcctcccaaagtgctgggattacagacgtgagccgccgcgcccagcctggagtaagaggattttcagcagagagaaaagcaaatgtgaagatcctgacagagaaaagacctcggtgttttggaggtccgaaaagacagacagtaggtggtagtgcaatattgcagcgggaagtgtctggaaataatctggagaggtgggcacgagccagagcacggaggcctcaaagcataaggattctgctctaagtgccaatgagaagccactgaagggtctaaacaagggacagatgtatggcttacttgtataagactgtcctggctgctgtgtggcaaaggggctgtgcaggggcaggagggaaagcgggagtgaaagctctgtgagaagttgctgcagtgtccacgagacggtggaggcctagaagaggcagccggtgctgacgggaagacgccgagcgattcagggtttccaggaaggtacaatgtgtaggactcactgatggactgtgtgtgggtgatgagggagagggagaaccaaggatgacgcccgggttttggttgaaaagccaaggccagggttcactgtctgaaccagggaatgcaggaggaggacgggcttgacaggcaggtgtgtgtggtggtggcggggctggaagtgaagagtcccatctgcaatacgttacgggtgcctgtgctatggctggaatgcatccccaaagttcatgtgttggaaacataatccccaatgcaatggtgttggcaggtggggcctttacgaggtgaccaggtcatgaggggtttgccctcacgaacaaatgaatggcattatctcgggagtgggttcttgataaaaggatctgttcagccactttc

SEQ ID NO: 29862 - DNA, 917 bp, Artificial sequence
  DNA replication origin
ttggggagggaagaggccccgcccatcctaaggacgcgctgaggccacgcggggccgccgggatactgcgttgcccgggagacacctgacgtgacaggaacgccgccagtctcagtccgccgtgatcccacagttccccggtcccggaagtgccctggcctgccggaagtgccggagcggctgacagagcggctgacggagccgggctcaccaggtcgctgccgcgagggagttgctgtgctggggcctgggtggcggctggaggcctgagttgggctcgcggcgggggtcggcagggggccgggtggcggaatgatggaggaggaggaactggagttcgtggaggagctggaagccgtgctgcagctcacgcccgaggtgcagctggccatcgagcaggtaagcgttccgcccctcaggaggggaaacgggagtgcgggaggggagacggcagctccgggcgctggggaggccgcggcgggtggacggagggccgggggctcgcggcagaagggaaagtggaggtggggaggtggtgcgggtgagaagcggtttctgaatcagaaggaaaggaaagagaaccctttctaggctttgattgtctttggcgagggctgggggttctggtggttttggggaaaggaattgtgcgcttagagaggacgacgctaggagaatgcaggccttgggtgccatcctcagattctggggactgtgggggcttcatgcatttaccagactcgtgccaacgccccggttttgcaagctggcacctcgtgagtggcttggaactgggggaagggaatgactttaatttctgaagcggacggcagagaagagagaaagtgttgaaaaatgacatcgttaccattcttaaaaggttgagaattcctaccgttgaatagtttgggtgaggt

SEQ ID NO: 29863 - DNA, 1222 bp, Artificial sequence
  DNA replication origin
gaatcacttgaacccgggaggtggaggttgcagtgagccaagattgtgtcactgcactacagctttggtgacaaagcaagtctccatctcaataaataaataaaatacatacatacatacatacatacatacatacatacatacaaaaaattagctgggtgtggtggtgggcacctgtaatcccagctactcaggaggctgagacaggacaatctcttgaacctgggaggcagaggttgcagtgagccaagatcgtgccattgcactccagcctgggtgacacagaaagattctgtctcaaaaacaaacaaaaaccaacttcctattttgctgtaggatagggtatagtgatgacaaagtttcacagaaaacatttttctaccttgaaatttcaccgtctgaggcagaaattcagtctctaatactttaaaagtaaaacaaaacgaaaccttggagactgtggcctttagtaggcgatgggggaggatggattggaagggagtatacagtaggctgtgagagagatgggggaggagggattggaagggagtatacagtaggatgtgagggagttgggggaggatggattgggagggagtatacagtaggctgtgtaggagatggggagaggaattggaagggagtatacagtaggctgtgagggaggtggggaggatggattgggagggagtatacagtaggctgtgtaggagatggggaggatggattggaagggagtatacagtaggctgtgagggaggtggagaggatggattggaagggagtatacagtcggctgtgagggagttgggggaggatggattgggagtatacagtaggctgcgtaggagatggggaggatggattgggagtatacagtcggctgtgagggagttgggggaggatggattgaaagggagtatgcagtaggctgtgtaggagatggggaggatggattggaagggagtatacagcaggctgtgtaggagatggggaggatggattggaagggagtatacagcaggctgtgtaggagatggggaggatggattggaagggagtatacagtcggctgagggagttgggggaggatggattggaagggagtatacagtaggctgtgtaggagttgggggagcatggattggaagggagtatacagtaggctgtgagggggttgtgtggcaccccttgaggaaacgtcagactaagatggaaacat

SEQ ID NO: 29864 - DNA, 1411 bp, Artificial sequence
  DNA replication origin
agcgtcagcagcatcggggctgcgggtccggccgcctcgctggcgccgcgtggctgggttcggctcggcgcgccccggcccggccgcgcgatttcaaccctccgcccccgtccccgtcccgcctccgcccggcgctggccccgatcccgcggcgcggctctgcgcgtgaccaggcccggcggctgcgatagggcggggcggggtctctcgcggtccctgggcccggagggttccccggcgtccccggcgggcgggtgggcgggggcggaggcggggaccgaggcggcggctgtggccggggccgcggcgcgcgcgcgttccgagtccgccgctccctcccgagcggccgcggggcccaggcggaggcgggaagggccgcggctcccggcttctgttccgtcagcggacgcgcccctccccgacctgctcttctcgccggccccgggcgaaggggcggggtgggcgcggggccgaggaagccaggtaggaaccccctccggggtggggcgaggcccgcggggaaggaaggagggaggcggcgtgtggccctgggttcgcgggccccgtccaccaagccctggtgcttctcggtgggaggcctcaggatgtggcctctccccgcacggccgagatgcttttcccggtgccgccagcggctgcagccgctccggggtggccctcaggaagcgtgaggtccgggggcctccagcagcccctctccacctgcaccaggaggcggactgtggaggctgcaggctcttactgcctctcggctttggatctatccggagacaccatccagaggcgtagggactgtggtgttgttcacaacgtgtcgttatttaaaagtatcggggtcgggcgcgcctgtaaccccagcacttggggaggccgaggcgggcagatcacttgacgtcaggagttcgagaccagcctgaccaccacggtgaaaccccgtctctactaaaaatacaaaattagccaggtgtggtggtgcctgtctgtagtcccagctactctggaggctgaggcaggagaatcgcttgaacctgggaggcagaggttgcagtgagccgagatcacgccactgcactccagcctgggccacagagcaggactctgtctcaaaaaacaaacaaacaaacaaacaaaaaaacagttatcgggacaggcgtctaaacttgaatgaattggaatacatttcatttgtgccaagcaccaatcacatggatgaagacaggaatttcagtatcattggcttctgtcctttaggaactaccagctttattttgctttggtctgtatcttcctcagctaacaaacgtagggggtgggaaatacagttcatttatgttactacaaatgaaaggtatgacgggtctcctcagatcaccgtcatgcaaaatgctga

SEQ ID NO: 29865 - DNA, 1419 bp, Artificial sequence
  DNA replication origin
ggacccgcagccccgatgctgctgacgctggccgggggcgcgctcttcttcccggggctcttcgcgctctgcacctgggcgctgcgccgctcccagcccggatggagccgcaccgactgcgtgatgatcagcaccaggtaccggcgccgccgagacgccccccgaggcccggggcgctgcccaccgcaccccacccggccgcggggcccagggcggaaaaggggggcggcaggaagcccgggggctgctccctccgcgtcccggcggcccgagtttccgaagcccctccgcgtcctcccctggcgggagcggggccggggcgggcgggaatggccgatgagcctccggagcccgctccccacatctgcctgcggctggggagagtcaggccgaagggccgggccgggctccctgcggtcctcggaccggactgagcgcgcgcgctgttctctccgcccgcgctaggctggtttcctcggtgcacgccgtgctggccaccggctcggggatcgtcatcattcgctcctgcgacgacgtgatcaccggcaggtaagagcccgggccggggccttgttgcaaatgtcacatttcagtagctcgcaggctctggctctcgcagcacacgcgctcagaaagctgactaatgggaaaagctggcaccacaatgggctccttcttcctctccggagtcttcgggcacccccagcttaggagaaagtccacggaaatgagggaggacgacagagtcggagtctgatttcaggtggtgtgagccagggatccaggtccttcatggaagagataagcgtggaagcatttacgactgggagtgtggcttgattcttgcagttggcttcactgggttctcactctggagcatcactggctaacagacgtccagtgtggttagcagagccccctccatggaaaggaaccaacccaccacccccttccacgcaaacgccgctcttgcttttcctgcagatttgctaaaggtgattgagaggttcccagcgcttagaacacggacttgtacgtctatcagaggtcagtccagaggcaggtcaggaaatgtgcacctatctgcagttccagtgaaacaaatcataaattaagaccagaatagtcgactttgtacagtagttagacctggacaatggtggtgcttttattatttcaagccttttttttccccaccggtcttgctggaatcacactcactttctcccaagttgaaggaccacagtcggatgtgcaggaagttgaacggcctttccaggccctgctctcctgtgggctctgccaagtcctgcttctcacctgctgagactgaactgcgaggggcctgagcaagctgtccgtctcactctagcctgcggtcttacctgggatcaatcctgctgtcatgatttttgtgct

SEQ ID NO: 29866 - DNA, 1186 bp, Artificial sequence
  DNA replication origin
cgcggccgccgtggctcctgcgtctcccatcgtgccgtgcgtcccgcgccgcgttcgagttctcggaggggagggggcgttagccccgcgcagccgccggcgtcgccgccatggacctaggtgggtgccgcggctccccggccccgggctgcgtccagcaatgcgccaccagagcggtgctgccccgtcgcgtctcctcctgtcgcgcacgctcgcgcgggcccggaccgaaacgtcccccgcgtcggggcgggtctaggggtcccggggtggccttggcggggggtggtccgggtcccgccgcgcgttgggccgcgtcttgccgcctccggccccctgcgcttgaaaacacggagcagacgtgaagttagagcccttggaagcgcccggggctcgcgcacgtgctttgggaaacgggctccctccgagcacccctgggcgccccgacggcctcatttcctgaacggcagctgcgttcttgagcaagtgtcttaacgctccaagtgtcttacgctcatgacgtttcctcatcgacagagcggggagaatggaagtgtgtctccccactgagttttgggcgactttgcattgagatcgccgaggtacagtgtcccttgtggggttgcgcgggtcacacccgcggtgggggcggctgcgctcctgaggtatcactttgtgaacctgcgtgcgtccggattcagaatcttacaggcaaggtctgggagggagcccataggaactagatgctccctgctaaatcttggcacacgctgctaagaccaggaggctgttctgggagagctgggggtgaggcaccccgagatgtgtcagcagtagtaggctggggggaaatggtctggtccccgcccccagacagcttttcaggagcggaatggcagagctctaagggcttggagcccctcagccgtaattgcttcccagccccaccacattcaggctgggacaccctcagcaaatcgtttctgcgcctcagtgtccttatctctagagcaggaatactagtcctcaaaaggtgattgtgaatagaagagatcttacctgtgtaccacctagcacagtgtctggcatggagtaggtgcttaataaacctaagaagcgggctgtggcaagcactagttaaccatccatgatagagtaccggagtattttccagctagtaaccgcc

SEQ ID NO: 29867 - DNA, 2492 bp, Artificial sequence
  DNA replication origin
cacctaggtccatggcggcgacgccggcggctgcgcggggctaacgccccctcccctccgagaactcgaacgcggcgcgggacgcacggcacgatgggagacgcaggagccacggcggccgcgcttaggcctgctcacaacctccgcccggccccgcccacagcctccgccgcgcacgcgcagtcctcacgaacgagcgcgccaagcgcacagcgccgccttccggcagagccctcccaccagccctcaggtacccggacgtcgctcactagacccctccgcaccgtcccctgcccggcccctcttccggggtcccagcgggtcgggctcatgattccccggccccgcattcaccctcacccggtaaccccgggcgtgccccgcacacagttcacccccaccgagcgcctcccccgggacgcccaccacccagcgcggccgcaccacgcgaggcttccactcccacccgcccagctcgcgccacatacagtccctcaacgcgctcctgccgcgccgccccctccagacagcagcgttccggatcctagacgctttttgacggctggtcctccccagaaaatgcgccgtgtgagcccaaacatggtggggtttacgctggaccccgagcttgcaatctgtgcttgacaaaacacaaacatcgcgtgcctgtctcctccccctgagatcgagtagtaacagccactccaactctccacctccagcttctagcaccagggaccgcctccaccaccccatgtgccaagtggagttcgagctgcgcggccctcaagcagctgaagggtcccgtgagcgatcaggagaagctgctggtctacggcttgtacaaacaggccacccagggcgactgcgacatccccggccctccggcctcagacgtgagagccagggccaagtgggaggcttggagcgcgaaaaaaggggcgtccaagatggacgccatgaggggctacgcggccaaagtggaggagctgacgaagaaggaagtggggggcgtggagcgcgaacaaaggggcgtgcaagatggacgccatgaggggctacgcggccaaagtggaggagctgacgaagaaggaagtggggggcgtggagcgcgaacaaaggggcgtccaagatggacgccatgaggggctacgcggccaaagtggaggagctgacgaagaaggaagtggggggcgtggagcgcgaacaaaggggcgtccaagatggacgccatgaggggctacgcggccaaagtggaggagctgacgaagaaggaagtggggggcgtggagcgcgaacaaaggggcgtccaagatggacgccatgaggggctacgcggccagagtgaggagatgaggaagaaggaggctggctgagggctcctcgggaatggaaagggcttcttagaccttgatggctgaaatgtcctgaaactgtcgcaagcttagccgagacatcaataaatcacttaaactgcatgagagtgactgctgttggaaaggagaaactcggtgactgagtgctggggaggcgtccaaatacacagactaactttttgtatggttttgggtggagttcccagctctcctattacaagagcgtatgtaggtatttggaaggacgagggggacagtgtgctgtggaaatgcccaagatctgagggcaggagaccattctccagtgacagcctcttgggaggttgaggccccagccccttatctcttcaaggctgatttactaataccccagcaccacagaggggagagggactctgtcctcctaaacactaaagtcaagtccaaaagcccccactggaacacagggcctacccggttcatgttttgagggagaccaagctttccgtgatgataatgtgatgaaacaattgatgcgccagaacacagcagtttagaaacaatggagcagatggtgtcaaaatcccagccccagaaaggctcacctaaggccgggcaaccaaaatgttcccgggactattctgtacttaaccctggtttctgcttaggggacggtgggacaatatgcatatggatgtctatgtgggatttgttgcaagagcacaacacaccccttgacctatgcaagtgccagagtgtctgagcccagcttctactcctgttaatgatcacaggagcctcatacacaaccattgtgcatggcggctggagtatggagtagtaaatggtatccagaaaggcaggtctacggtggcatatgggatttcctggtacttcttctttaatagaaactatcttcacagatcatgacatcaggtcagctgcagttctcactgggaccaataaacaatagaagcaacaaccataaagacttaagaggacaaaggaaaccaaacctcactgtgtgtcttcaagatctgttcacatagttgcaggaagttgctgtagacaaagtacattactaaagaatgaagcccacccaggacatcacagcaacgaaagaactatttctggtaa

SEQ ID NO: 29868 - DNA, 1322 bp, Artificial sequence
  DNA replication origin
gagaggaagcgggagagtggcgcagcctaaggactgcaagcatggtgagccggccaatcagcggtggcgctgtggcggcacaggaggtgagccagccaatcagccggtgggggtgtggtggcacagttgaggtggccaatcagcgggtggggggggggtgtggtggcacaggaggtgagctggccaatcagcgggtgggggtgtggtggcacaggtgagcctgccaatcactggtggtgctgtggcggcacagggggtgagccggccaatcagcggtggcgctgtggcggcacaggaggtgagccagccaatcagccggtgggggtgtggtggcacagttgaggtggccaatcagcgggtgggggggtgtggtggcacaggaggtgagctggccaatcagcgggtgggggtgtggtggcacaggtgagcctgccaatcactggtggtgctgtggcggcacagggggtgagccggccaatcagcggtggcgctgtggcggcacaggaggtgagccagccaatcagcgggtgggggtgtggtggcacaggcagtgagccggtcaatcagcgctggggctgtagtggcacaggaggtgggaggtgggcaggccaacacggaggaggcctcctatgggaagctgaggagtttggcattttatcagaagacagtatcatgccattgagggatcttaagcaaagcagtgacagaatcagatctatagtttcatcaagacccattgggcttcaacgttcagtctgcaccggagcagggaacactctagagatgaggcaatgaggcaagaggcaaccccggcagcagcctgcgacgcctggcctttcccaggggcggctcctcaccacgggcgggctgggagagtggccgagggtggggcctcgcagtgactgcatggcctcccaccctcccccgcacagcttgttagcgcaagtcttctcctgacgagttattttagaagttcatttgtcaaacctcgggatagacgaaccaggcaaaccagattttaaacggagaataagacacagaggatgtaacagcgcctgcacccccagccacgggctttccctctccctgcaggaaaccagagataggcccaggcgtgtgagaggagcggccgaggctgacccctctgcctggaggggagaagggaaaggggaaaggcgagactcctcccgtcatcctcatgtcctggatactgggcaccacaccaagtatttcctaccttctttccctatttcttacaccccagccatcagtatcaatgtgaaaaccacaatgcttggattatttagatttatttccaaatc

SEQ ID NO: 29869 - DNA, 1733 bp, Artificial sequence
  DNA replication origin
gctccccctggccaggcctggattctccccaggctttgtgactttagacctggcctcttcattgtgagcctgtaccaggtcctcggtgggctccaccacggtcggggggaccccgggctggaccccgcgagcctcctgccaggcagggccagcatctcccgggccagcggccaagcaccccctcttccctgcaggcatccccacgctcatcatgctggacccgcagggcgaggtgatcacgcggcaggggcgggtggaggtgctgaacgacgaggactgccgggagttcccctggcaccccaagcccgtgctggagctctccgactccaacgccgcgcagcttaacgagggcccctgcctcgtcctttttgtaggtatgaagctcacgggggcagggggcgaggggtggctggggggcgggacaggaggggcctcacttgggaggagcctgtccctgccgcttctctctgtcaccagcagtgcaagcctgggcctttgtctctccctgaagccttgcttttgaccccaatgatttattcatggctggcccctgtgggagctgcagctgcactttccctcctagctgctccccagctgccagctgggcagaataggtcaggccgggaggatgccctcggggcccccatgcgcagacccattgttggaaagggcgggtggcacacacggcagctgcaggggctgggcccctctggccgaggctcaccaaggctgcttctgcggatcctctgtgctctgaagagctgctccagcccggtggctgccttggctcctttgtcctcgcttgcacctccccgtctcccatctcacccagtctgagctccgtgggtaactgcccagccgggccagggggacacaggcgcatccatgccaggctccctgcagtctgatgggatgaccctggttccttttgcaaaacctggccctctgccttggacttgtggctcccctccaacaactcaaaatcactgtacgagcctgggtgtggtggctcacgcctgtaatcccagctactcgggaggctgaggcacgagaatcgcttgaaccggggaggcagaagttgtagtgagcccagatggcaccactgcactccagcctgggcaacagagcgagactctgtctcaaaaaaaaaaaaaaaaaaaaaaaaaagccgctgaccagaccacagtcctcaccccctcccgctcaccaccagttcttctgccattttcactgggaagtcggaggtcggaggtcatggcttctcattctgtggctgagagaaacactagcaggcgcctcaggtcctggcttaggggaagctcagcctcccaggcgggtttgtgaggaattcaatgggaagactgtctacctgggagagcagagctgctcagtgaggcaggttcctcctggggagcccggtgcaggagagcactgtgagctttgctgctgggacgcatgtgcacacacacccatgcatgcggggagcaagacctgcatccaaggggaagttcatttccgttcaggggccgctcaggcgggcgtttctgcagctcaggccccctcggcgggtgccgctctgtttgacaagccagtgctttttctccccgtctttttctacccccgacccaatcacagattctgaggatgacggagagtccgaggcggccaagcagctgattcagccgatagctgagaaaatcattgccaagtacaaagccaaagaggaggaggca

SEQ ID NO: 29870 - DNA, 1163 bp, Artificial sequence
  DNA replication origin
ggagggaaagtgcagctgcagctcccacaggggccagccatgaataaatcattggggtcaaaagcaaggcttcagggagagacaaaggcccaggcttgcactgctggtgacagagagaagcggcagggacaggctcctcccaagtgaggcccctcctgtcccgccccccagccacccctcgccccctgcccccgtgagcttcatacctacaaaaaggacgaggcaggggccctcgttaagctgcgcggcgttggagtcggagagctccagcacgggcttggggtgccaggggaactcccggcagtcctcgtcgttcagcacctccacccgcccctgccgcgtgatcacctcgccctgcgggtccagcatgatgagcgtggggatgcctgcagggaagagggggtgcttggccgctggcccgggagatgctggccctgcctggcaggaggctcgcggggtccagcccggggtccccccgaccgtggtggagcccaccgaggacctggtacaggctcacaatgaagaggccaggtctaaagtcacaaagcctggggagaatccaggcctggccagggggagccatggaaccccctcgggtcagcctgtaacctgtcaccttcgcctttcagggcctcaggatcctcagctgcagcctgatgagtgtgttgtcgttcctaccttattccgctacagaaagatcaatgagttcatgcggttaaagaacttagagtttgggaggctgaggtggatggatcacttgaggtcaggagttggagaccagcctggccaacatggtgaaacccccgtctctactaaaaatacaaaaactagctgggcgtggtggcgggcgcctgtagtcccagctactcgggaggctgaggcaggagaatcgctcgaactcgggaggtggaggttgcagtgagccaggattgcaccactgcactccagcctggacaacagagcaagattctgtctctaaacaaataaataaataaataagaacttagcacagggtcatggcgcatcggagcaatcactcactgctggtctcccaaagacacagaagaccttccccagctgctgggggtcaaacacggaacaggcagtgcagtgaccacacggcggacttgctgtggccaccgatgcaagacgggtcctcgccc

SEQ ID NO: 29871 - DNA, 1366 bp, Artificial sequence
  DNA replication origin
cactgcctggctgggtgacccccatccctactgtaaccactgcctggctgggtgacctgggggtcaccttgaccatctgttagggggatcctgatgctgcccgccccatctgtgataaggattagccagtgccatctgtgccgtgcctagcacagggcagacggccgcagaagccagttccgtttcccgcccctggttcacctttggagggatgtgcactcgtcatggctgtaggccaagctcgtcaggaccagctgaggggaggcagcctggcacagcagacatgggtgctttcccccgtgcaggggccgaacacgagtggcttccttgggcccaagttggtttctgcttatgcagacagtcacgcggcccaacacggcccgtcccggcacacctcgtcttaggaggagccgttcctcggggaagcccctgagtgctcctcagaagccaggtgggggctccgtgtcctcgccatgctgtcctgggccccgcaggcacggactcaaaagaggctgcagccacagtcaggaaaaaggccgcttggaggaggccctcggagagccccaggcgctgagccgggaaatgggcagctttgccttcaggttggcttctcctccctccccgtcccccgtgcctgcctctcttccacagacccactcggcatcccacgccggggcacacgcaggctggccgcggggcctgtcacagcagcaggggctctggtttaccccagtgctcataattgcccaatttcagaaacaccctactctgaggaaggaccttgccggggggattttgagaagggtgtgtggtgatgtggaggggctcctgtgcggccagctgtccctgtggtggtccctggcccggattccctttgggctgcagcctcgagaccagcccccgagcctcatggatggacacagcgggcatggaccccggcctcaggggataaaatgcagcctgaggatgtggctggaaatgcccaggtttcttgtgcggcagcacacacagctcctcgggcactgtccacgctgagcacacccgaaaatccccagtgagagccggccgcatgtgtgtgtgggcgcgtgcgtgtgtgtgtgtgtgtgtgtgtgtgtatgtgagtgtgtgtgatgtcggagtggctgttctcaagagcctgttctctctggacccactccctgatacatcagccactttgtctcataggtgtgaacataatggattcgttgattcctttcgaaggcaggcacgcccgcggtgctggtggccgcagcagggtacgaaacacgagggccatatgtctggtacctcggcatccccccgacagggaaggagaatgtcagcggagcaaattactgaccgaatc

SEQ ID NO: 29872 - DNA, 834 bp, Artificial sequence
  DNA replication origin
tttttttttttttttttttttttttgagacggagtctcgctctgtcgcccaggctggagtgcagtggcaagatctcggctcactgcaagctccgtctcccgggttcacgccattctcctgcctcagcctcccgagtagctgggactacaggcgcccgtcaccacgcctggctaattttttgtatttttaatagagacggggtttcaccgtgttagccaggacggtctcgatctcctgacctcgtgatccgcccgcctcggcctcccaaagtgctgggattacaggcgtgagccactgcgcgtggcctgggttacccattttcacccgagcctgtcagaacactctgccctcacatgactcaatccacaaaatgaccagcagatcaagccactgccccagtgtaagtccaaagacaggccaggtggaggcggctccctttgggtgcaggcagggggtgtacctggcactgctctgtgaaggaatctttatacaagctcttcagcgggagagaaacaagtgagatgggactgagaccccagggcacagacagactcaaacagggagcaggacgtccccagagaagccccacaggatgtgcagaccagacactccaacagccaggaccctgcagagcgagtgtgtgtgtgagtctgtgtgtgcacgtgtgtgtgatggcgcgagtgtgcattgtgtgagtgtaggtgagtgtaggtgtgtgtgagtgtgcatgtgtgtgactgtaggtgtgtgtgagtgtaggtgtgtgcacatatgaatgtaggtgtttgcatgtgagtgtagggtgtgtgagtgtagggtgcgtgagtgagagtg

SEQ ID NO: 29873 - DNA, 1054 bp, Artificial sequence
  DNA replication origin
tttcctttgtcagggtggacctgctcaccggcgtgagatgtgccatggtcagggtggacctgctcgccggcgtgagatgcgctgtggtcagggtggacctgcttgcccgtgtgagatgctctgtggtcggggggacctgctcgccggcgtgagatgctccgtggtcaggggggacctgctcgccggcgtgagatgctccatggtcggggggacctgctcgcccgtgtgagatgcgccgtggtcaggggggacctgctcgcccgtgtgagatgcgccgtggtcagggggacctgctcgcccgtgtgagatgcgccgtggtcaggggggacctgctcgccggcgtgagatgcaccgtgtgtgggctgctctgggtcccagccctggcagggttggcggcaccaggatggtctcatcaccatctagtccagtgctgcctctttgacgcccctgcagcgtgagggccgcatgcggggcctgttgccctggcatggactttctgaagtagcatctggaagggcccacatgagaagtattcacgtgtgagtgctaactgtgagccagggatgtttccaagcccttcgtgcctacgatctatccacacagtaaccctagcagggaggtgccccccagaccattctgcagctgaagagagtgaggtgtggggagactaagtcatttacccaaagtggcagagccgggattcgaacccaagccatctgctcctgtgccggcactctcaccctacactctgcctcccgccgccgtgcggtggaggagtgggggctgccagaacacagcggcccccttggagaaaggcttgtgggggcagtggttgttttgtgttcaccctaagagaagcttggtgtgccgtcctttatcctgggagtcgtctgtgtgtttgacagcatttggagcaacaggttaggatggaagccggcttgccatggacacacatctctcagataaagagagaaaaggaggacacagccgatcggatcctctgcctgtcacgctagcagcaaagtgatttctgttgtaaaagagtatctcgccg

SEQ ID NO: 29874 - DNA, 903 bp, Artificial sequence
  DNA replication origin
agtgctagccgggaaaatgtctttctttccttgatgaagtggcgggtttaactggaaggatgtcgagcaggtttaattggaagggtgtcgagcaggttttttgttttgtttttgagagggagtctctctctgtcgcccaggctggagtgcaatggcgggatctcagctcactgcaacctctgcctcccaggttcaagcgattctcctgccgcagcctcctgagttgctggggttacagacatgcgccaccacacccggctcatttttgcctttttggtagagacagatttcaccatgttgaccaggctggcctccaactcctgagctcaggtgatccgcccacctcggcctcccaaagtgctgggattacagacgtgagccgccgtgcgccacctagagcaggtgtaattggaaggatgtagaacaggtttaatcagaaggattgctgcttttgtccagtttgtgcctttgccgcacccagagccactgctggaagtggacactcctgggctctccctttcctttgtcagggtggacctgctcaccggcgtgagatgtgccatggtcagggtggacctgctcgccggcgtgagatgcgctgtggtcagggtggacctgcttgcccgtgtgagatgctctgtggtcggggggacctgctcgccggcgtgagatgctccgtggtcaggggggacctgctcgccggcgtgagatgctccatggtcggggggacctgctcgcccgtgtgagatgcgccgtggtcaggggggacctgctcgcccgtgtgagatgcgccgtggtcagggggacctgctcgcccgtgtgagatgcgccgtggtcaggggggacctgctcgccggcgtgagatgcaccgtgtgtgggctgctctgggtcccagccctggca

SEQ ID NO: 29875 - DNA, 2013 bp, Artificial sequence
  DNA replication origin
gggcacagtctggaggggagacagacgagagctaagtagaatgcaggcaatgacgccgtaacagagatctgcacagcgaccattgcacagcgtgggggcaggcttctgagaggaggtaacatgctgaaaagacaacgtgtacagctgacattagtacacaacctcatcggagagagaagaagcggagggaatcccaggagcaggggccatcatgctcaaaggttccaaggtacggcaatgggcgatgtgtctggggaccctgggggtcgaccagtgtggctgagcagagtgtgcaaaggtgaggatgctagaaggccaggtgcggtttcggggcggggcaggggttgcccttgaaggtggggtttgggggtgggggagggggtgcccttgaaggaggggtttgcgggcgggggtggggggaccttgaaggtggggtgtgggggcaggggagggggtgcccttgaaggtggggtttgggggcaggggagggggtgcccttgaagtccacgccagggagtttgggttggatccacccgtaatgagggctggcccatagggcagtgacgtgaacaactggtactgtagccaggttgttctgggagctgtgtagacagggtgagactggaagttggtggactcattaagggactagtgaaacaatagtgccccaacctgattgaacccagtgaatggggggaaatgagaatgtcaaggcctgtagcttgggtagatgcgtcagtgagaccctattcataaccagagcctaaaaaaacacgcagagccagttaaaagctctaatatgtgtttaaagaacaaattaatgaaagaatgcgtagacaggccaggtgcggtggctcacgcctgtaatcccagcactttgggaggctgaggtgggtggatcacctgaggtcaggagttcaagaccagcctgaccaacatggcgaaaccctctctctactaaaaatacaaaaactagccaggtgtggtggcaggcgcctctaatcccagctactcgggaggctgaggcaggagaatcacttgaacccgggaggcagaggttttagtgagccaagatcgcgccattgcactccagcctgggcaacaagagagaaactctgtctcaaaaaaaacaacaagtagacagagagggaaggagaaggagagaacaaagcggaagaaaaactagtgaagagcagggaaaggaatctgggttttttttgttttggtttggtttttggtttttggttttttgttttttttttttgagacagagtctcactctgtcacccagtctggagtgcagtggcacgatctcagctcactatagcctccgtctcccaggttcaagcgattctcccgcctcagcctcccaagtagctcagattacaggcgcccaccatgccaggctaatttttgaatttttagtagagacggggtctcaccaagttggccaggctggtcttgaactcctgacctcaaatgatccacccgcctcggcctcccaaagtgctgggactacaggcatgagccaccgcgcccggccacgagtctggttttaaacccgtggagctaaaggtttctggcaagcagggaaaggacacgactcattgactgagaagcaggaggcgtccaacacaaaggcctcttgggaacccgctggggtttggcgggcgtcacctttctgcatcttgggaggagagctggtgggaggagcttttctgcaggtgtctctttctagcctccggcagggggcggcaacagaagacggttcagaagaaagaatgtggccaagtatgtgtatttcaagccaaaggattctagaaacttctctcacaggtacggaatccaaccacagtgcccactgtggtgaagccactgcgctggtccgagaagaaagtgacaaacaaaatgacatggagcccaattcatcctgagagcagaacctcggagccatgtggttaagatggaaattccacttttagtccaagcaaatcttctgatgtatcaagtttg

SEQ ID NO: 29876 - DNA, 1368 bp, Artificial sequence
  DNA replication origin
ccctcccttgccctccaggtattcctgctgtcattaccatcttgcattggtgcgctacatttgttacaactgaggggctggtatgggtacattgttactatctgaagttcacagcttaccttagggtttattgtttgtgttggacactgttggttctgacgaatgcataatgaatgacatgcatccaccaggttgggatcatacagaattgtttcactggtctcaaagtctcctgggcttctggaaccattttcgattgtcactaagcgggcattactggcatttcctgggacagcgatgaacattctacaatgtgcggaacagcacccccccacacaccccaccccgccccgccccttcccagcaaagtgtcagcagtgctgagactgcgagacctgctatgcagacactgacttgccaggtgcgtttgtgagtgttttgtgggtggggatgagcttgtgaggctccagtgctggaaacctggtgtttggatgaggggtggcctggctgtgcgggggcagaagagaggcaccaggtggatttggagagtcctgggaagagggtcagctgtaagtgagaggcagcattccagccataatccctacacacattcctgtaactgtcaccgtcttaaattcagaacatgaggtctgagtccaattaaaatgccctaagttctaattgttgggctgtgcatggtggggttagcttagttccctgttgggttgtgcatggtggggttagcttaggttccctgttgggctgtgcatggtggggttagcttagttccctgttgggctgtacatggtggggttagcttagttccctgttgggttgtgcatggtggggttagcttaggttccctgttgggttgtgcatggtggggttagtttaggttccctgttgggttgtgcatggtggggttagtttaggttccctgttgggttgtgcatggtggggttagtttaggttccctgttgcgttgtgcatggtggggttagcttagttccttgttgggttgtgcatggtggggttagtttaggttccctgttgggttgtgcatggtggggttagtttaggttccctgttgggttgtacatggtggggttagtttaggttccctgttgggctgtacatggtggggttaccttagttccttgttgggttgtgcatggtggggttagtttaggttccctgttgggttctgcatggtggggttagcttaggttccctgatgggctgtgcatggtggggttagcttaggttccctgttgggctgtgcatggtgaggttagcttaggttactccccaactaagtacagtctctgatgtatctgtgatggaactaaaagcacaagtcttgggttg

SEQ ID NO: 29877 - DNA, 2797 bp, Artificial sequence
  DNA replication origin
gttgtatgcctgtatcaaaatatctcacgtccaccataaatatgtacaccataaaaattaaacaataaagaaagaaaacaaaggaaacaaaacagaaaaaaaagaagaaaataataaagtaaattggagatgtacacgggttatatgtaaatgctattttatatcagcaactttggcatcacgggatctgggtactgaggggtaggagcggccctgggaccacctgcccacaggcactgagggacggctgtggaactgtacagggcccggccctgcgctggggacctagcggtgaacaagcagcctgggaaaggaatgtttaaaagctcccgggcgactgaagatcagccaggggtgaaaaccatcactcggtgcttcacggaacaaacgcttgaggcaaaacctaagacagctgggtcccaacgcggggcctcaccccggcccgtcccgccccagcgctcggaggctgagagcagcattctcagatggtactaaatccacatcccgggacacgaggaaacagcagggccagggcacggcctcctcctctccccgcggcctcctcctctcccccctgcctcctcctctccccgcggcctcctcctctccccctgcctcctcctctcccccctgcctcctcctctcccccctgcctcctcctctcccccctgcctcctcctctcccccctgcctcctcctctccccgcgggctcctcctctccccccgggctcctcctctccccccgggctcctcctctcccccctgcctcctcctctccccctgcctcctcctctccccgcggcctcctcctctccccccggcctcctcctctccccgtggcctcctcctctcccccctgcctcctcctctccccgctgcctcctcctctccccgcggcctcctcctctccccgcggcctcctcctctcccccctgcctcctcctctccccgctgcctcctcctctccccgcggcctcctcctctccccgcggcctcctcctctcccccctgcctcctcctctccccgctgcctcctcctctccccgcggcctcctcctctccccgcggcctcctcctctcccccctgcctcctcctctccccgctgcctcctcctctccccgcggcctcctcctctccccgtggcctcctcctctcccccctgcctcctcctctccccgctgcctcctcctctccccgcggcctcctcctctccccgctgcctcctcctctcccccctgcctcctcctctccccgcggcctcctcctctcccccctgcctcctcctctccccgctgcctcctcctctccccgcggcctcctcctctcccccctgcctcctcctctccccgcggcctcctcctctcccccctgcctcctcctctccccgttgcctcctcctctccccgtggcctcctcctctcccccctgcctcctcctctccctgctgcctcctcctctccccgcgggcctcctctgttaggacccacctccctgcctcagtctggaaaggggcagccacgtgaggacctctgagaccctggagagccactgggctcagcctggagcagtgggggctggggtgggaagacgccatgcattgttcagccccagcatctgcctgggcaccttctggtaacagtcatttggccagcagcttctcgggggctaacggtcaatgccagaagcaattagccccaggtcctggtcctccttggagccaaaacaattagtaggctgaagacagcctgatgcttaagaaatcacttttttaaaaaggaaaaaaagattgcttaaaagaagccccttaactctgaaggcagttccatccaccttacaaattcggtgccctgtgaatacacatccatgggtcacagcagggaatctttttaactagaaaaagagcaggagaaggaattcagatcaacatcacggactgcagcagtaaagctggtgcctgttcgcccctttcccctccaggcaggaaagaatcaaggaagaatttcagaatctttttatacaagaaagggattcggtgggggaagggagtgggtacagagatgaagaactttagggtttgctatttcaagcttaaaataaatcccaacgagaaaggatccgaaggcttggttttatttttaagatcttatccaaggcagggaactatatctggttttcaggggtgtgtggggtgcaaacggccgggccagcacagtcatttcatcccctgtcgattccccaaaagcaaaaccaaagctcagcatgtgcttctagaactttctatatctggtgttcaggggtgggtggggtgcaaacggccaggccagcacagtcatttcatcccccgtccgttccccaaaagcaaagccagagctcggcatgtgcttctagaattttacaatcttgaattacggcttcaaaataactcacattccactataaggaggctcagaggatgccaccgagtggacggacgtgagcaggaccacagagacaacccagtgggacacgcaacactgttcccaagatgttagcaggggaaagagtcggacgaaatggcgaagtgtttggcacaaagaagaccaacaaatgacacaccaagccagtaaagacacctccgtaagaaagacacattcctccccaaatctactttaggagctactgctgtcaactcttgactttctggaagtctaactagtacaaggtccaatcctcaatcgcttatgaaacaaaatcagaaaaaaccgggtagaaccctagtactccgcattataaaaagcacttccggccgggcacgg

SEQ ID NO: 29878 - DNA, 1045 bp, Artificial sequence
  DNA replication origin
cctgtaagcccagctacttgggaggctgaggcacgagaattgcttgaacccgggagacagaggttgcagtgagttgagatcacaccactgcactccaacctgagtgacagagtgagactccatctcgaaaaaaaaaaaaaagactgaacagcttctctttagaactttctaacacacccccaggtggaggccagtgttgcaacgatcgcacgagggaccagagggtaattctgcagcctgatctctctgttgagatgctcacgctctctttttgcagacatgatgtggttaaagccagggtctttctcaatcaatacattttaaaaatgcgagctgggggcgggggcgggggttgggggcgggagggtctgtcagctgtgtggagacaaacctcctgatccaggcgctctctggcagaggcgggcaagccccacttccatgtatggaagtgaatgaaagcagtaaaacctcaggcatgagtctgggcagggctgggggtgggggccggcattcctcccagcagggccagccccagaggggcgggcagcaggaaccttcacctggggtcccgtgggtatttccctgggagagccacaggggcagagaggacgggaggcaggaaagcaatgagctcggcacactcagtagacggagggcacccgggaaggggagctcagcctccccgagaatgcaccagagcctgagtcctggaaaccagggccacgcagctcccgcctgccctgacctcagtcccctggaatgcagaattctccacggtcagccatccatcaccaccgctccctcatggccagcgctgaaagaaggggcgtttccgtttttgtggggggcggtggtggttgtggtttttgtggtctgagaaactcatgacagttacccacctcctgccaggacaaggccacaggaggttgcagaaaattcaggtcacactgtgggggggctggggtcagagagaccaaggttggaacccggcaggtaccacggacggtcacactgtgggggggctggggtcagacagaccaaggtt

SEQ ID NO: 29879 - DNA, 1245 bp, Artificial sequence
  DNA replication origin
aggcaggaaagcaatgagctcggcacactcagtagacggagggcacccgggaaggggagctcagcctccccgagaatgcaccagagcctgagtcctggaaaccagggccacgcagctcccgcctgccctgacctcagtcccctggaatgcagaattctccacggtcagccatccatcaccaccgctccctcatggccagcgctgaaagaaggggcgtttccgtttttgtggggggcggtggtggttgtggtttttgtggtctgagaaactcatgacagttacccacctcctgccaggacaaggccacaggaggttgcagaaaattcaggtcacactgtgggggggctggggtcagagagaccaaggttggaacccggcaggtaccacggacggtcacactgtgggggggctggggtcagacagaccaaggttggaacccggcaggtaccacggacggtcacactgtgggggggctggggtcagacagaccaaggttggaacccggcaggtaccacggacggtcacactgtgggggggctggggtcagacagaccaaggttggaacccggcaggtaccacggacggtcacactgtgggggggctggggtcagacagaccaaggttggaacccggcaggtaccacggacggtcacactgtgggggggctggggtcagacagaccaaggttggaacccggcaggtaccacggacggtcacactgtgggggggctggagtcagagagaccaaggttggaacccggcaggtaccacggacggtcacactgtgggggggctggggtcagacagaccaaggttggaacccggcaggtaccacggacggtcacactgtgggggggctggagtcagacagaccaaggttggaacccggcaggtaccacggacggtcacactgtggggggggctggagtcagacagaccaaggttggaacccggcaggtaccacggacggtcacactgtgggggggctggagtcagacagaccaaggttggaacccggcaggtaccacggacgacaggttcctgctgcccatccctctgggaggaatgacggccagcagagccaggacccacttctccgtcctggaagacgcaatgagataatacatgaaaagcagtaacaaggtggtcctagaggggtcctaggctaccccgtgttaaagatgagagccatgaagaccacttcaaggtggtccctggaatccagtgaggggctcagtccacaga

SEQ ID NO: 29880 - DNA, 1247 bp, Artificial sequence
  DNA replication origin
cctctttggttcgagtgctgcgctgcgcccgccctggaaagttggacccccctcggcccccgggatcccggctcgagcccctccgtccgcacacgctgggagcctcgggtgggggcggctgcgctcggggatcccggttccgcgaccccttcacccgcgagcagaggcgccaggcccttcctgcctccgccgccgacccccgcggattcccacagtggggaggggaggggaggggagggcgcacgccccccgcccgtggcgcccaaaccagcgcgtttcctttctttccgggagaaacctgccttcccggagccccttccccggggaccggggacctgggggccgaggccgaggtcaggagaggcggccggtgaccgtggccgtggctgtggccgagaagggcgctcacggctccgtctcccgcccccgcctcccccgccccaggctgagttcgcggccaccggggagctttgcattgtctggccgtccagcctcctccccagacgcctcccgggcgcgggaacagcccgggctgtgcagagctcagctgcgtggtggcccctgtggtcccggggtcttcgagttaagggctgagctgaccccatcgatgcacattgactggaagaaggaggatttggggaaatggatactttgctgtcaacttctcgtgtctcccagtttgctgccgagttgagtttgggtttctgagtgtgtcccttgggtgaggatgtctgtctctgtgataataaagcacatccaggacattttgtaatgaatggagtcagaaaaagttttggagcgctgttgcttcgtgagtgtatatgatgcaacgtgtgaatccagcccctttccctttttgaggaaagcctgtttctggagtggacagaagggctattctgggggcgtttagtttcctctggggagcatggcgaggcgtgccacgtgttccttttatatgtgcagaatcttgttgagaagcatgatttagatttactgggagcaaaaggcttacactgtgaccccaaatgtcttgagtaaatcatccatcccgaagcagtgggaggtagagattcgagatttaaagtatgaaatacagttgatccgatgcagtttgtaaatttcatattgggaaaacataggttcactaaccactcagaggcaagagttggcatttttactgctttttaggttattttgcccattttgattgacatgcttgatatagtatgaatatgcatggccagtac

SEQ ID NO: 29881 - DNA, 1086 bp, Artificial sequence
  DNA replication origin
ccggcggcctgttactgtggctgggcccggatctgcacctgcttcgtgcaccagtgggttgggttggggggaggcgctgcgtggccagagtactcgccacggaccacctgtttttttgttttttttgagacggagtcttgctctgttgcccaggctggagtgcaatggagcgatctcggctcactgcagcctccgtctcccggcttcacgccattctcctacctcagcctcctgagttgctcggattacaggtgcctgccactacaccccgctaatttttgtatttttagtagaggcggggggggggtgtcaccatattggccaggctggtctcgaactcctgaccttgtgatccacccacctcggcctcccaaagtgctgggaattcaggcgtgagccaccgcgcccggcccagaccacctgtttaatccagcttctccctaagcattggggagcatcctgccagctggtaggaaaaaaaaaatctctagaaatgttctcaactatccatagacttgacatgaggatggagcggattcaggagcgcggccagcattggtctggaggccccgcggcgtcctttgcatccatttgtggggctggaagacagattcgctggggggagaggccccggcgacccctggacggaaatcccacactgagacctggcaccctaaccagaccccaccagaagctgcgagggcgtcctcggcccccttagaacagcttggaacacacagaggagtcagtgtccagccaggcccggcctgatgcagtgaggacggcgggtcctataagcatctcagggtcagtggggcccggagcggcctaagggtcaggcttcgtgcagggagaggaggagggaaaggccggggaggaacaggaagagggtgaagagctccgcggggagggggcgggatccctggaggtctggagggaatttagaactggggaggagagaaaatgcgggccgggctgcagcccgggaaagcgccggctcagcgggcccttctcctttcttcacttcggccgtgggctttccagggagagtgcggcgtttcgggtccggcttctcgcccaagcagt

SEQ ID NO: 29882 - DNA, 1660 bp, Artificial sequence
  DNA replication origin
ctcctaagagctgagctgcctccccgcgacccgggacacccagcgtggcatgtgcattcctcccccgttcagcctgtggtgtttcctcagcagcctgaccgcctcctcccccattctctcctgaccctctggctatctcgatagcaggtcacctgtgagtctttacactcaaaggaaatagaacagcagggaagggaactgaaaagcagtagaagaaacagtcagagatgcctcactgatagacaggaggccgaacaggtaaaccccagaagtggagattcccaaacggaaaattccagaaatgggcgctccagctctgtgctaagctggggacgagtgtgagtgtgtctgcttgtccaacatttgcacaggcagcaaggcaaagcaggtgtgctcccaaaggcggagtctgaggaggggccggcagcggcaaacggcagcatcaaacagaccactgctgccgcggcaacccagggcctcttcagagctttcaaggcgatggagcgaagaccaagggtgcacatgcatgcaggcaggctgggaaggaagagcgggtggaggaagactgaggggaggctgccaggagaccgccatctgggagcagggccaagagagaagctggcagcagttacacagcgcaaaataaaaggccttgggctggactcaggcggaaagaaagtgctggaggaaatgaaagaacaaagcgggctgtctgtgtgcccacgccgggccggtcactaccttttctgcctgacaagtgtacataaaacaattcccgaacagcacggagcatcagacacaactagaggtatggagggcaggaggtgggatgcggtggtgaggctggggctgggcagccggctttgtacaaggtggcacaaaagacgtacgcattccagttcttggaagctggcttccctcgagtctggagtgctgggtttgggagttttctattgcagtctttcaagtctgagttggaccccaggctggaggggctggttccaccacccgcccgcagccaccctgcctcgggctacacgtcggtggagaagtacagtgtgttccgcttgagttctgcgaaggaaatgggggggtgctgcaggtagtagaggaggacctggacctgtggggagacaggaaggcggaggctgggctccctgtcctaggcctcgtccttgctgactccagcctgtgttgcccctcccactccctagactggctccggccaccgccccttcctggggagcccaggtgtgtttgcctttctgcagccgtggaaggtgctacggggcagagggtcgggggcctagggccacttccccaacctggccataagcttctgctctgtcctgaggcggccacagtccggcccctgctctgggtcttgcaggaatcccagggaagcctcccgcccttggaagcaacctcagagcttccacccatgaggacaagggcccagcatctccccacccctgggcttgctttctgagactgaggccctcctgagaatgcagccagcatctctgggccctggtctaggctcacatgtttgttttggcctgggaggggcagaagtgtctacagtcctgcctccctggtgacaccccatagcccatcaacccagcttcccacgagggaagaggtgtggggactctgagct

SEQ ID NO: 29883 - DNA, 1862 bp, Artificial sequence
  DNA replication origin
tgggttgtattgtgggccacagtcaaaaaaggtgaaacccactggtcttggcccacacctcactagacatagggaaactgagtccccacaccaggcggagacttgcttgggttagtagcagacctgtccttagagccctcaacttccagatcctaaattcagacccttcttgccttcccaccaccctttctagtcaggtccaaccaagagtggctaaagttggttgtacttgtagcaaagttcagaggtcctcaggcttgcgtggggaggtggtccctgggcgtcccttaaacccacctgcacgccaggaccggggagccccctcagactgctctgcggaacaattcttccctgagctcagccccagctcagggccaggccccccgctgcagctcagccacgccaggctcgggagagccagtggagacctggacgcgcccggggctggtgtcttgtttttcccatcatgaaacatttttcctctggtttggccaggactagagccccaaccaattccgaaagcatttggcaagccttgtggggaggagtgggaagggaaaattcattcggcttccaccctgggaactgggcacagtctgttcccacatctgggcccctggctggaccgtgtgcgcgcgtgtggtgaggggctggccccgctgcacagctgcctgttggcatcacagtgtttgtttgcctgtttccaaagcaggcgcagccacagctcctgcctggagggtgggaatgatggtattgagggtgagaggcgctgcttagggtgggtgggtctcagcccagaaacattttttgagactgaaggagaaccagaggccctctgatatgtttgctgaccctgggcctgcctggacaccagccctgatggcagctcctgctgttaccccagggaagcatcgcagagcatctggcctgttgagtaagagaagcaggagaggatccagagggaggacaatcctgggtcccacgaggcagacggagaggcataggaggcagccctgggtcccatgaggcagacccttccggagaggcacaagaggaagccctgggtcccacgaggccgacctttccggacaggcacggggggacagtccccgggctcatctggaagtagggctgctcctgccccagcacagctggcagagccccgggtctagctagtgactcctgctgggctccaggccctgcctgcctttctcccctgccccacccaccttaactcttcttttgggccacttagcacatgagaaagcaacagagcggtaggtcctggaggcagctaccggggttcaaatcccagctctaccagttgctggctgtgtgaccttgggcaagtcacttaacccctctgtacttcggtttcttcatctacacgatgggggtgacgataatcatatttacctcaaaggactgcggcgagtgtgagttgttccagggagttttcagaacagtatctgctctcaggcaagggagctggagttggcatctgtgggctccctggctctggcagttcaccatcagttcagggggacccagcagctggagatgttagcacagaacactggcacatggctggggccctgctctcctggatgagtccccttcccccgggggaggtccccactcctaggagacagagacgaggtgaccccttccaggagtccttcaggagttcccacagcgaaggccaagggtcctggagctccgagtggctgctgaggaagggcttctttcctccccatcttctccttcttagggttgccgagaaggagcccatcaacaaaatgtcacttcacaacctggctaccgtgtttggacccacgttactgagaccctcagaagtggag

SEQ ID NO: 29884 - DNA, 2368 bp, Artificial sequence
  DNA replication origin
ggagcgtgcccctgaatccgagcacggggagctggccgggagcagccctccgggcagaggcaggagaaatggggtcacctgccccagggggtgagaggtgagccgagaggaagggctgagaccctcaggggcatccccaggatgttcctgaaactcagccctggaggacgctcaggtgtgcgtggagcaccctctgccctggagcctcaaatcctctccccgctgcggggccactttgctgattcctgccccaaacatgaggtcacttcggtccagaaaggcgaggcgacctccaccagccacctacgggattcttggcagagaatccacgctcaccttcgggtcttcactcctgctccctcggaggtgacggagccccatttcaacccggtgcccctgcctgctgggttttcgccgcaggggacctggtcgtctcctggacatgagcccccagcgccagcgtttctctttgggagaggcctgaatgcgcagtcatgatttgaccaggcgaagtgcccagacaaagagaaaacagtcggccggatgcaggggctcacgcctggaatcccagcactttgggaggccgaggcgggtggatcacctgaggtcaggagttggagaccagcctggccaacacggtgaaaccccgtctctactaaaaatacaaaaattagccgggcgtggtggctcgtgcctgtagccccagctactcgggaggctgaggcaggagaatcgctcgaacccgaaggtggaggttgcagtgagctgagatcgcgccactgcactccagcctgggcgacagagtgcgactccgtctcaaaaaaaaaaaagaaggaaatagttgagctgctctcagtgaccatgtacggcccagtcgtcgacccctggcccagtcgttcgtccgccttttggctccacgatgttttgcagcctgtttctgtctcctgcctgtggcccaccttggggaggccccagtgctcgtgtgcccctggtggtcttcccagcctgacccttcacgagctccctctgtctccctgcttcaggtgatcagacatcccccaagtacctgctcccctgggcccatggaaggcacctgtctgctgggaccagagggtgagcagtcaggtgtcccatccaccaacgtcccaggggccagcccctccaccccggtgctaatctcatcaggaaatagcacagtccacatttcccaggagttataaatagccagcgcagttgcgggcagcagcgtttctctggaaaatgtacgctgtgcctctccctccctcctctgtgtttaaatgatatcctgaaatagacttggtttctggaggctgatagcctcctgggaaacagagcgtcgttgtcagggcaccgtggggccaggcaggcctctctgagcggataccagggccacacctgcagcaggcaccagggccacacctgcagcagataccagggccacacctgcagcaggcaccaggaagatgtcagggcttgaggggcttacagcttaggaaagtgcccctggcccaggcctggcctcagaaggggctggagtgtgtgagacagcagcaagtgtcgcctgggaggctgcagagggtagatcttagtggagcaggaaggcagagaggacccaaagtttcccactgtgacctggggctctccgagaaggctctctggaggaggcggggcgagaactgggccttagcatcaggaggtgcagtcctgggtcagatgtgcccaggttgaacctggcagctggagcggaagtgatgggcacgaggcagcgggagggctgtactgggggtggcctcccagcaccaggtctgcccaccgggtcgggacacacaccaggaggcccgatgttgcctttctgaggaagcagcagttacagcagctgcgggtcatggacttcacacattctgcagtttcagcagagagggtgctgggggccttgattttgaaccccagctctgacttcctaggtgtgcactgggtaaattcctcactctcgttaagctgcagcatcctcatctgtgagatgggagcggctatgagagcttaaaccgcatatgtctgctatcatgatcatgaacgcagatgctgtgtgtagaggattcatcagtgtcagacttgcaggaagagctcgagataagtccgttgctctcactcttccataacagccctgtgagtcaggtgtggatgcctccatgaggaaattgaagttcacggaggtgaaaggccttgcccgagtgcgcacggttgaatgggagactcagatcagcctgcctccaaatcctgcacactccccccgaccaggttgtgtccaggtccccctgagacttgggaagggaccattggctcagct

SEQ ID NO: 29885 - DNA, 2675 bp, Artificial sequence
  DNA replication origin
caggtgcccgccaccacgcccggccaagttttgtatttttttttttttttttttgagacggagtctcgctgtcgcccaggctggagtgcagtggcgcaatcttggctcactgcaggctccgccccctggggttcacgccattctcctgcctcagcctcccgagtagctgggactacaggcgcccgccacctcgcccagctaattttttgtatttttagtagagacggggtttcaccgtgttagccaggctggtcttgaactcctgacctcaggtgatccacccgcctcagcttcccaaagtgctgagattacaggcgtgagtcactgcgccaggcctaaatgtgttttgaattttgttttacatttttaattttttttttttttttttttgtgggagtctcactctctcgcccaggctggagtgcagtggcaccatctcggctcactgcagcctccatctcccaggctcaagcaatcctcccacctcagcctcccaagtagctgggtctacaggcatgtaccaacatgcctggctaatttttgtattttttgtaaagacgaggtttcgttatgttgcgcaggctgatgttgaacttctggcttcagtggatccacctgcctccgcctcccacagtgctggattacaggcgggagcccccgtgcctggcccagactgtttttatatatgaggaatgaggctcagagagtgactcagatgaagtcacgtgagtggcttagccgaggggcgacgttcagaccccggccactcagcctcagcgcaggctctcacccgcggtgtcctgccttccgtggccggttggggttgggctgcgtgccccagatgggagcgtctggagacgccgggctcctgcccgtcaggcatcagtgtggtgcccgtcctggcacgctgtgcatagcaacaggcaagacggttcttctcgacgacgccactgaacgtgagactcggagcaaggcaaggcctgggaggggccgctcagagctgacctgggccctggaattgctggagcccctcacgtccccggcagcaagctccatgcccagaaagtgttctgggcccgggcagggagggtgaagctggtatcagagaaggctgttgatgctgctttttttttttttttttttttttttgagatggagtctcgctctgtcgcccaggctggagtacaatggcacaatctcggctcaccgcaacctccgcctcctgggttcaagcggttctcctgcctcagccccctgagtagctgggtttacaggcatgtgccaccacgccggggtaatttttgtatttttagtagagacagggtttctccatgttggccaggctggtctcgaactcctgacctcaggtgatcctcccacctaggcctcccacagtgctgggattacaggtgtgaaccaccgcgcccagccctgttaatgtttcttaaccactccaggtccagctcgaggcttcagagcccatggaggtctgacaggtccttggccttcccgtggcctccagcgtgaagcttcctggtcaggaccacagaaggcctctcatcttggactttgacctctgagggcgcccctttcctttcaggacagggcctccgtgttgctttggccctggcctgttccttttctcaagagggccccactgcccctgcccttgccactctggcatcctcgacctgccctgggctggggcagggccggcttcctggctggtatttgtagcccagttctgagctgaagctgaagcctccaggctgcctgcacagggaggcagtggtggggtgggctggccctgaggaagacggagccctaggccgctgggggagatgtgcctggctgtggggcctccaagagcagcccaggtttggattttgtctgcttctcctcaaggtcagccatgcccagcccgggggctaaaagcaaagtgggtgccagggcaggcagaggctctggagtggacgtggggccggcagaggcgctggagtggacgtggggccggcagaggcgctggagtggacgtggggccggcagaggcgctgtagtggacgtggggccggcagaggctctgcagtggacgtggggccggcagaggcgctggagcggacgtggggcaggcagaggctctgcagtggacgtggggccggcagaggctctggagcggacgtggggcaggcagaggtgctagaatggacgctggggaaggcaggttgctgcgggtgctaagaggctagcctgccttggacaaaagcgtcgttcagagctgctaatccccttcctcccatgaggcttggggaacttcgaagttctctggtgttggaggggaagccagccgaggccctgggacacggcatcagcccgagcctatctgtggctggcctgggtatggcaggtgggcacaccttggctgcaggacaccttggctacaagggagcctggctgaccctgcagggtgagggctggagaggcggagcctgcctggcctagcagtgtggatgccaagccatgggaagatgtgtggagagtttatggagcctggcccggtgtccccaacccagctgctgagctggaagccaggggtaggtcctggcagcccctccctctctgccctgcctctctcggagtcgctcggagcagtcacgttgacggaatcctccggcgcc

SEQ ID NO: 29886 - DNA, 1464 bp, Artificial sequence
  DNA replication origin
gagggggctgcagacatcaaggcgggaaccctgctctgagtgaacttggcaaggtgccgcttcttggtacctagggagggtagaagggcgctggtcctccccggcctccctgcaggccacagacggcttggccagccagcggtgctgggcgcggtgccccagcttttggatggctctggaccagggagaggagaacctgccaatcaagggggttcctcaaaggccaaagctgcctgagcccagtgttgctgtagtacccagaggcaatgaggccccagacattttggaaggagcccccaagcctgcaggtgtggctgggggagctgccccaggcattttggaaggagcccccaagcctgcaggtgtgagtctgggggagctgccccaggcattttggaaggagcccccaagcctgcaggtgtgagtctgggggagctgccccaggcattttggaagcgcccccaagcctgcaggtgtgagtctgggggagctgccaggtgttggccacagggcgctggtgctggagaggcctggccctctgctgagtggcctcgctcactgcccaggtggttgggaactggtcagcaggtgctgttctttgacctcgtttcccctgtgaactcatgctggggcaggaagatgtttgtgtcctgacggccccccagcaccttcgaggaacagacagtcccctgcgcctgtgacctgcctgccccaccctggggagaaacgcagcgtcagtcctgggtccagtgagccgtagacccttggccctccaggatgggccctggagaggcgggaggggcccgtggagctggtcctgggcttctgtagagaggccaggaggccccaggatccccacagagacttccccagtcccgcttcaagacagcggaaccagctcctgagccgaaatctggagggatctcctttctggaccgtgaccccagccggggctggtaccgatgaccggcacagccagagccgtgacatccacagcgcccttcccatccgatgcctggatgccgtggctgtgctcggggaggcctccggggtccccagcccctcaggctcatgtggcacaaggtgccagagaagacagggcgccaggccggtgggagtcaaggtttcccatttttctcgtctcagtctgctacttaactgctgtgtgcccgcgagtacatccctttgcctctctggttctctggtatcagctcaatgaaggagctgaacaggatgatctcctggaatccagttcatgtgatgatcttggccatgtctcaagattcctagtcctaaaccttaaaccctgagcaccctgggagagtctgtcacagggctgcacctgggccaatgccagccattcagtggacacgggagcagggggtttagtgggaacacagggcttcttgagccctgtcctgaagcagccccggcggggagccattgtcacctccttcccccatg

SEQ ID NO: 29887 - DNA, 871 bp, Artificial sequence
  DNA replication origin
cccagagctcaccatccatccccaaacgtcagggttggcaagaaactgacctggcaggttccgggtccagcgccagccaaacagggcgcttccagtttacctgcccctttgaggaggtgcctggtgggcagggggcaacttttaaacctgaggtcccagactttcagttctttccctatgcatttgtggccggcagaactgagaagccccttcaagaattccttagctgggtttgcctctggcagtgcctggtggctccgtgtctgatggggatctctgggcaggggtggtggccaggcagacgccgggctattgagctgctgagcagttggcgtcagtgcagctcagggtggccccggccctgggctgctctgtgtgacgagcgattccatcccctaacgtgtgctgtgtgccacagtgtgtccgtgtcgtggacgcaggggtcagcgctgtggcggacggagggacgtctgccacagtgtgtccgtgtcgtggacgcaggggtcagcgctgtggtggacggagggacgtctgccacagtgtgtccgtgtcgtggacacgggtcagcgctgtggtggacggagggacgtctgccctgtgcttcccacctcactgtgcgcaggccagcgggtgagcagcagagtcaaagggccaggcctcttgctttctatcctcagccacattaacctggcattttcctgcaggagcttcacagttgggccgaggggctgggactaggcagtttcgtttcggtggggtaagggaagggtgcctggtactgcccagactggcaggagggattgcctcattaactcctcgttaactttgccctgagtgatgctgtgggtgcgagaaacaccggtggccctcc

SEQ ID NO: 29888 - DNA, 876 bp, Artificial sequence
  DNA replication origin
cttggcactgtgtaaccctggcaagaactggacctcctgaccccctgtcctcacctctctagaacagggcagtaacaccaacatgacaagaatgtgaggctcacatgcagtcgggcgtttgaaagacctggttcgcggttgccacggtgcaaatactggtttcctttctgtgccgtgctggggtctgcagaggtccgaggccccagacacccctgggttttgcatagttaaacatttgggattcagcctttctcttttctctgaataccgtactctaacttgcactgttaccttgagacgtaatttgtgtcctagtctctgcggttagaaagttcactaaataaattgaaggtcaagaacaagttcttctctctctcaaggcgcccagcacggacacgggtggttgcccgtggcgtcctctgcgcccagcacggacgcgggtggttgcccgtggcgtcctctgcgcccagcacggacgcgggtggttgcccgtggcgtcctctgcccctggcagcggaaaccttttttggtgaggtgcaaagggccatggttcaaagtgacccctcaagaggcatctctggctggacgtgtgacccgcgtcgtttcgggcttttgctcctgtccctgagcagatcagtgacccgattcccactgggattcccacactaggggtctcctttatccttacatttctcacctgaggaggcttctgagtgccggtccacaagggtctggccgggtcaccaagctggctctgaggaaggtgcctggggcagaagttgggggtggggaagtgcgaccccagggcagtcagagtcttttgcccggggaggagggcagctgtttgtggccaaaatgcagcccccgcctggcccc

SEQ ID NO: 29889 - DNA, 939 bp, Artificial sequence
  DNA replication origin
tgccctcctccccgggcaaaagactctgactgccctggggtcgcacttccccacccccaacttctgccccaggcaccttcctcagagccagcttggtgacccggccagacccttgtggaccggcactcagaagcctcctcaggtgagaaatgtaaggataaaggagacccctagtgtgggaatcccagtgggaatcgggtcactgatctgctcagggacaggagcaaaagcccgaaacgacgcgggtcacacgtccagccagagatgcctcttgaggggtcactttgaaccatggccctttgcacctcaccaaaaaaggtttccgctgccaggggcagaggacgccacgggcaaccacccgcgtccgtgctgggcgcagaggacgccacgggcaaccacccgcgtccgtgctgggcgcagaggacgccacgggcaaccacccgtgtccgtgctgggcgccttgagagagagaagaacttgttcttgaccttcaatttatttagtgaactttctaaccgcagagactaggacacaaattacgtctcaaggtaacagtgcaagttagagtacggtattcagagaaaagagaaaggctgaatcccaaatgtttaactatgcaaaacccaggggtgtctggggcctcggacctctgcagaccccagcacggcacagaaaggaaaccagtatttgcaccgtggcaaccgcgaaccaggtctttcaaacgcccgactgcatgtgagcctcacattcttgtcatgttggtgttactgccctgttctagagaggtgaggacagggggtcaggaggtccagttcttgccagggttacacagtgccaagtgaggatggggaggtccctccaaagcccttggtgctcacaagcactgtgccttactcaaacatggatgatgctttggattcaggaaaaagagctgggtca

SEQ ID NO: 29890 - DNA, 1135 bp, Artificial sequence
  DNA replication origin
tgctttcttggctgcccctttgtcaagcactgacttttgattcgtctctgtgatgccttaacccccaccccagggtcgggcacgcagccaggccctcagtcactacctctagagtgacatgagtggggccaggtgcagtggttcatgcctgtaaacccagcactgtgggaggctgaggtcaggagtttgagaccagcctggccagcatggtgaaacctcgtctctgcgaaaaatacaaaaattagccgggcgtggtggtgggtgtgtgtagtcccatctactcaaggggctgaggcaggagagttgcttgagctggggaggcggaggctgcagtgagccaagattgcaccactgcactccagcctgggcaacagagcaagacactgcctcaaaaaaaaaaaaaaaaaaatgacatgagtgggaccaagcagtggggcctgaggagtgagcagagccttcctggaggagatggctttgtggctgtgtgaaggggctgtctgggtcctcctggagccctggaaggggcaggcgaaggaggggtggagaagggtgactgaggcctcagttaggggacacaggcatgttcctacctccgtccgtctctccacctccccctcaggcggtgctggtgaggctgttgtggctcagcccccacttagcagctcaggtttgaggaagttccgtgtgcaccgtccaggggtgcgtgtgacgtgtgagccaggaagaagtggagctggtctggccgcccctgcagggacagtgaagactgaggcccggttctagcccaggcaggacgccccaaggcccccctccaccagccaggtggaagatagtccagggccagatcctgccacactagggcatcacagtgagtgacaggggtgtgggctttggagttagccagacctccgtttgtgttccagcttgtcctggccttggacacgtagctcagcttgtcagagcccttcgtttcctcagaggtaaagcggggatgctggtactgacttcatacagttgggaggggtaagtgacttaatccatgatgcctggtccctgccagccttccacgaaggacagctctgactacggctgtctctgcagggaagccacctattcctcaaaaacaccaaggcct

SEQ ID NO: 29891 - DNA, 835 bp, Artificial sequence
  DNA replication origin
cagcctgtgagcaccaggaggaaggttctgcctcagaacctagaaatgcagctgccgctttcctggagtgacctcctttttcccaccagaacgacgctcctctcccccagcccacacttgaaccccgattcctcgtcctatccgctagcgcaaatgactccaggagagggggtttctgagcagccagctagaccaaggccacaggcgccccagtggggatagcctgggagccagttggggcggggagagccccaagaggccgcccagagagtccagagcccaggaggagcctggcacccagctgaggatggggaccgaggggatgtggctcaggtctgccaagaacactccctctctcagcaccagaggatcagggcaccggctgggcatcagaggaccagagctgggggacaagaaggtgctggaggagagcagggcggacccgaggctggggggcaagaaggtgctggaggagagcagggcggacccgaggctttgggggctgcagagagcctgccagtggctcctgcccaaagacaggtgcaggctccaggatgagagagagacaagcaggccgagcatgggagcccggggtgcccagcgcccacacagggcgtgcgagttgggcgggaggatggcacgttccggggacagctgtgggggagtggggacgggagtgtcccccaactcggtggctctgtggtcactgcattcttactgtgtgttctgaccatttcctgtaccgaccctaaccaaaacctgcggactggaaggccaaatgtcttcccagaatgagacactgagactcactctaggtttttctccccacccatcg

SEQ ID NO: 29892 - DNA, 1308 bp, Artificial sequence
  DNA replication origin
atgtgccgggcagccagccccgtgggcacggtgggccccagcccctcgagaactcagctcccaaggcccgagggcacattcccccacctggacttcagccccattgcttccctccttctcactcagctgcacaagccccgggggaaacacaccatcagtcactgcaagcctcttggagacaggagcagatggaggcagtgggggagggaggaagccaggttatgtttggcaaagcagaaggcagagtctggtaaggaaaatgtttctgtgtttaagcttcgaggaatgttaaatgcctgggagttgatattaaaagaaacataaaccttcctgctgccagctgacctgggcctgtgagcggacagttcagagccagagtcccctgcaggcctttgaagtcccccagcactcagcatgccaaggcccggccctggccctccgctgcagaaccatctcaccagcctgcctttggtgggggaggcatgccccaggggcgggctgtggcttagaaagtctcgccccgtgactgccctcagagccaccgtggatggccaggctgggtgacgagtccacacggagctgttcccacgaacccgggccccacggagccacggaacggtctgtccccacagcttgtctctgccttcactccggccacacatctaaggaagggagctggcactagcctctggaatgcagtctttctgcccgccagcaggcgctgaggacatagtcggaggtggctttgagatagggcccagccctcggggatattcagggggcctgtaggaaaggcaggaggaggagggcagtctctgaggcccccacttctctctaagccccctcccagcagcccatccagagaaagcaaggggccctacggcctaagcgcaggcatttgctgctgtgatgaggcccccactctgggtcgcctgatggggcagtggggcaggagtctcagcggcggggtggggtgggggaagcatttagtgacagacagacggcagcatgcgtcaccaatgtgtgtccagcacttgtgctcctggaggccgcttcccaaatgccatctcctcgtgtgatccttgtcgtgatcctccagggagaatgacagtccctcctccccatcttacagatgaggacactggggtactgaggttaagtaccttggccaaggcatctctgcgtatggtatgtgggaaaggccatgttccctcctctgtgccatgtccccacgtctcaggcctttgtcaacgaatcccccagcccggacagagggccgtggcatggctaatggcctggagaagcagc

SEQ ID NO: 29893 - DNA, 870 bp, Artificial sequence
  DNA replication origin
gagctccagaaaatctgacgtgtccttcgtgggccgtgcttactccctcctccttgcaaagctgaggcacgcacctgccggaaagccaggcctcccagcttcggaggttcagggccctttgtcccatctttccccaggagtttgagatcgagctggagggctcccagtccctgaggatcctgtgctatgagaagtgctatgacaagaccaaggtcaacaaggacaacaatgagatcgtggacaagatcatgggcaaaggacagatccaggtgaggccagggcgccggggcgaggctgagggagcctccaggaggtggttccagttgaaaaggaattctggtcaaggagcctgctctttcgtgattttggttccaagctggttggaggaaagttcccaggaggtggttctcccctccctgctagaggtggctgcctgttgtggccccggaagcccaggcgtgtgcgtggctcctcaggtgggtcatctgcgcttctgcaagatggaaacaaccagctttgttttcacacgccagctttagtctatgggtggttgtttcccggaacgccatgttgagaaggactcagaggctgcgtcggtgaacgggagggaggaatgctgtgtgtgaggagccgtgtctgccattgacgggggaccggagttaggcacacggaccaggcgtttgctcttctgcccgaaagacttagggtcctgctggttggcttggggggaggggggtctctgacttgttgttagggtggccggaccttactcagctgcgttgggagtctgtggcttcgggtggggactctgggtgttagtagaggctgcacctcgggttaagggtatttatgcttctgggtgcggtggct

SEQ ID NO: 29894 - DNA, 1611 bp, Artificial sequence
  DNA replication origin
ggacagtgcagctaccccaagaagcctccagctggagcaacagaaagaagacccaggtgggcctcagaacacacagaacggggctggggatttgcaggtgaacaacacagaggccctgagcaccccagcctgggccagaccagggagtgggcctgtgtgtttgagacgggccatgaagtgctgtcatcatggattgatctcggtgtgagcccctcctcgaggggctggggagggctcacagggtcagagggagggttccggaaggggctgggggagggctcacagggtcagagggagggttccggaaggggctgggggagggttcacagggtcagagggagggttccggaaggggctgggggagggctcacagggtcagagggagggttccggaaggggctgggggagggttcacagggtcagagggagggtgccggaaggggctgggggaggggtcacagggtcagagggagggttccggaaggggctgggggaggggtcacagggtcagagggagggttccggaaggggctgggggaggggtcacagggtcagagggagggttccggaaggggctgggggagggttcacagggtcagagggagggttccggaaggggctgggggacggctcacagggtcagagggagggttccggaaggggctgggggagggttcacagggtcagagggagggttccggaaggggctgggggagggttcacagggtcagagggagggttccggaaggggctgggggaggggtcacagggtcagagggagggttcaggaaggggctgggggagggctcacagggtcagagggagggttccggaaggggctgggggaggggtcacagggtcagagcgagggttccggaaggggctgggggagggctcacagggtcagagggagggttccggaaggggctgggggagggttcacagggtcagagggagggttccggaaggggctgggggaggggtcacagggtcagagggagggttccggaaggggctgggggaggggtcacagggtcagagggagggttccggaaggggctgggggaggggtcacagggtcagagggagggttccggaaggggctgggggagggctcacagggtcagagggagggttccggaaggggctgggggagggttcacagggtcagagggagggttccggaaggggctgggggagggttcacagggtcagagggagggttcgagaaggggctgggggagggctcacagggtcagagggagggttccggaacgggctgggggagggttcacagggtcagagggagggttccggaaggagctggggacggctcacagggtcagagcgagggttccggagtcagaccatctgggtccacaccccagctctgcacagatcacctcccttctctccccaggttcctgtctgcacagcaggaaaagtcatggtgcctacaccctgggcctgcctgtccagaggtcctgagtttaccacggctgaagacacagggcctcacctctgagtgagaacagacatatgagtgggtcaggggtggcggcggcgaagggagtgaggataatctgggggtaaagagagattttggagcag

SEQ ID NO: 29895 - DNA, 1022 bp, Artificial sequence
  DNA replication origin
gggggagggttcacagggtcagagggagggttcgagaaggggctgggggagggctcacagggtcagagggagggttccggaacgggctgggggagggttcacagggtcagagggagggttccggaaggagctggggacggctcacagggtcagagcgagggttccggagtcagaccatctgggtccacaccccagctctgcacagatcacctcccttctctccccaggttcctgtctgcacagcaggaaaagtcatggtgcctacaccctgggcctgcctgtccagaggtcctgagtttaccacggctgaagacacagggcctcacctctgagtgagaacagacatatgagtgggtcaggggtggcggcggcgaagggagtgaggataatctgggggtaaagagagattttggagcagctcagccggctctgacacccgcccaggctgggaggccacgggtcggctccctgaggcgaggacctcccggccaacgggaagcaggagagggaggggcggcatctggggacatggagtggtggcgcctggtccagacatgggtgggacagtgcttcagagctcactagccagaagctcctcagcggcagcccccaagaagggaggtctgtgggtctggagagagttcaggaagcttccacggtaacaagcagcctgagggaccgtgtggtgttcccggccagacatcgagaagtgcccaaaaggttagagctccggctctggtgccggaagacgtggattctgctgcaccacctgctactgtgtgactccaggaaggaaccttgagcccctccgagcctcggcgtcctcgtgtgtaaaacagggatggtttccgtgacctcggcgggatgccggaggctcagagcggaccgtgagactgagaggctctgaacacgccacaggctttgcacatgtgagtacgtccacacgccagccatgttctcaccttctccaggtgcacggtaggtgctgtgtaaattaacgacttcattccacatttctgagc

SEQ ID NO: 29896 - DNA, 1000 bp, Artificial sequence
  DNA replication origin
aggaaacctttgcccctcaggctgccacgtgtttgagagcacagccttttttctttttttttgagatggagttttgctcttgttacccaggctggagtgcagtggcatgatcttggctcgctacaacttccgcctcccgggttcaagtgatttccctgcctcagcctcccaaatagctgggattacaggcatgtgccaccacgcctggctaatttttgtatttttaatagagatggggtttcactggttggccaggctggcctcggggagcagagcctttctgtggagatcaggccagcctcctggcctccagcctccctgcctccagccttcctgtgctttgctatctggggtttgaggatgtggggaggggtctttcctctgagagatgaggccagtcctgtggatcacagtgaggcatgccaatcccagctggctgtgcctggccttcagctccaggagcctgagaatgataaggtctggagagctgcccttcctggaaacacagcatgtctccttcccccattctggggtcctgcatgtggcaggtgtgctagactctgcagggcatggctgggtggagctgtgtgattctggggttctgcgtgtggcaggtatgctggactctgcggggcgtggctgggtggagctgtgtgattctggggtcctgcatgtggcaggtgtgctagactctgcagggcatggctgggtggagctgtgtgattctggggttctgcgtgtggcaggtgtgctggactctacggggcgtggctgggtggagctgtgtgattctggggtcctgcgtgtggcaggtgtgctagactctgcggggcgtggctgggtggagctgtgtgattctggggtcctgcgtgtggcaggtgtgctggactcttcggggcgtggctgggtggagctgtgtgattctggggtcctgcgtgtggcaggtgtgctggactcttcggggcgtggctgggtggagctgtgtgattcagggctgggg

SEQ ID NO: 29897 - DNA, 878 bp, Artificial sequence
  DNA replication origin
gccgcggggacagaggctgccatggagattctcctcattattcgcttctgctgtaactgcacctatggtaacccaggtgctcgctgtgggaggtggcggaccctcccacctctgggggccggctggagtgggcttagatgtggccggggaggttagagggccgcagggaaggagggtgggcgagcggctggacctgaattcccccttcgttttggcggcatccagcctagagttgaaacctgggggctgctcagagcagggccgcttgcaaatggaaggaccaggctggaggggtccaggtggccccgaggatcggtggggaattggtgggctagtgtgagagaacttcctggaggggctgttagggagagacggcgacgagctgtgcccgcagacgtagtagccctgaggccagggagagggtctgcgggggccaggcacagcgtggcgatgggtggcgatggtccggacggcggcgttgccagccgagagggtgccagcgcgagccagagggagaagttgggagtttctttgtttctggagagaggcgcggaggctgggcggcacggtattgtgtgctccgcgcacatgcagcagtaggcggaggacacggaggggctgtgggagcaggaaggagaggtttgtttccagccgtgagagacccccagccgaggtctgggccctcaactgtggaaggcaggtcggcagggccagcgggagaggggtgtggcaagctactctgtgaaggtcacacacacacacacacacacacacaccacctttcggtggaagggacccggaccatcctccttgcagctcccgcagctggctgggggctggggggaagtcccgggacaggtgcatgtcatcaacacgac

SEQ ID NO: 29898 - DNA, 1072 bp, Artificial sequence
  DNA replication origin
ccatttgcaagcggccctgctctgagcagcccccaggtttcaactctaggctggatgccgccaaaacgaagggggaattcaggtccagccgctcgcccaccctccttccctgcggccctctaacctccccggccacatctaagcccactccagccggcccccagaggtgggagggtccgccacctcccacagcgagcacctgggttaccataggtgcagttacagcagaagcgaataatgaggagaatctccatggcagcctctgtccccgcggcgggagcgtgcagccatcgctccaggctccccggcgcccaccagcagcccggccactcagccaccttgctgatgctgccgcacggactccagcatcgggcagccgctccggagtgctcttccagcaagggggaggggagggaggcgcgtggcgaggagaggagggaaggggaaggggaggaggggtagggagggagggagccagcagcctgctggcatcctaaagaggagcacgtttgtagctggctggctgcctgggcacgaggctagagtcctcgcgtgcgcgcacacgcgcactcagctcacactcacacgcgctcacacacgctcacgctcacacgcgctcacacacacgcacacacaaggggaagggcgccgcgttcacgcagcctgttgcctgcacagccagacaaaggtaggtgcctgtaatccagcccgctccccgaggtaccttccatggtgacagacgtgtggctgtccttggagtccttgggacctttcactttgagttcctgccaaagggaggagaggagtcatggcctgttctgtccctcacctctcccagcccccactgtgagcctggcaagaaggggagttctgaaactcagggtgtacatatgagaacagaggccgggtgtggcggctcacgccagtcatcccagcactttgagaggccgtggtgggcggatcacctgaggtcggaagttcgagaccagcctggtcaacacggtgaaaccccatctctactaaaaatacaaaagttagccaggtgtggtgtcaggtgcctgtaatcccagct

SEQ ID NO: 29899 - DNA, 1050 bp, Artificial sequence
  DNA replication origin
tccctcacctctcccagcccccactgtgagcctggcaagaaggggagttctgaaactcagggtgtacatatgagaacagaggccgggtgtggcggctcacgccagtcatcccagcactttgagaggccgtggtgggcggatcacctgaggtcggaagttcgagaccagcctggtcaacacggtgaaaccccatctctactaaaaatacaaaagttagccaggtgtggtgtcaggtgcctgtaatcccagctacttgggaggctggggcaggagaatcgcttgaacctgggaggcggaggttgcagtgagccaagatcacaccattgcactccagcctgggcaacagggcgagactctgtctcaaaaaaaaaaaaaaaaaaaaaaaaaaaaaaaaaaaaaaagaaagacaaaggagccccatggccatgggctgcctctgccaccccaatcccctgcaccacacctgtgaactcctggagcctcgtggagtccagtggctggggcgtgggcaagaaggaagggactccaggtcccagagatgagagaggctggcagggagccctgtgattacaggaaccccgactcaggaaccctacacgtcggccaagggcagacagggtttgagttgaccagcgccaggtactccagccaatctttagggcatgaggaacccatgaggtaggaaggaagggtcccacacgccagcagggaagtggtggaccttcggcagagatgctgagctccccaggacagtgagctgcatcctacccccatcagagagcacttactcagcccccagcacccccgacactccccacccaccactgcccatgctgggggtccgagaggaagcttcgagggaggaacagccaatgcccctcctggatcccaagccaggcagcaggtagtgagtactggaaagacccccgggatgactcatctgctccaagcctctttatcctcctttagagacgttccagccccagcttttgctaacaggacagtgcagcctgcaactggagctgtaataccatccccacttggcagacg

SEQ ID NO: 29900 - DNA, 954 bp, Artificial sequence
  DNA replication origin
ttgaacccgcgaggaggaggttgcagtgagccgagatcacgccactgcactccagcctgggcgacaggagtgagactccgtctcaacaaaaaaaggaaatgcagtccgtcctcctggaacttgtggtttgggggagtcaggcagttactagtgctcactacgaggactggcacaaggcctgcatttggcgacttggaaagccttcttggaggaggtcccttctaagctgggaactgaccaggggaggccagacgagagggggaaggacgtttcaggcacacggggcctcaagtaccaagagttaagaaagtgcctgccctgggaactgagaacagaaagtccagtgtcaggagcacagaggtgcggggaggaagctgccaaggctggggctggacacgggtcagtgtgcaaagggtctctcgagccattcctcggagcctgaccttcatccgagggccgtggggatccgctgaaggggccgtcgaggtttcagtgactctctcccctctaaggagaggtgggggtgggaggtgagtgggcctggaggcaggagccacacaggaggatacgcagctgtccaggtgagggccatgggtggccaagaagaggaaaaggcggctgtgagcaacggccaaaaagtggagtccacaggacaggtgggggagggggtgcagccagaaagagtctgaagcactcggtgaggtaaagacaggaagcggagcaggtgacgccggaggcagggagctcagctctgaacacactcagctagaggtcctaggagtgtccaggcaggagagggagagtcttctccagcgtgagaaaggcagagccctgtccattcagccagaacacggcaggggaggggaggaggcctccagcctctcacacccagagaacagggcaggaaggaggagaaggtcctctggccactcacacccagagaagaaccgcggc

SEQ ID NO: 29901 - DNA, 883 bp, Artificial sequence
  DNA replication origin
cccagctcagggaggagaggaggaagggtgtgattctttcactctgaggttttcttctgaggctgtggctgtggagggtcctactcctcttcctgagccctcctaccacagacctggcctcccagcgagttcttcctttgctccctctggtctctgctcaagaaagagccaagcaggggcccaggaggagagagctgggggaaggtggggaacccgccccgggaggagagagctggggaagggggggaacctgccccgggaggagagagctggggaaggggggaacctgccccgggtggagagagctgggggaagtgggggaacctgccccgggaggagagagctggggaaggggggaaacctgccccaggagagagctggggaatgggggaacctgccccaggaggagacagctggggaaggggggaaacctgccccgggagagagctggggaaggggggaacctgcccggggaggagagagccggggaaggggggaacctgccccgggaggagacagctggggaaggggggaacctgcgccaggcatatcaggaagggggcccctgccccacagattctgcctttggggcatgagctgttagaaaggcagagcagggaggggctcttggtcttggcccagaggaagaggctcgtgggtggcaggtgggatctaagggctccgtgtctgatggggacaggcgccactccctccttcagggaacgggtgtgttgtggcagaaaccacgaagccctaacctgtctcctctcccagcaatagagaaattaacagtgtcaacgaacactcaggctgtgttctaagagctttatgtgccggacacagtggctcacatctgtaatcccagcactttgggaggccgagg

SEQ ID NO: 29902 - DNA, 1156 bp, Artificial sequence
  DNA replication origin
catcagtgctttgggttgtgaaatcagtacagtgggttgtgaaaccagtacagtgggttgaaccagcatttttaaaccaatgaaaaaatgtcagcatgcatcatacacgggaaagataagtgagggaactttcggtttgttgtctgtctgtgtgcctgtatatatatgtaattgccgggcccatggtgtcttacacctgttgtgggtttgaaaactgctggctttggccgggcgccgtgtctcaagcctgtaatcccagcactttgggaggctgaggtgggcggatcacaaggtcaggagatccagaccatccttggccaacacggtgaaaccccgtctctactaaaaaagtacaaaaaaaattagccgggcgtggtggcgagcacctgtagtcccagccactcgggaggctgaggcaggagaatggcgtcaacctgggaggcggagcttgcagtgagcagagattgcgccactgcactccagcctgggcgacacagtgagactccatcacaaaaaaaaaaaaaaagaaaagaaaactgctggctttgggcaagccctacataaattccttgagcctccatttctggatctgaagatgagagggatgccattctttctctctctttccatggggttgagaagatcgggagatgctttcgggacctcatacagcgttgagttacttaagacactcaactgttagtggaagaaaggaggacaggcaaagagacaacccgtcagacattcgtgaaacacgtcttccaaaccgtgaattgctgtccaaaaaggaacatagttgtcattactaacagggtgtgtatttgaaaggagttcagacagaggatctagactgcctggccgtactggctccaggctttcagcaggtgaatgagctatcgtgcctcagtttttccatctgcaaactgggtatacaaatagtatgcttttcatggggtcgttgtgaggattaaaggaatttatacacagagttctttttttttttttttttttgagacggagtcttgctctgttgcccaggctggagtgcagtggcacaatctcggctcattataacctccgcctcctgggttcaagccattctcctgtgtcagcttcccaagtagctgagattacaggcacccaccaccacgcccag

SEQ ID NO: 29903 - DNA, 1509 bp, Artificial sequence
  DNA replication origin
cgcgggagaaatggctgatgcgggcgcagagcgcgcggccgggtggaagccctcggcggagggtcccggccccggcagctgttcccgggggagaggggcgggcctgcctccccgaccggtgtcctcggggcagtggtggccgccccctccaggccagcccagctcagggctccggcggctgtgccaggagtcacctggcgcgcctgtcagcccgagcctcgccgcctccctggagcgggtgggcaggaatcccccgtttccacggcaaccgcaagagaggggccaccctcttcccagccaggagacagggacttggtgtctccgagctgaggcaagagggtgtttgcaaagggcaagagccagaggtcactgagcttccttgaaggaaaagcactgggtcagctgaaggggggagggaacagctggcttggaggctgcagccaggtgggcaggtgcccttcccgaggcgggacaggcagggagcatctgctgggccctggcccacccgctctggggctgacggcgttctctgcagcagtgacccgtcctgtaggagaggttggctcccggtggaactggagggcagtggtggccagaatcccttgaggagcggggcggccccggaaccacgccggctctgtgagtctggcccggcacaccacagcggtcttcctttttctctcctggacacacctctcagagcttccacctcagccttttgctcagctgctctctggttctgtgtcgagaagggaggcccagtgaggatgcgtttcggggagtttgcagactgctaggcgaggctgcctaaccgagtgcccatcggcggggcctagaaggcatgtgcagccagcattgctggggacgggaggctgtccctgaacctctctgggcctccctgcccctcacagaagatggggatcacagtcctgccccacccactctacagtgtggctctgaggaggagccaatggaggtaaaaatagatgcagaaccacgggagatggctgatgtgtgagtatgggtggagcggtggctgcaggcctgggtggggagtggagctgtagggaggctggcagtggctggcaccccaccctgtcttctctgatctggtgctggcgtagggccgtgggggtaagtcacgtctccccgtgggctcagggaggcctctgcacttagggtctgaccagcctccccactaggaacagggtgggaaagtctgctcctgagccaggagtcaggctgggagtagcaatgctgggatgggaggtgtgtggccctcatgggcctcctctgggaagcccccagcacagatgtgggcccactcagaggctgcctcctggacctccccttctgctggaccccggcgtatgcctcagctaagcccgtatttcattctgctcagatgctcagaactctagacatttgcctccgcaattatatcccattctcctggaggaccaggaccatgtcatattcattgctgaacactgcacagtgcttggtgtg

SEQ ID NO: 29904 - DNA, 1074 bp, Artificial sequence
  DNA replication origin
gcctctgttgaaccctggtggcacagttccctgatcaaaggctgttagccctggggcccctcaagggctcaccccgcaatcccctgctctgtatttcagctctgcaacaggatggagcctctctccagggagggcagcttctctgctgccaatggaattgcatgagccccacctagagcccagagcttctgaagaattctggggggagtggggggctgtggcctgaactcgggccacaggtgtggttcatttagacggcaccatgttgttttaaaatgttaattatttgccatcgttttaaaatcaggagcattcctgttaataagccagattttagcttattttgaacagagatcaggcagccatgagcttgcgtttcctccagcagccatcggctggagtgagtggtggtttcaccctgccctacctggctcgcttcaccggctggcctcacccgcaggcctcacccgcaccctcatgggtgccgtttgcaacctttgctccatcgttgggttgtaaaagagcttttcccagggcctcctctggactcctcctcccatggaaggaggtgtatgtgcatctgggaactagggccagggggaccagaatgtggcctcactccctgcacagttgggggttctgcaaccattggagaagccaggggaagctggctgggagtgggcagggccggagatggtgcctgtcctgggttctgtgtgcactccccttgcaggatggctccctgcggtggggtggctgggggggctgcttggaggaggtgggggtgctggtctcagcagtgcctgtgagtaggtgggaggctgctcagaggaggtgggggtcctggtctctgcagcgcctgtgagtaggggggctggtctgtgagtgggggggctgctcagaggaggtgggggtgctggtgtcagtagcgtccgtgagtggggggactgctcggaggaggggggctgcttggaggagggggatcctggtccctgtgagtgggacgcccaccgctcctgtgcaggacagtggtggcgccgcgctcctgcctgggggcaggtcaggcctgtctgt

SEQ ID NO: 29905 - DNA, 1512 bp, Artificial sequence
  DNA replication origin
cctcgtatgtgtgccatgccaggccttttctgggtatgaatgaatgaatgaacagacagatggacagacaagatcaggagccaaagtggggaagtacgtgtggtcgtgtgggtgtaagaggctctaaagcttggtggggtggtggctttggcaaaggaaaagaagaaccgaaggacttggtaaaagggatgtgggggttgagggaaggaagactcgtaagatggcggccgcactaacagaagtggaaacccggaaggggaagctgtttcagaaggaggaagggtcctttggtccagatgtgtggagtggaagggccgtggctgggcttccaagtgaggagacccagtggccggggcaggtgctagacctagagcccagcaagacaccagggctgcagctggcagcgggccaccactggcctggaagggagaagggctgcttctctgggggaagggagcagagggctgaggctgggcccaagcaagtgactccacatttacaggaggcgggagaatgaagggccagcctacaccagagagtggtcggggcagtgcctgcatcaacagggcagctgagggcttggagaaactctagactgcagaggccaaagagtcggagagggaggcctctggctttggaataaaccgtttgggggggcctttgaagcaggctgcttctatggagaacattaggagccaggccgaggcagatggagtgtggagctcaggtccagggctggctcagggcatttgtcagggaaggggagggaagctgtggggactggtgagtcacttcccctccaggggggcaccgagggcctgtgagtggagtctgtgtctgatggaggggcactctcattactcactggaatttccagccaccggggacagggtggagtagagaggccctggatactcagggagtcacttgtgtggggttcagggattttgggaagaagtgggcgtcagtctcaccatgccgtgtagaggtgtggggaacggggacgaggatatcctggcagacttccaagggcacctcatgtcctcttgagtggaggaaggaacacagcaggggcctgtggggttttaggcccttcttcgtgtcacctgcaggtctgactcatgtgggcagcccatgccatgcacttggagcccgccgggcgggagacagaagaacccgtggtaccaggccctgagctggcatacttgtgccctggggaatgccaggcctggtcgttcccaagccctcgccacagcctcacccgcccgcaccaaatgaggaattgtggctgaaagggcccttcagatgcgccctggctatttataacccacccaggcagggacaggggaaaaccaggggctggaaggagatgggtggggtgggggtgtgcctctgttgaaccctggtggcacagttccctgatcaaaggctgttagccctggggcccctcaagggctcaccccgcaatcccctgctctgtatttcagctctgcaacaggatggagcctctct

SEQ ID NO: 29906 - DNA, 1059 bp, Artificial sequence
  DNA replication origin
tcagggataacgctggggagaactcaggctcagggataacgctgggaggaactcaggctcagggataacgctgggaggaactcaggctcagggttaacgctgggagggactcaggctcaggcaataacgctgggagggactcaggctcagggataacgctgggaggactcaggctcagggataacgctggggagaactcaggctcagggataacgctgggaggaactcaggctcagggttaacgctggggagaactcaggctcagggataacgctggggaggaactcgggctcagggataacgctgggaggaactcgggctcagggataacgctgggaggaactcgggctcagggataacgctgggaggaactcgggctcagggataatgctgggaggaactcgggctcagggataacgctgggaggaactcgggttcagggataatgctgggaggaactccggctcagggataacgctggggaggactcaggctcagggataacgctgggaggaactcaggctcagggataacgctgggaggaactcaggctcagggataacgctgggaggaactcaggctcagggataacgctgggaggaactcaggctcagggataacgctgggaggaactcaggctcagggataacgctggggaggactcaggctcagggataacgctgggaggaactcaggctcagggataacgctggggaggaactcaggctcagggataacgctgggaggaactcaggctcagggataacgctgggaggaactcaggctcagggataacgctgggaggaactcaggctcagggataacgctgggaggaactcaggctcagggataacgctgggaggaactcaggctcagggataacgctgggaggaactgcagcctcttcttccctttcttggtctcttcagaaggcttagggcttgggattcgaggttgctggtaggtgcgtgaagaggcggcatggcagccaggaactcctgagatggtgcctgctccactccctcctgactgctccggacctgggttgtgtggttcagg

SEQ ID NO: 29907 - DNA, 1340 bp, Artificial sequence
  DNA replication origin
ctcaggctcagggataacgctggggaggactcaggctcagggataacgctggggaggactcaggctcagggataacgctgggaagaactcaggctcagggataacgctgggaggaactcaggctcagggataacgctgggagaactcaggctcagggataacgctgggagaactcaggctcagggataacgctgggaggaactcaggctcagggataacgctgggaggactcaggctcagggataacgctgggaggaactcaggctcagggataacgctgggaggaactcaggctcagggataacgctggggggaactcaggctcagggataacgctggggaggactcaggctcagggataacgctggggaggactcaggctcagggataacgctgggaagaactcaggctcagggataacgctgggaggaactcaggctcagcgataacgctggggagaactcaggctcagggataacgctgggaggaactcaggctcagggataacgctgggaggaactcaggctcagggataacgctgggaggaactcaggctcagggttaacgctgggaggactcaggctcagggataacgctgggaggaactcaggctcagggataacgctgggaggaactcaggctcagggataatgctgggaggactcaggctcagggataacgctggggagaactcaggctcagggataacgctggggaggactcaggctcagggataacgctgggaggaactcaggctcagggttaacgctggggagaactcaggctcagggataacgctggggaggaactcaggctcagggataacgctgggaggaactcaggctcagggataacgctggggggaactcaggctcagggataacgctggggaggactcaggctcagggataacgctgggaaggactcaggctcagggataacgctgggaggaactcaggctcagcgataacgctggggagaactcaggctcagggataacgctgggaggaactcaggctcagggataacgctggggagaactcaggctcagggataacgctgggaggaactcaggctcagggataacgctgggaggaactcaggctcagggttaacgctgggagggactcaggctcaggcaataacgctgggagggactcaggctcagggataacgctgggaggactcaggctcagggataacgctggggagaactcaggctcagggataacgctgggaggaactcaggctcagggttaacgctggggagaactcaggctcagggataacgctggggaggaactcgggctcagggataacgctgggaggaactcgggctc

SEQ ID NO: 29908 - DNA, 1244 bp, Artificial sequence
  DNA replication origin
ccaagccggtcctctgtggggggtgtgtgttgcaggaggcggtgggagtgccccatccttgcttggtcctgctcgtccgggtgtgttttgtagggggtctccgtcctgccttctgacgtccccagaggagcagtcgctgagatgccacgggctgcctcttcttcctccaggggctagtgcccccccaccccagctgaggccgcctgaaccctcccattcttgagaaccccctgctccttccagcccccccggccaccctccaccccccacagagctctcacccctcttcacacaccggggtggctgttatagcctttggcaacaagggccttggcaacgggcttcccacttgggggaagccacattgctgccatggcaacagaggccgaggccgagtttagcggcagtccaggcgtgcacctgtgggaagggctggcggggggcaggtgggaggcaagggggccggcgagggggttggtcagtgtgttgttgacctgccctaagacgggaggcgggttagagacaagcgtctcggacctgcgggggcagggtttttgccctggttctcctggaggcattgggctcagggtacaaatagtaacccaaggaggcagagcaggtgttcagggacctgaacgggggccaaccaggggagagcaaggaggagaagactctcgctcccatctctgccttcagctctcaaaccacagcagggctcagagccccgcccggggggactcagctctcaccccactgtgagcagctgcaggaagatgctgcggaatcccggtgtggggccagggtctttgccgctgcctgtccccgcgccacctccctctttgctccctgtccctgtgccctgtccttgtcgcgtgaccaccatgactggtttccgtgtccgtcgattttccgattcctttggtgctggcaggtgccttctctcgggagacagatcacgggcgtcacgcacagatgcccccgcctggcgctccggggcttcggggcagaacttgacttggtggctgtgcgtcttgcttggtggctcacgagggactcacttggcttgaggaccttgaaatccagagatgctagagtgactgccccctaaagtgcttgtggcccccagggttgatgtttacaccatcgactagaagccacgcaaggcaggagtagggagcacttgtccagcctggggatcgtccgggcaaaggtcccatccgcggcacctgccttccctcctcagg

SEQ ID NO: 29909 - DNA, 1002 bp, Artificial sequence
  DNA replication origin
gggcggggctctgagccctgctgtggtttgagagctgaaggcagagatgggagcgagagtcttctcctccttgctctcccctggttggcccccgttcaggtccctgaacacctgctctgcctccttgggttactatttgtaccctgagcccaatgcctccaggagaaccagggcaaaaaccctgcccccgcaggtccgagacgcttgtctctaacccgcctcccgtcttagggcaggtcaacaacacactgaccaaccccctcgccggcccccttgcctcccacctgccccccgccagcccttcccacaggtgcacgcctggactgccgctaaactcggcctcggcctctgttgccatggcagcaatgtggcttcccccaagtgggaagcccgttgccaaggcccttgttgccaaaggctataacagccaccccggtgtgtgaagaggggtgagagctctgtggggggtggagggtggccgggggggctggaaggagcagggggttctcaagaatgggagggttcaggcggcctcagctggggtgggggggcactagcccctggaggaagaagaggcagcccgtggcatctcagcgactgctcctctggggacgtcagaaggcaggacggagaccccctacaaaacacacccggacgagcaggaccaagcaaggatggggcactcccaccgcctcctgcaacacacaccccccacagaggaccggcttggattcttctcccccaccagctccaggcaaacaacccccagaacctctgttttgctcgttcatgtgtctccgacaggcacacacgagctgcgctcagacagcgtcagtccctgtcgccaggaacacgttaatgacaaggaccgcaaaccctccacagtttctatccctggcctgtctcagagcacatacttaatattccttctacaatgcttctctctggagcagaactcttgtctctgtcaacaaggagaggtggatgccatcagagtttgtt

SEQ ID NO: 29910 - DNA, 1039 bp, Artificial sequence
  DNA replication origin
tgagggctcccctcccacactccagaacctgccctggacccctggagggagtgggctcagtacaaatggtacccaaggaggagggccacaggaagtgacatcgaccggccccccccacctccttattccctataaaaagcaaaatggtgactcagagaggagagttggaagcgtcctgcctcttgctcccactgttaatttttacacttggaattaggcagaaggcaaagaaaacagcagcttgaaatacgcggctgacatgctcttcatcgggtagcaacagcagagccgctcctccccgcctcccagcagccccggagcgggcagggcccggtgcctgctggctctcccccgcccctcaccaggcccaggcccccgcacagcccccgcccgggccaggcgtggatggtgcggccggggccatggctgccgggggccgccgccggcgcccactacgctaccagtccctggcagctctggtggaggattctcagtggcctttcttgttccttgtctcagacttcagctacgggacggacgagtacgacggagaggggaatgaggagcagaaggggcccccggagggctcagagaccatgccgtacatcgatgagtcgcccaccatgtccccgcagctcagcgcccgcagccagggcgggggggatggcgtctccccgactccacctgagggactggctcctggggtaggtacaccggcttttctttctgggtttggggaggggtgacgggaaggcctgggcatcgtgggccaggccctgcttgggttggtctcgagagattgggactggagacgtttggacctggccgttcttggtgcctcgtcatctcgtcctggccctggacccctctcaggctcgggcttccctccccacctgctttgccaacgctgccgcccctgtctctccccgtctactagccgtctgctccccaggcctcccagacccctccgtgcctctttcagctttcccctgttagcctgtctcctccagaggacccaggagaggaccaggctctcctc

SEQ ID NO: 29911 - DNA, 776 bp, Artificial sequence
  DNA replication origin
tccaaacgtctccagtcccaatctctcgagaccaacccaagcagggcctggcccacgatgcccaggccttcccgtcacccctccccaaacccagaaagaaaagccggtgtacctaccccaggagccagtccctcaggtggagtcggggagacgccatcccccccgccctggctgcgggcgctgagctgcggggacatggtgggcgactcatcgatgtacggcatggtctctgagccctccgggggccccttctgctcctcattcccctctccgtcgtactcgtccgtcccgtagctgaagtctgagacaaggaacaagaaaggccactgagaatcctccaccagagctgccagggactggtagcgtagtgggcgccggcggcggcccccggcagccatggccccggccgcaccatccacgcctggcccgggcgggggctgtgcgggggcctgggcctggtgaggggcgggggagagccagcaggcaccgggccctgcccgctccggggctgctgggaggcggggaggagcggctctgctgttgctacccgatgaagagcatgtcagccgcgtatttcaagctgctgttttctttgccttctgcctaattccaagtgtaaaaattaacagtgggagcaagaggcaggacgcttccaactctcctctctgagtcaccattttgctttttatagggaataaggaggtggggggggccggtcgatgtcacttcctgtggccctcctccttgggtaccatttgtactgagcccactccctc

SEQ ID NO: 29912 - DNA, 1024 bp, Artificial sequence
  DNA replication origin
agggcagcctggagcctcctggagaggaggagggaggagggaggggccggcgggaggctgccttccatcccctcctgtgcttctccagagtgagggggtgtcaccaaacggccaggcccttcacggacccagactcaggccagctgggtgccgctgtgcctcttcctcctccccctggaaggaccagagtcatttcacatcccttcagccacagacacaagtgtcatggtctccagggcactgggccttatgtcctaggtgcgtggcctacacacatctcagtgggagggcatcctgggtcctgcccaggtacgtggcgtacacgcgtctcagtgatggggcatccctgggtcctgcccgggtgtgtggtgtacactcatctcagtgatggggcatccctgggtcctgtggttcttcatacacaaccctgtctagggaaaaaactagtccatgtcccctggcagctgaatggggcattggctcagggacgaggagaggcagccgacagaagcaggtgcagcgagcctaggggaagcgctcggctgccaaaaggccagattgggcagagtgtggccacggccaggcgtcccggtgacctgttgacaccattctccagctgctggttgcctgtgggctggtgtgttgtgacagaggagggaagagctggggcccccgtggagaacttggctggctgggacttggctgaagcctcagacctgagacagacggtgcgatcctctgctcattcattcgctccacgcactttccccgagagcctgccacaggtggggttgtgggtgctggcgtacagtgatgactcagatgctcacctcctgccccaggggctcaaggacaaaggggcaggattcactaaggtgccagggggccaggtgccatggggagggtgacctggaggaaaggatgtctgggcagatggcagggcaggctcagccagcctcccccatcacactgtgcgagatccgaagatgcctggccagggagtcccgcccggaagatacccggg

SEQ ID NO: 29913 - DNA, 1064 bp, Artificial sequence
  DNA replication origin
ctgtgtgcgtgtcaggcgctgcatttgtggcttaatgctgccattagagattgccatgaacttgatggcttagaacagcagaaatcgatgctctcgcagtctgaagaccagaagtctgaaatcaaagtcccagcccctccccaggctgccggggcagagttcccacttactcccctctttcagtgtctggtggctccaggcattccttggttggtggcagccccagtccaaaccttgcctctgtcttctcttctgtctgtgttttccccctttctctttccatagggacacagcattggatttaggacccaccggttaatcgacaatgatctcatcttgagacccttcatttattcacatctacaaagaatgttttccaaataaggtcacattcccaggtcccaggaattagaatctggacataccttgtgggggggccactactgaacccaccgcagggagctagaaggagtccgatgtcacagggcaggagaataggaccctggagaggtggagcaggtgcagaccacaaagggccttgagctgaggagcggggctgtgtccctaagtgaatggggggcaacacggtctgatttgtgacccggctgctgtggggagggtgctggaattgtccttgtaagagttggtgagggtggggaggagcggggatgcctcacagtgcaggagatgaggggcgggaatgtggaggcatctagaatggctcccaggttccctacgtgtgtggtctttgggaaaaggctgcgtttgaggctcctaaaggtggagatgcccaggagtctgcagacctgacttcttccgggagcaggaacacaattcgggagaggaaggtgatgcgaggttgatggaagctggcgagtaccagtccctgccaccaccaccattttatcatgaacaattgtaagcacacagaaaagttgaaagaattcacagtgaacacccattcacctgctgtctaacgttcccagtgatgatttttatgcgcttgctttatcacacagctgtccatctttccatccctctgaacatcatcattccatcttggt

SEQ ID NO: 29914 - DNA, 1169 bp, Artificial sequence
  DNA replication origin
gaggggggagctgtgcgcgtggcaggcactgcatttggtgtgcaaagggggggagctgtgcgcgtggcaggcactgcatttggtgtgcaaagggggggagctgtgcgcgtggcaggcactgcatttggtgtgcaaagaggggggagctctgcgcgtggcaggcactgcatttggtgtgcaaaggggggagctgtgcgcgtggcaggcactgcatttggtgtgcaaagggggagctgtgtgcgtgtcaggcactgcatttggtgtgcaaaggggggagctgtgtgcgtgtcaggcactgcatttggtgtgcaaaggggggagctgtgtgcgtggcaggcactgcatttggtgtgcaaagagggggagctgtgcgcgtggcaggcactgcatttggtgtgcaaaggggggagctgtgcgcgtggcaggcactgcatttggtgtgcaaagaggggggagctgtgcgcgtggcaggcactgcatttggtgtgcaaaggggggagctgtgtgcgtgtcaggcactgcatttggtgtgcaaaggggggagctgtgtgcgtgtcaggcactgcatttggtgtgcaaaggggggagctgtgtgcgtggcaggcactgcatttggtgtgcaaaggggggagctgtgtgcgtggcaggcactgcatttggtgtgcaaagaggggggagctgtgtgcgtggcaggcactgcatttggtgtgcaaaggggggagctgtgcgcgtggcaggcactgcatttggtgtgcaaagaggggggagctgtgcgcgtggcaggcactgcatttggtgtgcaaaggggcgagctgtgtgcgtggcaggcactgcatttggtgtgcaaaggggagagctgtgtgcgtgtcaggcgctgcatttgtggcttaatgctgccattagagattgccatgaacttgatggcttagaacagcagaaatcgatgctctcgcagtctgaagaccagaagtctgaaatcaaagtcccagcccctccccaggctgccggggcagagttcccacttactcccctctttcagtgtctggtggctccaggcattccttggttggtggcagccccagtccaaaccttgcctctgtcttctcttctgtctgtgttttccccctttctctttccatagggacacagcattggatttaggacccacc

SEQ ID NO: 29915 - DNA, 1350 bp, Artificial sequence
  DNA replication origin
gggacagctcgctcctgggggacagctcattcctggggggcagctcgctcctggggggcagctcgctcctgggggacagctcattcctgggggacagctcgctcctggggggcagctcgctcctgggggacagctcattcctgggggacagctcgctcctggggggcagctcgctcctgggggacagctcattcctgggggacagctcgctcctggggggcagctcgctcctgggggacagctcattcctgggggacagctcgctcctgggggacagctcgctcctggggggcagctcgctcctgggggacagctcattcctgggggacagctcactcctggggggcagctcgctcctgggggacagctcattcctgggggacagctcgctcctggggggcagctcgctcctgggggacagctcattcctgggggacagctcgctcctggggggcagctcattcctggggggcagctcgctcctggggggcagctcgctcctgggggacagctcgctcctgggggacagctcattcctgggggacagctgctgttgcaggagttgtttgctccggctctgcctccactgctgggaacagactcgaggccccaccatgggcgggtgttatggcctctctggttgccatggagatgaaatccaatcatccacctccaagatccttggaagagggaggcagagaccgtagccgcctggagaagtggccgcctggagaagctcagggctccacagcctgagacaaaggaatcatagttcttggacatcaagggcagaggctgaggcccagggtgtcagggtggccagcagccctgggcagagaagcgcatgtggcttcaccagtctccagctcttggggatggatgggacatgctgagtattatctgcgcagtgttttacacggtgagcccacggccaggatctcatttcatccccacagcccagggaggttgtcaaagtagctatgaatggccccctttgacacgggggaaaactgaggcttctgagtctcatccaaggccacctggctgagaaacagctgagccacagattaaagctactctttgcaccaaggccattgtttcctgcgatttgacaaaatccccccaccttggcagagggaactaaaattcctcatctctctgtaggaaagacagttatgtgcccaccgaacatagaggaatcatattgcagacgggccgtataaccttgccatgatacgacgaaagctgacggcatgtgtacgcaagcaacagccactcaacaaacatctcctaagctatcacacaccagatgcaggggcgggcacagactccagcacccccagctccgtt

SEQ ID NO: 29916 - DNA, 826 bp, Artificial sequence
  DNA replication origin
ccttgttgacaatccgtcgaccatagatatgtgggttcctttctggactcactcaacgtgactccgtggatctgtgtgtctggaaagatgcccccagcctgacagtttaccttctttgcccatctgctccagtcatcctggaggctcccatagtacacattgctgggacatcccagagctgaacaccatctctcaagtggcctcagagctaatcacttcccacaggcatcgaggcgaccacagagagggcccagtgtgactggctggcccccagggcgcccgggaagggatctgcagatccctcctcctggcacagcgtcctggcaggaggcacggtcccagagcaggccctgtttgtgctgaggccccgccaggattgggtggatgccttggtgagggccaggtaggagggaacaaatgcagggtgggaagtggctgctggaatggggaagggagcggggcctgcaggagggaagcattcttggcactagtggcatcgtcaccaggacaccggccttgggagggcgagcactacatccatgggtaggcgccggagccctgaggacacggcattgccaagctcttgtcctgtggcttccttccctgtgtccgcagtgtgtggggggtgggcgggcaggcaggacgaggtgacccccatcctttctgtgtgctcgttccatgaaattgggggatgtggatgcttgaacgggctctcagctagtgtgccttccgtgcagaggaggtaacactccccagggcagccagacacccttgtggagtgggatggaaagctgggaggaaggggctggccggcaccatggagata

SEQ ID NO: 29917 - DNA, 1201 bp, Artificial sequence
  DNA replication origin
tcggctcactgcaacctccaccttctgggttcaagggattcttttgcctcagcctcctgagtagctgggactacaggcacccagcaccaagcccagctaatttttgtatttttattagagacggggtttcaccatgttggccaggctggcctcaaactcctgacctcgtgatccacctgcctcagcctcccaaagtgctgggatgacaggtgtgagccactgtgcttggcctagcctttcaaagtgctgggatgacaggtgtgagccggggtgcttggcctagcctttcaaagtgctgggatgacaggtgtgagccactgtgcttggcctagcctttcaaagtgctgggatgagaggtgtgagccacatccattagggcccgtcaggaagcagatgccacactcaggctgaggagtgcggggagagctatgacggaaatgtgggcagggtgagggcagggtctgtgtcctagacctggaggcagaggccatgtggtgagggcttctgggcaggagcgtgcacagcccgggtggcccacagtggggagctgggggtaccacatcccagcctcatgcccttgtcttcctctcatctcctgctggggtggaagagaggatggagaagcagggagaggggatccggaggggcccacgccaggaaaccaggctgtgtctaggtgcagctgttcttgccgagtctctcctgtctgcaaagtgagggtgataaacgcctgtcccacgtatgtcctggggctgttgtaaaaatcagctgagaagctggatgctggcgacgtgtgttcacggcgctgttctctgccagagtaagggataattgttgctgttgataaacactcactgggtcctcaccacgaactgagtcttttcacatcctcagttctgctgggagtctctaacctctggaggatgtgtcggcaaaggaaagagaaattgcaacattgcagagcctggattcgaacccagcgtccccatgtaaagtccgtgcagcactgggagagtcacttaatgagcctccgcagtgaaatgcatctcccgggctggtttggggctcccaggggaatgggtgctatgattaccattagctagtggtgtagcgggtgggagaggacctaacaggtgccttcggcccggctgtaaaaggagtgacttctggccgggcgctgtggctcacacctgtcatccca

SEQ ID NO: 29918 - DNA, 955 bp, Artificial sequence
  DNA replication origin
cccggtttcccaggatacaacactcgcccattcatagtgtggtgccttttgcacgtgctgttcctctgcttggggatgctgttggtctttctcagccaggtgaagaggacgctgaatgtcacctgcttgagtatcaggaccggggactgggcactggacctagactcttggccctggagagaagccctgcatggggccgcagcctgcccccgtccctgctcacagaaaagctcagccttgcagccgcgtggagtcagacgacttgcctgtcctgctttgaacgtgtggtgttcctaccacctttgagtaaaaatagagctgagaatgaccgaagtgaaactccaccttgggctctgggagagcagaggtgggaccacgctggggagggtgggtgcggacactccgggggcgggggctgaggccatctgcgtgggctctgggagagcggaggtggggaccgcgctggggagggtgggtgcggacactccggggggtgggagctgaggtcatctgcgtgggctctggggagggggccctgtgagccgggccaagctgccaggcactgggggtctacgccctggactcagagagaccatggcaccctcaaggctgctctcacttgaaaattttcgttttggggctggacatggtggcccacgcctgtaatcccagtactttgggaggctgaggcaggaggatcacctgaggtcatgagttcgagaccagcttgcctaacatggtgaaaccccgtctctactaaaatatacaaaaattagctgggcgtggtggtggatgcctgtaatcccagctactcgggaggctgaggcaggagaatcacttgaacccgggaggcggaggttgcagtgagctgagatcacaccattgcactccagcctgggcaacaagagcacaacttcgtctcagaaaaaagaaaaaaagaaagttttcactctgg

SEQ ID NO: 29919 - DNA, 1084 bp, Artificial sequence
  DNA replication origin
cgctctccctcctttgttgcgcgatgagggtcgggtttcggatctgaccgagccgccgccgcgggatggagccgctcagccaccggggcctgccgcgcctgtcctggatcgacaccctctacagcagtacgtgtgccgggcgggggcgggaccccaggatcgggatcgggaccccaggatggagatcgggaccccaggatcgggatcgggaccccaagatcgggatcgggacccaggcaccgggctggtccggggagcgcgggcgggggcgagatcggggtccggatcggggtcgggttgggaatcgggatcggggtcgggacccaggagccgggctggtctggggggcgcgggcggggggtccccagagaggattcctgcggtccgggggcggggaccgtgggcggaccgagccgagagctgcgtcccccctcccacctgttgtgaacccggcctccgcgagcctcaggggagggaggcccttctgggtgctgcccccgcccctggaccggcagcttctctgtccaggctgaagccgaaaggccgttttgggagcagtcgttggcacccgagtttgccaccccaggggcaccgggtcatgtgtggttcagggcccaggggttcggtgctggggtgggatcgggtgggaggggagacggggggtgcagatatccgcgggggccgtttggatgcgggagctgaaaatcccgggctcagcaatctttcctgccagcctcatcaccacccccaccctcatcatcaccaccaccctcagaagaaaaaaaaaacaaaccttctcgagttctccaccccctcgctcccaaatctctctggatcatgtgattgctcttgcatggccccgggggatgcgtaactgatcacgggtaatggtgtgggggggcttggggcgaaccgagagccgccccccgcccccaccaccgcaccttgctcctgctccgttgctagaaaggcaccgccccttctccccacccttccctgagacacctttcccgaaagctctcagggattaggaagagggtcctcctgggcttacatagtggatttcgcccttcctggcccacgt

SEQ ID NO: 29920 - DNA, 1054 bp, Artificial sequence
  DNA replication origin
ggggcttcgtggtggggcggggctttggtgcgggggcggggctttggtgcgggggcggggcggggagggaccaatcggctcgaggctccgccctccgcaggacgcccccggccgggctaagggggcagcggggctccggcgctgggcgaggaggggccgcgggggtctcggggggtctccaggcggcggcgcagacccaggtccccctcgtcccccccgcgccgggctcagcaggatcctggcgatccgcaaaccaggtgccgtggggggcccgggagcccacaggggtgacatcacctcccgcccgggatctccaagcgcggcttcgcgggcgggagcggcggccgggcccctccccagccagacccgctgcgggacccacggggtgaacgtcctgcgcgccgcgggacgcgcctctctcctcccgaaccttcccccgctcgtccctttccacacccctgacctctgagcgcggccgttcccgccacacatggaggggggcgggtggagacccgggaggaccgaagtcacgggggctgtggggccaggacagtcccacatgtgcccctcctgggcggaggacaaactggagccaggagaagccccaagggctccacgcgttcccctccaggacccctcctggggaccccgagccgcggcctggaaagcccatcgtgtttgcatcatcacctagaaatggtgggaagtcgggtcaagaggcctgagaaatgaccgtttagagacgaaattccctctaaggaagaccccctcgcccaagggcagtgaagagattgggggccccatgcctgtctcctgtgggctgattctgtgggagccatggcagcttccccacagacctctttgggccaagcgaccctggagcagggaaggacaggaggggagtcaggccaggggggtccagggcagtggggctgaagccccttcctgaacccagggaaagggaagcagtggggcccacccagggggcccggtaccccagatagtgacatttcagataccggagctgtctccaccccaccccatccccaggcag

SEQ ID NO: 29921 - DNA, 1379 bp, Artificial sequence
  DNA replication origin
ggtggcacgtgcctgtagtcccagctactcgggaggctgaggcaagagaatggcgtgaacccgggaggcggagcttgcagtgagccgagattgtgccactgcactccagcctgggcgacagagcgagactctgtctcaaaaacaaacaaacaaacaaacagaaaaagagcatgaacagagtgccagggttcaagtcccagccctcacttaccctctgagtgggttactcagctgctcagggcctcggttttctgacctggaaaatggagaaaacagagataacagtgacattcacggtgagatcacgctagtgaacgaaacgctaagccgggcacacagtcggtgttctgtgttcgttatcagaagtttcctctgtagagccctcaagatttgtctctccctctaccctctatcgtgttgtggagtggagggtccgagagtgccaggattggacagaatgtagacagaaaaaagcaaactatggcaacgcgaaggaaagcaactgccacattttagcttggaggatgctgaaaatagcttgttcaagcctttgtagataaaaatgtaaaatgtacgcaaatgtatgtgactcacgcagaagcatacatccatagctccctcacagtcagcgccggatgtggccatcaggaaaaccccacagtgtggggagagggcccgagcgttcttgcttgttgttgttttgaggaggggacggtgctgctgcctcctgggctggtggctcctggtggcggcagctcacgcccgtttccacctttcccctgggctgtcttccgagagttccaggtgggaagaagagatgcccttggcccctcatggctcctccggcctcgcggtcctccgagagcctgctcgttcccttcccatgccgaagctctatttctggagcgtctcattggagatgcacgccccctccctgccaagctccaggtgcctgcttggccctcccaatcctgtgtgctagtcagggacggtgggagggtgacagctgcagggaggggcggcaagagacagcgctggtgcctgagccaggaggattggggcggagggagccctggggacgcagggacgggctaataatattgaaaaccacttctgctgcagccacctgtagaggcttccccacccagagcatcatcctgtgcgtctcccaggggctccccagcctgtgatgagtgggtgacccccatctcccctggggcagctgcagaggcctctgcccaagcagcttatggggcttcctctcagcatcctgggggaggagctgcttctccccttaagaactagatgtgtgtgtgtctgtttggagtgatgaggaccgacccccacacccctccagcgttctgcgggtgccgaccaca

SEQ ID NO: 29922 - DNA, 1000 bp, Artificial sequence
  DNA replication origin
gtccggcgggatgatcattctccccatgtcactcctgggggcttctgctctctccttcccagacggagctcctcctgactcccccagctgtgttcccaacagcagcctgcagccctgtgtccaagctggagatttttgtccaggcacttgcgggccgcttggctggaagcctctggtggccgaggtgctgctgtgcggccgccagatggcgctggggagcccccactctctgccgcaggacgggcagaggcaggactggactgcagagggaacttgccttgaagaggcctggtccttaaagagacacagcacacacggcccgaccggcagccccagagcagaggctccactgatggcaggcgcccctggctaggctctgaggttcctttgccctcgccttgctgaatggtgagccgctgcctctcggagcccgtctccttgacagcctgccctcggctcctgcagccactcctgggcctgatggggacagggccagcctggtgggtggtgtcagaggtcctggcagagcagcgtaggcctgggatgcgtctgcagaattctggctgaacgagcgaggagcacggccagcttcggggccgtcgtgaccacaggagggcagagggccagcccgtgagctctgaccccagctggacgtgctcttgtttcccttggggctaaggagattggagccactgaactgaatctctgggttttggagacttagagaatccattggactcttctgctggcgtctttctgaatgctgatggggacttggtggtaagtaaatgagtagggggctccaggccctgctgtcgagccctcggacggaccctttgggaaaactctgctgttgacctgtgggtggtgtcatctgagccatgtcaggtgagggccacgtgagctggggcttggcgagagaccctcctaaaacggtggctcggggagtgcataatctaagccagcggctctgcccaggatgctgcccttgctgtggccc

SEQ ID NO: 29923 - DNA, 1493 bp, Artificial sequence
  DNA replication origin
caggcggctcccggcacggacgaggggggcgacggcggcgaccacgacttcgagatggtggatttcaacgagaagttcatcctcagccactggctggtggccccttgccggttcgggacccgcgagcgggcgcgcagcccccgccgctggatgcacctgatccccggggggcggcggccgcagcgggggacccgcgacctggagcagcgggaggccgaggccaagggccgcccgggctcgcccctcgccgcggaggagacccccgggcgcgagcacctgcccccgtggcggcgccgcaggttcctgcgggtgcccgagcgggactcgcccggccacagctcgccggagagagacagcgacggcagccggcacagctccgaccgcgaggacgacttctccgcaggtgggcgccccccccagaccccgctcgaccccgccgcgcgccccccaccccgggctgccgggaccccttcccggccgactccgcggccctgtttaacctcgagctcggggccggggagcgggcgggaaggagggtgagctgcgcccgtgtaccccaaagccacctgtggagcttagaaaacacgtgcaaggcgacgttaagctcgggcgactctatgaaaatgaactggcggcggcggcagggccggcgcccgggcctttgcgctttgcgctccgtggccctgacatcccccagcccctccctccggcctggcccccgccagatcccttggcgccaccgggtgctgtcacccttctgtctgtcacccctctctgcacacaccccaggggcttcccatctcccggaaatccccgatccttctgagctccgctttcctaaccgcggaaggccgaaccttccactccattttctgaacttagtctcctcttctccaggctgctctgtgtgttggggccacgtgcaaacttcagggaagggccacggccctcaccagccccctctgcggactcgttttcttcttagaaggcggcgcccggcctcttggctttctaggagtctgggagcaagagggcaaggggaggcttaggcccatctcgttttccggctggcctggtgcccagagaccatgtctagtccagcgtcttcactggataaaagaggaaaccgaagctcagaaagattaagtgctcgttggggtgagctgagaccttcaccgggtctcctgtcatctctctcccctcgcatctgctctcttttctgaggacagggcctgatcttagtcatctttgaacccccttctggtagtatgcacggtgctttgcagcagtcaaagctcaacgcataatggctgaataaatgattgcctggaattgagcgtccaccgagctctttctaggtcagggagtgggaatggggctaaggaggagaggtcaggtggggatgggggtggcgtgggagccctttgctgtgtctgtgaactgtcacggtctcctcagccacgcggaaagcagcacactggtggtgtccggtt

SEQ ID NO: 29924 - DNA, 1486 bp, Artificial sequence
  DNA replication origin
ggaccggcgcctccgccccggggaactcggcccgccagcgccgctcgaacgcgcgggggtcccacatgccccgagctccgtccgcgccgacccttccccgcggcccccgaagagaccagagggaaagtcaagtgtccccttccgccctcgcgcctcctccccgtcttcttcctcttttcttcccctcctgggtttcgcctccctgacgtcggcggctcctcgcggcgggggcgggcgccccggggatgagaacccgccccgggcatcccacagccagctcgggccgcggagccgccgggggagggcgggagctgcggggcctggactcgagccttcgccgcccgccccgatcccggccccggaccccgcccgccccgctcccctgtcggccccgctccctgcacccgagcgcggggccccggacaccctcctgccgggccgggggaagacgtgggggctgagggcggcgtggctggtgccactgcggacccgcggggtcgccctgcgccgggattgatggattgattgattgatgattgattgattgattgactgattgattgattttccttttttgaggccaggtctcgctctgtcgcccaggctggggcacagtggcgcgatcgtgccttaaactcacgtgacgaagatcacggagcagtttagtccaaatccgggggtaacgcttcggggttctgtcggcccctgtaagcttctctcctcttctcactgaagctcttccgggaaaaacacccaaggatgactgagccaagcggctctagctggaggcgcccgggacctcaaagctggactccccggggactgagtccaaccgtggctgcaggggccgcggcctggcggagggtccgcgtgggtgtctacgaggatcccccccgttccatctcctctttgcggcctcagacacttcccctggggaggacgagaaatgggagctgggccgggcgcggtggcccacgcctgtaatcccagcactttgggaggccgaggtgggcgggtcacctgaggtccggagttcgagaccagcctgaccaacatggagaaaccgcgtctgtactaaaaatacaaaattagccgggcgtggtggcacatggctgtaatcccagctactcgggaggctgaggcaggagaatcgcttgaacccgggaggcggaggttgcggtgagccgagattgcgccattgcactccagcctagacaacaagagcgaaactccatctcaaaaaaaaagaaagaaagaaacgggagctggagagggggcctggagacgggggtcccacgtggccctgccctccgcacctggctgagcaaggctttccagttcttttccagggttgtggatgaggctccactgcctgcgaagagaggccctgataaaccatctcgtgctttcttaaagaggggacaccttatcaatgattcacgtttccttcattttaagcatgaagaaattgatctaagaggccggg

SEQ ID NO: 29925 - DNA, 901 bp, Artificial sequence
  DNA replication origin
tgccgagattgcagcctctgcccggccgccaccccgtctgggatgtgaggagcatctctgcctggccgcccatcatctgggatgtgaggagcccctctgcctggctgcccagtctggaaagtgaggaacgtctctgcccggccgccatcccatctaggaagtgaggagcgtctctgcccggccacccattgtctgagatgtgggggcgcctctgccccgccaccccgtctgggatgtgaggagcgtctccgcccggcagccaccccatccgggaggtgaggggcgcctctgcctggccgcccctactgggaagtgaggagcccctctgcccggccagccgccccatccgggagggaggtggggggtcagcccccccgcccggccagcccccccatccgggaagtgaggggcgcctctgcccggccgcccctactgggaagtgaggagcccctctgcccggccaccaccccgtctgggaggtgtgcccagcggctcattgagaacgggccatgatgacagtggcagttttgtggaatagaaaggcgggaaaggtggggaaaagattgagaaatcggatggttgccgtgtctgtgtagaaagaggtagacacgggagacttttcattttgttctgtactaagaaaacttcttctgccttgggatcctgttgatctgtgaccttacccccaaccctgtgctctctgaaacatgtgctgtgtccactcagggttaaatggattaagggcggtgcaagatgtgctttgttaaacagatgcttgaaggcagcatgctcgttaagagtcatcaccactccctaatctcaagtacccagggacacaaacactgcggaaggcctcagggtcctctgcctaggaaaaccagagacctttgttcacatgttt

SEQ ID NO: 29926 - DNA, 1095 bp, Artificial sequence
  DNA replication origin
aggtcacagatcaacaggatcccaaggcagaagaagttttcttagtacagaacaaaatgaaaagtctcccgtgtctacctctttctacacagacacggcaaccatccgatttctcaatcttttccccacctttcccgcctttctattccacaaaactgccactgtcatcatggcccgttctcaatgagccgctgggcacacctcccagacggggtggtggccgggcagaggggctcctcacttcccagtaggggcggccgggcagaggcgcccctcacttcccggatgggggggctggccgggcgggggggctgaccccccacctccctcccggatggggcggctggccgggcagaggggctcctcacttcccagtaggggcggccaggcagaggcgcccctcacctcccggatggggtggctgccgggcggagacgctcctcacatcccagacggggtggcggggcagaggcgcccccacatctcagacaatgggtggccgggcagagacgctcctcacttcctagatgggatggcggccgggcagagacgttcctcactttccagactgggcagccaggcagaggggctcctcacatcccagatgatgggcggccaggcagagatgctcctcacatcccagacggggtggcggccgggcagaggctgcaatctcggcactttgggaggccaaggcaggcggctgggaggtggaggttgtagcgggccgagatcacgctactgcactccagcctgggcaccattgagcactgagtgaacgagactccgtccgcaatcccggcacctcgggaagccgaggctggcggatcattcgcggctaggagctggagaccagccccgccaacacagcgaaaccccgtctccaccaaaaaaatacgaaaaccagtcaggcgtggcggcgcgcgcctgcaatcgcaggcactcggcaggctgaggcaggagaatcaggcagggaggttgcagtgagcccagacggcagcagtacagtccagcttcggttcggcatcagagggagaccgtggaaagagagggagagggagaccgtggggagagggagagggagaaagagggaga

SEQ ID NO: 29927 - DNA, 889 bp, Artificial sequence
  DNA replication origin
gttaatgcctgagatatttctacatttatatttttaggggaatctttcctgggtttggtaccagtcttgtgctcatccttttaaaagattttggaagtttttcttcttttcctatagtttggaacaatttaaatagccctggtattatcttctcttgaaaggtttggtagaattcccatctttttttgtgtgtgtgtttgagactgtattttgcattgtcgcccacactggagtacagtggcgtgatctccgctcgctgcaagctccgcctcctggatttaagcgattctcctgcctcagcctcccaagtggctgggactacaggtgcccgccaccacgcctggctaatttttgtatttttagtagagacggggttttaccgtattagccaggatggtctcgatctcctgacttcgtgatctacctgcctcggcctcccaaagtgctgggattacaggcgtgagcccccgcgcccggcccctagtgcagtggttttaattgtgttcatggggacccttgctggggactgtggagggaagatcatggggacccttgctggggactgtggagggaagatcatggggacccttgctgggggctgtggagggaagatcatggggacccttgctgggggctgtggagggaagatcatggggacccttgctgggggctgtggagggaagatcatggggacccttgctgggggctgtggagggaagatcatggggacccttgctgggggctgtggagggaagatcatggggacccttgctgggggctgtggagggaagatcatggggacccttgctgggtgctgtggagggaagatcatggggacccttgctgggggctgtggaggggaagaaaagtcacgtgaacgacagacgga

SEQ ID NO: 29928 - DNA, 1005 bp, Artificial sequence
  DNA replication origin
gcagtcaggggaaacttactgagactcagttttctcatctgaaaacggggcgacggataacaaggaccgtgaagaatcccccaacgcgggcgccccagctcagagcccgaccctgggaggctggagccgagggaagcgccaggagcggggtccgcagcctcggcccctcccgcgacccccacttgcggcgggattcaggcggcggcgacccccgagtccctcccctggggcgcctcccgacgcgtcccggccccggtcttagctcataaatctccttcacacagaggcccataaatcaggggcggtggagggaccccccagctccccgcccccgccccactcctggagaggcggggggggggcgcaggaagcccctgggatggggaccgcggcttgttaattacaggtcgcggggcctgatttatggggggggcgggccgcatgctgcgcgggggctgggcatgtctgggggagcccggacgggttccaggaggcctgaggggctcccaagttctcagggccttgttgaaatgacagtctggagcgtgatcaaccgtaacatgttcctatgtaaataaaatataaacgtaataatacgcatggctaaggcaatggagagactgtgtgcccagctgtgctaaacgctgtatcaactctccaaatagttactgaatgcctattgggtgccaggaatcttgtgtgtatatatattctctcccgaacctccccaggcagctctgaaagttagtccttacggttcccattttgcagatggagaaatgaaaagagaagtgatcgacttgcccaagttcccttgattaataagtagtgggttcaggaatcatacacctcgtctctgtcctccaagcttaacctgcttggactaggttatcctaccacctgcttcgctgtcttcctgctccacccatgagctgtgtgacgttgagcaagcgtcttagcctctctgagcctcagttctcctcactgataaaagagcattctgcc

SEQ ID NO: 29929 - DNA, 1258 bp, Artificial sequence
  DNA replication origin
agttctcggcccgggcgggggcgggcgggggcgggcggggcgccgtgatttagggtctggcggttccgccggcggccgcgtaggtgcctattagcgccgggcggggcctgggcttcaaaagttccggctcttcctccggaagttccggcgccgctccccgagggaggacggaacgcccgcccgggagagaaagtccgggagccgctcacgggggcctcgaccccaccccctccggagagcgggtcccgggaagccctgagcctccttctctcccaggcgagaccctggcgtttcaacccacacgcccggtgtggaagacgtaggggcgcaattgcagcctctgccccttcatgcgctcattcaacaaaaacttttttttttttgagaccgagtctcgctctgtcgcccaggctggaccgcagtgtcgcaatcttggctcactgcaagctccacctctcgggttcaagcgattctcctgcctcagcctcccgagtacgtgggattacaggcacccaccatcgtgcccagctattttttgtatttttaccagagacggggtttcaccatgttggccaggatggtctcgaactcccggccttaagtgatccgcccgcctcggccacccaaagtgctgggattacagacgtgagccaccgctcccggccctgaactggatttcaaaggatgaatagcagtttgccaagcagacaggaggtagagggaacagcaggtgccaggccctggaagtgtaagcggtcacaggatgatgcgaaaaatacaggaaagtgactttgccaaaccaccaaatgtgaggccagggagtgacgggagataaggctggagatcaccaggcgtcgtcccaaaagcttgcttttcgccctgtaggcagctgggtactgcaaaaggttattaagcagaggaatgtcagccgtatttgaattacagctagagctctttgagcagtgtggagaatggatgttaagacaaattccacttaggaagcaaggatcctggaggaagggggggcctgagctatgcaggcagtggtgagagaagggcacggagtcaacacctgtttggaaaatagaattgacatgtgggggtgccaatgggataaagcagatgacaaaaaggggtgtcgtctccatattctcctttaagagcagaagccttagttcagagactctctctacaaaggtccagccatggacatggggacaagaaagccagtggcatatggtcacctcagacccagggc

SEQ ID NO: 29930 - DNA, 2410 bp, Artificial sequence
  DNA replication origin
tgggcgcgcgaggctgggccctgcaggcggcggggggctggcgcctgtgtccccggtgtccccgcgcgcggccgggccgtggcactccaggtgtccgcagggcccgcggggcgcggggctggcgcgcaggaccagggagagcgcggcgatgcggtggatggccctgcgcagcgtggcgatcttggagagcctcttgccgcccaggtcgtgccgcagcgcccggcgcagcgcgttgaaggcctcgttgtagtctaggatgcgcttgcgctcccgcacgttggcggccatgcgccgcgccttggaccgcaccggccgcgcgcgcctcctgcccgccggctcctccgcctcgccccggctgcaggaagcgccgttcgcccccagcacccccgaatcgcccccgggctcggggcaggggccccccaagtcctccgcagagtcctcggcccccttccgcgccgtgaggcctagtcctggcgcgccccgcagcatggccttcccgggcactcgccctctgccccagccccggccctctgccctctgccctctgcccactgccttggcccggctcgcgacgcggacggtccccggctcctggggctggacactcccgagacaggccccttccagctgggctttatggcaccacgcggcgccccgccctcccgtccatccatctccctcctcctgctttattatcggcctccaggtaggtcggcgggggaggaaccgaggggaagaaggaaagcaaggagggaagcttgcaggttcttgtaagcggggaccagacgggcagcccggccacgctgccccggggaccttgccctgcctagctctggggccgctgtggggtgtctgggttccacattcttcctccccattcccagataaggtgctaagtttggcttctagcaggagagctgataggaataaaaagaggcagagggccgggcactggggctcacgcctgtcatcccagcagtttgggaggccgaggcgggcggatcacttgagttcaggagttcgagaccagcctggccaacagagtatataaaaccccgtctactaaaaacacaaaaattagccgggcgtggtggcaggcgcctgtaatcccagttactcgggaggctgaggcaggagaatggcttgagcccaggagctggaggttgcagtgagccgagatcgcaccactgcactctagcctgggagacagaacgagactccgtctcagaaaaacaacaacaaaaacaacaacaaaaccttgaaagttcttgtcaagtcccgtgggcaaccacagagatgtcactgaggaaaagcatgagtgtcccggcaggactcatatgggaggcgcagggccctgcaggtaaagctgacccagagcttccggctttttcagctatggagggcggctggctgcaattggggttcgggttttggttgggcctgactctccctccactgccctttgactccccttctgcaggcagagctgggatgagtcagcagcagagggtgacggggaagatccctttgcagccctgggtccacatcaggggcatctttggggtccagagccctcgggcagccccatcttgtgacacagccctgccaggttatgaactcaatgagcagcctctgtcctcttcccccagggatttgcatttgaaagagggtctcagaaaaaagatgatgtttattcccaaagaaagacccccagtagaatttccggcatccacagctgagttatttggagcgcctgaaggccactcattcccagtcacaatccaaatgcctctaagatgccaaggcctatggcattggaatgggtgtgtggttcacatccatctcgccaaaagagcattgccaataaccccattatttcaaactgtgaatttctccataaaagaaaataataaggcattaggaagcagagtgtatgtatttacttctgtgattgtctgccttgcccactaggatgaaagcatcctaaggacatctgtatttcccaggttctatgtcccccaaatctgcaatatatgtcgaattataaaacagctagaggccgggcgcagtggctcacgcctgtaatcccagtactttgggaggccgaggtgggcggatcacttgaggtcaggagttcaagaccagcctggccaacacggtgaaaccccgtctctactaaaatacaacaattagctggacgtggtggcggggagcctgtagtcccagctactcgggaggctgaggcagagaatcgcttgaaccagggaggcggaggttgcagtgagccgagatcccgccactgcgctccagcctggcggacagagcgagactccgtctcaaaaacaacaaaaaataaaccagaaaaaaaaaaaaggtcagtaaaagcaaagaaaatgcccacgcagcgcgc

SEQ ID NO: 29931 - DNA, 2394 bp, Artificial sequence
  DNA replication origin
ggccttcaacgcgctgcgccgggcgctgcggcacgacctgggcggcaagaggctctccaagatcgccacgctgcgcagggccatccaccgcatcgccgcgctctccctggtcctgcgcgccagccccgcgccccgcgggccctgcggacacctggagtgccacggcccggccgcgcgcggggacaccggggacacaggcgccagccccccgccgcctgcagggcccagcctcgcgcgcccagacgccgcccgcccctcggtgccgtccgcgccccgctgcgcctcgtgccccccgcacgcgcccctggcacggcccagtgcggtggccgaggggccgggcctagcacaggcctccgggggaagctggcgccgctgtccgggggcttcctctgccgggccgcctccctggccgcggggctacctgcgatccgcccccgggatgggccatccgcgctcctgaccggcctcgaggcaccggctgggctgcagggaggccgggctggcagctggactataaaacccgggactgcaaaggcgtcttggacagagcagaactggaccggctgagacctggcgtggaagagaaggagctcgccagagagaaggagctccgggacccggggttgcgcccccacatcccagcctggggcagagagaaggagctccggggcctggggctgcgcccccacatcccagcctagggaggcagttgccagaaaggctcaggatcctgaactcatcttggactcgaactcgtcttggaatgccgccttcgcactcctgcgcctccgagccctgtgtgttctcgatgcttttaggagagtgagggctttgaggcaggaggtgtgggagcgtgggaatgcgggtggggcctgctgtggtctcgtgggcacatgagtgcggagtccccttccctgcctgcgctgctgcccaagcctgatccgggagaggcaggatccgggagaggcaggcaggggcagcagccaaataaaaggaaaaactcatttctctccgataccacgactccagtgggccccgtggcccagggtggcaggaacgcctgagggctgggggctctccttggaatgctgggcggggcctaaggcccacaggtaggcgcctgggggaactcattcatggcaagaccccaggtgtggctgagcactgtgggagcccaaggggaggaaagagacatccagagacccctcctccctgagtcccctggggtggaagaggatatcaggagaggggtcacggggcctgggagtctaaggatggggtcagccccgtctctggacctccctgcagagctgcctggaagcagccacagtgaagggggactctggccaggtctcagggaaggaggccaagggcagggctaggattgggggccggtaagtcctgcgtgcatgtaccccgagcgacaggcaggaagagctcccagggaaccgtgggccagggcccccataatgaggggccgacttggaacccaggaaggattctggggagggggttgagtgagggcagaggggcctcaggccaagcctgctgagctagtgagagacacagccagctgccccgagagttttgtccagagagctgccctgcatctgagatgagctggtgtctggcccggctcagggtaagggtctaatattgcaagggctgcctgctgggccagagcccagaggtgctgggggagcgctgggctcttgccaacaggagagggaagggttccccacagctagctcagagtgcggatcccacagaagctagagaaacgccattaggcgtaaacccagggagagtttcccagagcacgtggggtgaggctcacctctacagttaaaagtgcctctgctgtctgcaaaccccagccctggctggcacgctgagcatcctgtccccagccacagcccttagggttcccaattgcgcagggaggctgtgacacagaccacgggaaggctttgactctattgagagcggacgtgggtctagccaggagcagcaacgcaggagatgctggccccagccctgcccgccgagccccacagtgccacgggctgccagtgagaaggaaagagccaggcctgccctggtccagcccctgctcagccgcctctctcagcctctagttcctcccctctgacatgaatgattccaggatggctgtgaggattgtaagtggttcgtaatggaccgtttctggcaaacagaaggtgttcacaagctgtcatgtttgtgtactataaggatcctgtgagaaaccagcttggacaaggctgtagccatgtttcagcctcaggtatttatcctctggaaacacaatataaggaccagcaagtcctactttgctaaattccagaactgaaagaagtaagggggccgggt

SEQ ID NO: 29932 - DNA, 1953 bp, Artificial sequence
  DNA replication origin
caggaggattacttaaacccgggcggcagagattgcaatgagccaagattgtgccactgcactccagcctgggcaatagagcaagactccatctcaaaaaattaaagagggctgggctcagtggctcacacctgcaatcccagcactttgagaggccaaggcgggtggatcacgaggtcaggagttcaagaccagcctggccaacatggtgaaacctcatctctactaaaaatacaaaaattagccgggcgtggtggcgcacgcctgtaatctcagctactctggaggctgaggcaggagaatcgcttgaaccaggactcgggaggcagaggcggaggttatagtgagctgagattgtgctactgcactccagcctgggctacagagcaagactccatctaaaaaatgggaagggaagggaagggtaaggtcgaggaggggaggggagggggaaactggagccacatcagagagatgtgggggtctctaacatctagggggagggccgaggggagtggacagaaaagtattttgaaaaggagattccaggaggtggaaggaaatcttggaaaggggcagagacacccagggaggagagagtctgaaggagggagcggccagctccgaggccgctcaggttcaatgagcatggaagcatccactgccttggccacgcatagatccctggtgaccgggggatggaggggccttggcaaaatgggagggatgatggatgagctgaggtcctggaagcagtggagagatgcgatccagagcccaggaagaaagacaccctgtccctggcagcctgaaggagaggccgtgagggcagaggccgatggaactgctcagagggaaggggctggctcacgctgcacggccaccaggcctccagggatgtgggtccaaggtcgtttgctaagaactaggggcctggtggcagcagggaggggaggtgaccaggcacagacaggccaatggcccaaggcctctgctgaggctggagaccacagatgtggggtgttgttggcctgtggggtgttgctgtcggcctgtgaggtgttatcggcctgtggggtgttatcggcctgcgggttgttatcagcctgtggggtgttgttgtcggcctgtgagttgttatcggcctgtggggtgatgttatcagcctgtggggtgtttttatcagcctgtggggtgttatcggcctgtggggtgttgttggcctgtgggtgttgtcagcctgtggggtgttgtcagcctgtggggtgttatcggcctgtggggtgttattggcctgtggggtgttgttttcggcctgtggggtgttatcggcctgtggggtgttgttattggcctgaggggtgttatcagcctgtggggtgttgttggcctgtgggtgttgttttcggcctgcgggtgttgttttcggcctgtggggtgttatcagcctgtggggtgttattggcctgtcaggtgttatcagcccgtggggtgttgtcggcctgtggggtgttgttgtcggcctgtggggtgttgttgtcggcctgtggagtgttgttattggccagccgggtgtgatttgctccagctgtaggtgtaggttcccagacatgcatatcaggtcaacccaagtctgaggatggcagagttgctgtgagagcagggccaggtggtgaggaggatgctggtgaggtggctgagatgacacatcgaagggttgggctgtgctgggagggagcgaggccaggaagatggtgatagacttggaagagaaaaggggccatgggctgagagaagacaaagggcatgagagggtgagagggaagttgggagttgagtttcaaaggaggaatcaggtcaggggatggcaaaggggtggagtgtagttgtggaaatgaatttctaaagggaaaaatcagtagccagggaggagagagttgagggagcccagtg

SEQ ID NO: 29933 - DNA, 1310 bp, Artificial sequence
  DNA replication origin
ggagtccggtgggggatggggaacccgtgggggatggggagtctggtgggggatggggaacccgtgggggatggggaacccgtgggggatgaggagcccgtgggggatggggaacccgtgggggatggggagcccgtgggggatgagaagctggagggggatggggagcccgtgggggatggggaacccgtgggggatggggagcccgtgggggatggggaacccgtgggggatggggaacccggtgggggatgaggagcccgtggggggtggggaacccgtgggggatgagaagctggagggggatggggaacccatgggggatggggaacccgtgggggatgagaagctggagggggacgaggagcccatgggggatggggaacccattggggatggggaacccgtgggggatgagaagctggagggggatggggagcccgtgggggatgggaaacccatgggggatggggaacccgtgggggatgaggaacccgtgggggatggggaacccagtgggggatgaggaacctgtgggggttggggaacctgtgggggatgaggagcccatgggggatggggagcccatgggggatggggaacccgtgggggatgaggagcccgtgggggatggggaacccgtgggggatggggaacccggtgggggatgagaagctggagggggatgaggagcccgtgggggatggggagctggtgggggatgaagctcagacagcacgtggaggcagctcttaggagctcagcagtggaagcgaataggtgatggcagagcaaatacaaccgggtggataaaaggggtttcttccagacgggagaggaagagagctgcaaagagggaagggggatgagactgaggagtgatgggtgccatgatgtccccgggcaacagagagaggctgaggtcaggactagagttcagggatggcctgtggacagagtggggagggcactcttgttcttagaaattggatgagagggccaggtgcagtggctcacgcctgtaatcccagcactgtgggaggctgaaacggggaggtcacctgagggcaagagttcaagaccagcctgaccaacatggtgaaaccttgtctctactaaaaatacaaatatcagccgggcttgatggcatatgcctgtagtcccggctgctcgggaggctgaggcaggagaatcacttgagcctgggaggtggaggttgcagtgagccaagatcgcactattgcactccagcctgggtgacagagcgagactctgtcttaaaaacaacaggccagacgcagtggctcaca

SEQ ID NO: 29934 - DNA, 1465 bp, Artificial sequence
  DNA replication origin
gcactccagcctggggaacaagagggaaactccgtctcaaaaagaaaaaagaaaaaagaaaaaagaaaagaaaaccagggcgcggtagtgacagcctcagatttcgggaaagaagacctgccatgacagaaaccgttacagcctccgtcgttcttttccgcaggtcgggcctcgggccccggtctgacccaggtctctcgctggcttttttcaggagcagtcccggccggccccgcctcagcccttctcgttccccgggggccgctccctttcggcagtcgcagttcccgcctctgggctccggcgcccgctgagccgacagaggagaggcgtctcgtgcgctcgttccagccgcttcgggcgccgagttccaggacccgccccccgcgccagttgccagggagcggttgccatagagctgagcagttgtccgcgtgcgcaggcggaagtcccggattgaggcgccgccatttttgctgcccggacgcggagcgagaggctgagagagtcggagacactatccgcttccatccgtcgcgcagaccctgccggagccgctgccgctatggatgatcgagaggatctggtgtaccaggcgaagctggccgagcaggctgagcgatacgacggtgagttgggggggcaacggggggctggaattctcggaccctctgccgccgcccacagaggccgggaacaggagacaaaatggcggcatcgtctgcgagcctggcccgggggcttgggttcgggaagcaggaaatggcctgggagctcccggggcgatgggaggctctatgccctggaatgtgaccccttcgccgtccttaactgcaaacaactcgcgggccgggaggccggggcgacggggtggaggagttggttgtaaaatggcggctggggggagggcgagtcccggggcgggggagggggaggagatggcgggtgctgtctccgaacgagccaccctcatgggagcttctgggacggccttgggatgtggagaacaattgggtggggtgacgggggaagcagcacccgccacatgggagagagcgaagaccgggagctgtagcgcgggcgcctttcagggaaatatggcgggtgggggcggtggcttttccccggaggccccgtgtggggcggcggccgtggagtctcacaaaggaggacctttgagagcgatgggcttcctcaggcctgaggtgggggacagtcgtggatgatggtggggggagaggggtgagtgggaatcactgcagttcgtcttcgggcggtggcaggctcccatgctgcgatcgggtttctttcccgtaggccggcacctcgtagtgaggggtttcggggcttttcctcctcgtcgtcttctggggaggcccagaaaatcctcactccctccctttcctcagacttaaaacaggagatctcgaagttcctgtaacctttctctggctccatcacccgt

SEQ ID NO: 29935 - DNA, 925 bp, Artificial sequence
  DNA replication origin
cctctgcccggctgccaccctgtctgggaagtgaggagcgtctctgcctggccgcccatcgtctgggatgtgaggagcccctctgcctggctgcccagtctggaaaatgaggagcgtctctgcccggccgccatcccatctaggaagtgaggagcgtctctgcccggccgcccatcgtctgggaggtgaggagcgtctctgcccggccgccccgtctgagaagtgaggagcccctccacccggcagccgccccgtcagagaagtgaggagcccctccgcccggcagccaccccatctgggaagtgaggagcgtctccgcccggcagccaccccgtccgggagggaggtgggggggtcagccccccgcccggccagccgccccgtccgggaggtgaggggcgcatctgcccggccgcccctactgggaagtgaggagcccctctgcccggccgccaccccgtctgggaggtgtgcccagcagctcattgagaacgggccatgatgacaatggcggttttgtggaatagaaaggggggaaaggtggggaaaagattgagaggttggatgcttgccgtgtctgtgtagaaagaggtagacatgggagacttctcattttgttctgtactaagaaaacttcttctgccttgggatcctgttgatctgtgaccttacccccaaccctgtgctctctgaaacatgtgctgtgtccactcagggttaaatggattaagggcggtgcaagatgtgctttgttaaacagatgcttgaaggcagcatgctcgttaagagtcatcaccactccctaatctcaagtacccagggacacaaacactgcggaaggcctcagggtcctctgcctaggaaaaccagagacccttgttcacatgtttatctgctgaccttccctccactattgtcctatgac

SEQ ID NO: 29936 - DNA, 1156 bp, Artificial sequence
  DNA replication origin
gccttcaagcatctgtttaacaaagcacatcttgcaccgcccttaatccatttaaccctgagtggacacagcacatgtttcagagagcacagggttgggggtaaggtcacagatcaacaggatcccaaggcagaagaagttttcttagtacagaacaaaatgagaagtctcccatgtctacctctttctacacagacacggcaagcatccaacctctcaatcttttccccacctttcccccctttctattccacaaaaccgccattgtcatcatggcccgttctcaatgagctgctgggcacacctcccagacggggtggcggccgggcagaggggctcctcacttcccagtaggggcggccgggcagatgcgcccctcacctcccggacggggcggctggccgggcggggggctgacccccccacctccctcccggacggggtggctgccgggcggagacgctcctcacttcccagatggggtggctgccgggcggaggggctcctcacttctctgacggggcggctgccgggtggaggggctcctcacttctcagacggggcggccgggcagagacgctcctcacctcccagacgatgggcggccgggcagagacgctcctcacttcctagatgggatggcggccgggcagagacgctcctcattttccagactgggcagccaggcagaggggctcctcacatcccagacgatgggcggccaggcagagacgctcctcacttcccagacagggtggcagccgggcagaggctgcaatctcggcactttgaggggccaaggcaggcggctgggaggtggaggttgtagcgagccgagatcacgccactgcactccagcctgggcaccactgagcactgagtgaaccagactccgtctgcaatcccggcacctcgggaggccgaggctggcagatcactcgcggttaggagctggagaccagcccggccaacacagcgaaaccccgtctccaccaaaaaaatacgaaaaccagtcaggcatggcagcgcgcgcctgcaatcgcaggcactcggcaggctgaggcaggagaatcaggcagggaggttgcagtgagccgagatggcagcagtacagtccagcttcggctcggcatcagagggagaccgtggaaagaga

SEQ ID NO: 29937 - DNA, 1593 bp, Artificial sequence
  DNA replication origin
gcgcggaggcagccatggcgggcaacttcgactcggaggagcggagtagctggtactgggggaggttgagtcggcaggaggcggtggcgctgctgcagggccagcggcacggggtgttcctggtgcgggactcgagcaccagccccggggactatgtgctcagcgtctcagagaactcgcgcgtctcccactacatcatcaacagcagcggcccgcgcccgccggtgccaccgtcgcccgcccagcctccgcccggtgagggactgacgggacggcgggccctgggcggggtgagggccgcggaactcccagcctggctggctggtcctcgagagcggaccctcgggggtcgtgggcagagggctgggtgaccgtggcaggggcccgccggctgctcgggctcgctctcacccggggagcaggagtgtgggggaggaggagccgcggaccgaggccccggggtgtgcctggggagggcagccgcggggaaggggaactgcttcggccccagggtggggctggctcccgggccaggcgcaagggtagggcagggcaaggcaacgtggggacaaagagctgagggagatgttggcactgcgggggcatcacttggcagcggcgcccagaatgaatccgataatcctacaagtggcttttaggctggaaacgtttcctgccgtgttggagagccgggtttggccgtgctcccctggtggcctttggtaggaagtcaccacatactggccgggagggatggagacaccctcaggaaaccggtcaattttttcctttcttgggcatttttccaaaatctttgtaccgttctcttcccccgtggaggacgaaggtggtgaactaagtgctagaagaaatagtggtagcagaaagccttcagtgaccagcccaacccagtttaaggcgatgcctggctatgtgcaagagatctaagcgtccagaagactgtccgccgttagagagttctggttttcaaagtgtttagtggaggaaagacattttattccacaaaataaaccagaagtgaggcaatggaaacagacccttccctgtaagtgactggaacttcattttccttggacttaaacattgtcggtgtgtacttcagggcgtcaccttgctcagtaagatggggctgcgggctgagtcttcctggatattgggaacagactctacgccaagaacataaattacctgcgctgggttttccttgccagggagggatccctgagattgactgtcttaccgatgccgttggagttgatttgggactgttttaagggaatagatagatgcccttagtactggagatttgtgaggtacaaagtaattctggggttctcattgtatgtgtacctgtgtaacagcatcaggagtcctcgtgccttcacgctgttgccaagtcgaagcagtttcttcttggccagctgagaatgggttcagactagtctcatatgaatcaggaagctcttgagccgtcctttgtagacttgcccttgtagaatagttctaatttagatttactcgctccggccagaaatagagaattggataggcagtctctttgttaacacacac

SEQ ID NO: 29938 - DNA, 1376 bp, Artificial sequence
  DNA replication origin
ggattacaggcatgagccacggcgcccggccagatctgtattttagaaaactcagtgggagttgtttgcagtgcgattaggggcagccagacgaaagagcaccagcgagcacgacactcgtaggaacacagtccagaggcaatcatgagggcagtgagagtaggagatgcccctggctacaatttagtgtttagaattatctgggcaggtgaccccaaagcctcaaaagagaagagaactctgtacttcacgtggcttggtacactctgctccctttgctttgaatgtccttccccgccgagtgcggtggctcacgcctgtaatcccagcactttgggaggccgaggtgggcggatctcaaggtcaggagatcgagaccagcctggctaacacggtgaaaccccatctctactaaaaatacaaaaagttagccgggcgtggtggcgggtgcctgcagtcccagcaactcgggaggctgaggcaggagaatggcgtgaacccgggaggcggagcttgcagtgagccgagatcacgcccaggcactccagcctgggcgacagagcgagactccatctcaaaaaaaaaaaaaaaaaaaaaagaaagaatgtccttccccatttgtcattcagcagtcaacacatgctgcctcctctgggaagccctcctggattactccatagactggctgtgggggctctgctctgtgttcatgtccgtttcccatgatagcgtttgtcagcatttgtcatccttttgtcatccagtttcctggttcctctcactggtctgtgagttcgaggagtgcagggcccagccatgataacctttgcacccgcagtgcaagtggagtgtcaacaacaatgtcctaggtgaatcaatgaaaatgagaacgtcagctggtctgtggagaagctagaggaacgagcagaaacggaccgacgtggccgggcgcgatgtttctcgcctgtaatcccagcactttgggaggccgaggcgggcggatcacctgaggtcaggagattgagaccatcctggccgacatggtgaaacccccgtctctactaaaaatacaaaaaacagccgggcgcggtggctcacgcctgtagtctcagctactcgggaggctgacgcaggagaatcgcttgaacccgggagcagtgagccgagatcgcgccattgcactccagcgtgggcgacagaacaagactccgtctcaaaaagaaaaagaaaaaagaaacagactgatatcgcaggaagcctggccgagaactcaggccccagggccacacgcatcttttctcctccaattctgtctgggagtcgctgcctagaagtcccaggtcgtccaggaaccggggcccagacgagaagcaccg

SEQ ID NO: 29939 - DNA, 1130 bp, Artificial sequence
  DNA replication origin
gcggagccttgggagcctctccccagccccttcagcctggcctctgtccccagtatgcggtgcctgttgtgaaatacgaccgcaagggctacaagcctcgctcccggcagctgctgctcacgcccaacgccgtcgtcatcgtggaggacgccaaagtcaagcagaggattgattacgccaacctgaccggtcagccagggtccagggctgcagggggagggccctgctctgaccctcgacctctgacctttgccctctcccctcaggaatctctgtcagcagcctgagcgacagtctttttgtgcttcatgtacagcgtgcggacaataagcaaaaggtgccttttcatggatggggaggagtggtgggggatgggggaggtagatggggaggtggggtggatgggggaatagggggtgtgggggtggatggggaggtgggagggtggatgggggtagattggggggtcaggaggtggatggggaggtgggagggtggatgggggtggatttgggggtcaggaggtggatggggaggtggggcgggggttcctcaagttctgggcagggcctgacccctcctcctgcctggccccccagggagatgtggtgctgcagagtgaccacgtgattgagacgctgaccaagacagccctcagtgccaaccgcgtgaacagcatcaacatcaaccagggcaggtgaggcgcgggcggcccccggggacagggcgggggtggcgagggggctgtgtgggcacccagggacagggtgggggtccaccttagggttgggggtctgcctccatggaaaaaccctcacccaccccgttcccccagcatcacgtttgcagggggccccggcagggatggcaccattgacttcacacccggctcggagctgctcatcaccaaggccaagaacgggcacctggctgtggtgagtggggcctgctttcccgcttatggcctggctgtgatagccaagccttccttggctgtgcttggcagagcccaggcacctcaccatgggccttcatccagaggccatcataccacctcttccatcccttggcccacccatgagggccagagagagcccctcagtgcagaaagttgtaaaggtggcagcacg

SEQ ID NO: 29940 - DNA, 886 bp, Artificial sequence
  DNA replication origin
cacaaggcaccctggcgctcaccgccggatggtctgtgccgcccacttcctcttggctgccttcctccggcccagtgttccacgccaccacgactggatgcagatggctgtcgtggagaccacagatggctgaactctatcttcttaccatggtggccccccctggccccagaccccgcccctcctgaacacccatgggcccgcgaacctgatctcttcacccggaggaatttctgccgccagtgaaagcccctccaggcagcttggatctttgtggctgcggttgggaaagaaaggcaattggccagagcgcggggagccagctgggagcctggtgccgtgtgcgctccacgagtggcatgaatgggagagtggctgaaggaaccaacgagcaggaggagagtggtgaagaagaatgaatgtggggactgcccggaaaaggggggcggcgggtgggatggtgggcgtggggctggagctggtggggaggggctccaagtcggccattggactctctggagaaggactccctggagctgggcgtggggctggagctgatagggaggggtggactccctggagaaggagcccaagggagtgacttccctgcttcccagaagggaccccgtgcagcaggaagggtaggcctctctctcacccaggctctgccgccggacctccagggcatcctctgtggcaaacagggtcttggggaagcggatgaagatcttggtcctgggagagcagtagtgatcagcccggggttgccactcccattccccgcaggcacccggcacggacactacccacctgcccatcttgtactcttctggcttgtagcccaggtgtcggaccagcacagccaccccatcctgcggccgtcctg

SEQ ID NO: 29941 - DNA, 1006 bp, Artificial sequence
  DNA replication origin
agtagctgggattacaggcgcccgccaccatgcccggctaatttttgtattcttagtagatggggtttcaccatgttggccaagatggtctcgaactcctgacctcaggtgacctgcccacctcagcctccccaagtgctggggttacaggcgtgagccacggcgctcggctctcactctgcttctctgagcagccttccttccatccctccagcattgctgagggaaccaggcgaaggggagtgatgggagtaggggctgccttggaacagctgcccctccacacccgagggcaagggcccggcctcacctcctcccccttggcgatgatcttcctgtgtgtcagggcttctcgcagcgtcgagccttccacgctgaggagctgccaagggcaggcgaggacacggtgagggtgcacccccagcccccgcccccgccgtcctcccgtcgccctctgcccgccccactcaccctggtcagatacttgagctggttctcggtggtgacctgggcattgctctcctcgttggcagcaaagtggatgttgcccaaatgaaggacgctggccacgatgctcagcaggtcctgggggagcaggccgggggcaggagggggtgagaggggccagagagccccaagagggcaactagcagatggccatgcaggggtgggtggtgaagtgtcggagagaaggggctggaagtgggaatgggtgttaaaggtggaaggtgattctgcgggtgggatgggcacggtggctgacgcctgtaatcccagcactttgggaggctgaggcgggaggatcatctgaggtcaggagttcgagaccagcccagccaacatggcaaaaccccatcattattaaaaatacaaaaattagccaggtgtggtggcaggtgtctgtaatcccaactactcaggaggctgaggcatgagaatcactttaacctggaggcagaggttgcagtgaactgagatcgcaccactgcactccagcctgggcgaa

SEQ ID NO: 29942 - DNA, 1993 bp, Artificial sequence
  DNA replication origin
cctccgccccaggtttgccgtggcggacactgtgtaccgagcactgcgcacggagcgtcgggaccaggctgtgatgatctctggggagagcggggcaggcaagaccgaggccaccaagaggctgctgcagttctatgcagagacctgcccagcccccgagcgcggaggtgccgtgcgggaccggctgctacagagcaacccggtgctggaggtgaggggcagggagagaagcccagtgccagtgcgggaggggaggggcagggagagaagcccagtgtgggaggggagggcagggagagaaggctagtgtgggaggggaggggaggggcagggagagaagcccagtgcaggaggggaggggagggcagggagagaagcccagtgcgggaggggaggggaggggcagggagagaagcccagtgcgggaggggaggggcagcagtagctacaaggcggggtggggagggcagggggagagtgccaggtgtccctcatacccctgtccactcctaggcctttggaaatgccaagaccctccggaacgataactccagcaggttcgggaagtacatggatgtgcagtttgacttcaaggtaccatggatgtgtgtgtcgtgaggattcccattcagtaggctctacacgtgtgaagcacctactgggtaccagggactattccaggtgctgcaattccagcagtcaaacaaagcaaacaaaaatcctgccttccagggtgataaacaataaacagggaaattgaggccgtggcagaaaataaaatgcagtaaggagtggggggcaggtgcggtcgtattagggtaggcctcactgagaaagtggcattttaataaaggcttgacagctgggtagggtggcacatgtctgttgtcccagctcctctggaggctgaggcaggaggatcacttgaggccaggagtccaaggttaccctaagctatgatcatgccactgtactccagcttgggctacggagtgagaccctgtctctaaaaaaaatagaaaataatggcttgatggagataggagcaggctgtgcaggtgcctgtccaggcagcgggaacggaacagccaggacaaaggcctgagatacgagggtgctggaagtgttccaggacagcacggaggccacagcggccagagaagagagcaggggcccgcgaacagagagaggccaaacggtgcaggcccttttgggttgttgcaagaactttttttttttttttttaactctgagtagaaggggagtcatcgggctgggtgaggtggctcatgcctgtaatctgagcactttgggaggttggggcaggtggatcacgtgaggtcgggagttcaagaccagcctggccaacatggtgaaaccctgcctctactgaaaatacaaaaattagccaggcacggtggtgtgtgcctgttgtcccagctactcaggaggctgaggcaggagaattgcttgaacccgggagttcgagggtgcagtgaactgtgattgcactactgcactccagcctgggtgaaagcaagaccctgtctccaaaaataaaaaataaaaaaatgactttagctgcttcactgggagattgggagtagacgaatagatgggaggggaaccaggctaagcagggaaaacggttagggggctgatgtcatcatgtaggtgacaggtgacattggctcagaccagtgtggtgcagtggaagtggcgagcagtgattggattctggatgttttaaaggttaaggcagcaggatgagctgcctgattggatgtagggtttggagaaacacaggcttccaggaggactgccaagtccttggcttgaacaacgagaaggatgtagtcaccactgaccaaggagggcagacactaacaggagcttgtttgaagagggagaaggtccggtgttgagcttcaggcctgttgaatttgcgatacctgtcaggcatccaggtggagcagccaggtcgttggagttg

SEQ ID NO: 29943 - DNA, 737 bp, Artificial sequence
  DNA replication origin
ccgccacggcaaacctggggcggaggctcgtcagggagtttggggaggggggccaagcagagccccacgagagtcccgctcccacatctgggtggagtcctcttgtgggagtcgaatacacccttgaggatggggactgggggtccctcacaggtgtgggccatgggagatccgtcatagctgagaatgggcgtcaccgccagcgggaggactgagaggctctcacaggtgggaggctggaggtcacttaggtggaggctggagtcactcacgggtagggctggggggggtctttgcaggtggggttcagaggtcactaagattggggggccactcccagttggggaataagtcatgggtgtgagtcggggtagggactgagtcccacccacatggagctgagttgcgacattcatctctggtcactggggggcaagagactgtgggattcctcacagatgtggcgcgggacgccaggatcatttcagagtaaggtaagggttgggcggggtcacctcagatggagacagaggggtcgctcccggaggggctggggtcactcacaggtgagggggcacttcatagaagctgacgccacggtaacgctccatatgctgccggctgtagatctgcaggtcccggtagggattgacagagaccaggacggggccaatgtaggtctgggatcgggggaagagggtccaaagtttatcccgggccaggtgcgatggctcatg

SEQ ID NO: 29944 - DNA, 1197 bp, Artificial sequence
  DNA replication origin
gggagttcaagaccaacctgaccaacatggagaaatccgtctctactaaaaatacaaaattagccgggcgtggtggcgggtgcctgtaatcccagctactcgggaggctgaggcaggagaatcgcttgaacccggggggaggaggttacagtgagctgagatcgcgccactgcactccagcctgggcaacaagagtgaaactgtctcaaaaaaaaaaaaaaagtttatcccggtgacccttggtgtctctttcccctccgcttgcctgtgtctgtgaccccagcacccctgccatctccccacaagggcctcacgtagatgagattctcccgaaatcgccgccgcaggttctcgatgaaggcggcctcgctggtgaagttctccagcagcacgaaatcctgcacccccacccggtcacgggcggtgagcgcactctccatggtcacccgaaccccgtcactgcccagggcctgcagagaatgggccacagaagagggtcagagtcatcgggggcggggcaaggccacttccctgcgcctgtgggactgagagggaacgtaggggcttgtggactccgggctagacacgggacatgagcatgacgggtgcggggggcctgggtgctgagggcctgggtgtggtgggccgggtgcggaaagccgggtgtggagggcccgggtcccagtgtggcagcagagggatcaccgaggctgcgggcacagaacagagacaacatgaaccacttgggactcggacacagggcatggacgcaggcaggaccagagggcagaacccgggaggtgctggttttgggtggagaaagggggggtcacaagaaggaactccttgaaatagcagaaagactgctctgttgagcttggaccaatcccctcctctctctggttccttcctcctaaaggaggaggagttgagttagaccaggtgacctcaggtccctcagctctgagccacgtgtgacaggtgctttggaggacaaatggctcagggtcaattctgcaggcagggtggggccgtctctcccacccagacccacccccacctccaccggtagagcgtcgagcaccaagcaagaggttactcccagactacaccagaggggttcccccagagggcctcccaccccagctgggctcagccacccactccagaacgcgggggaggccctccctcgcatgg

SEQ ID NO: 29945 - DNA, 1256 bp, Artificial sequence
  DNA replication origin
agagagggggtttcgccatgctggtcaggctggtctcgaactcctgaactctgatgatccgcccgcctcggcctccgaaagcgctgggattacaggcgtgagccaccgcgcccggccctccctctagattttaaacctgggggcaccgcagcgggcgtctcctcccgccctcccccgcctctgtccgagacgccgccattccccctcccccgctcccactcccccaccagctggtgcccccgctcgggggtccccagggccgccgctccggccgggttgttgcagtgacgagccttccccgcaaggatccggcccgcacctgccgcagcctcgccctctccccagggagcggggtccgcgagctgggggtggggcgctggggctttgggttcccgctctgcctaaccccaccagggcgagtctgtgtacgccgttgtgttggtggaggaggcaggtgcctgcagacgcgcctgaggctctccccaccggatcggaagcgtggcccacggcctggctctcagtaggcctctgcccgcaagcaagtgagaaatgagcgtccggccgagggaaggcggcgggtgggggcagcgaggtctatagggggtctggaggtgccttcacgctctatctcaggccacccaacggcccttctaggcctgtgttagcctcatgttagggatgaagaacagaagccgaaacgttaagtgacttgctcagagtcccaccgcgaggaagaaccagcccagccttttgcagactctagacgtccccgcccctgcccgcggtgggatctgagccaaggttcgccccaggcgagggagggtggtgcccgcagagccaagcgagggaggttctgccgaggccgcttcggaggtggggggcgtcccggagatccggagggactagggaggcccccttcaaagcagggagggagatgggccgggcgcgatggctcacgcctggaatcccagcactttgggaggccgaggcgggtggatcacctgaggtcaggagttccagaccagcttggccaacatggtaaaaccccgtctctactaaaaatacaaaaattagccgagtgtggtggcgcacgcctgtaatcccagctactcgggaggctgagacaggaaaatcgctagaacccgggaggcagaggttgcagtgagccgagatcgcgccactgaactccaacctgggagccagcgcaagaccccgtctcaaaaaaaaaacagaaaaaaaaaggagggagggaggag

SEQ ID NO: 29946 - DNA, 918 bp, Artificial sequence
  DNA replication origin
cctagaagggccgttgggtggcctgagatagagcgtgaaggcacctccagaccccctatagacctcgctgcccccacccgccgccttccctcggccggacgctcatttctcacttgcttgcgggcagaggcctactgagagccaggccgtgggccacgcttccgatccggtggggagagcctcaggcgcgtctgcaggcacctgcctcctccaccaacacaacggcgtacacagactcgccctggtggggttaggcagagcgggaacccaaagccccagcgccccacccccagctcgcggaccccgctccctggggagagggcgaggctgcggcaggtgcgggccggatccttgcggggaaggctcgtcactgcaacaacccggccggagcggcggccctggggacccccgagcgggggcaccagctggtgggggagtgggagcgggggagggggaatggcggcgtctcggacagaggcgggggagggcgggaggagacgcccgctgcggtgcccccaggtttaaaatctagagggagggccgggcgcggtggctcacgcctgtaatcccagcgctttcggaggccgaggcgggcggatcatcagagttcaggagttcgagaccagcctgaccagcatggcgaaaccccctctctgctagaaaatacaaaaattagctgagcgtggtggtgggcgcctgtgtaatcccagctgctcgggaggctgaggcacgagaatcgcttgaacccgggagacggaggttgcagtgagccgagattgtgccactgcactccagcctgggcgacagagcgaagctccgtctccaaacaaaacagaacaaggaaaatctagagggagcaaggaggcgacccagcctccagcccgcccaggggtggggaacgtcctagaagacggggta

SEQ ID NO: 29947 - DNA, 1737 bp, Artificial sequence
  DNA replication origin
ccgtctccaaacaaaacagaacaaggaaaatctagagggagcaaggaggcgacccagcctccagcccgcccaggggtggggaacgtcctagaagacggggtagagggtcaagagagcccctcccggaagctcagctctctccctgccccgcgaggcgtgggggactcgggccgggggcgtggcaggagccagcgggggcgcggccagaggacggggcggagcttcgcggccgcagtgtccgccccgcccctccacgtcacgcggttggaatgaggggaatccgcgcgcggaggggtcgggcccgcttcttccagttcccgggccgcgccgccgcattcccgggatgcccgctggcgcccccgcagccaccgcccggcggcggaaggagggggcgtctccgccgctcgcgggccccagggcggctccagcactggcaacccccggcctgcccctcctcactggacggaagcgcgagccccgggcggggagggaagcggggaacctgggtgggaaagacgccgcggctgaggctgcagcgccaggcgcctcctgcgttctccgcgctttcttgggttactcctttcagtgacgccagccaagccgtgaggtccgtatcatcactccaatgcagaagaacttgaggctgggcaggtgacttgtgcaaggtctcaggaggagtgggactggaacccgggcactggaacaccttactgcagggctgccctgagcctctttgtgcggttatcagggctaccagggctgtgaccttcagtgacaccgttcaggcccctgtcggtgtcgtgtgattctattatgtcacatgtgggctttaggagtgggccagggcctttggctctgggcctagaggttccctgcaggccatggcccctgagtgacataggagacttcttccccaaggctgcctctgggtcttctcccacctggggaggcatttactggaaccacaggggatggggtggcccagcagacctgggctatctagtgcccttcagctcctataggccaggtgcctacaagcctgacttctgcggacagcggaaagctcaaatgttcccccagcctaagggcacacagatcttgccatggggtaggggtgttgggggctgggaggaggtgtcatctgaggcacccgggactgctgctataaaccgatgtccactgagcccaaggcagcagaaaggcagccacagcttgtctcacgggtggcacagagcagggcttcaacttctgtttattaaacaaatcttagatctgggcctggctgcccaccaaggaccgttccagacctcagggaattgttgtgaagggaaatggggaggagatagtggcgacttagggtctctaccctgattgctcacagggccttggtcaaggactgtccattctagctacacaaccatggatctttggctgccagacacctctgcctggggggtccagcaaacgtgaacagaggcaaggtgcagtgagtggctcacacctgtaaccccagaactttgagaggccgaggtgggaggatcgcttgaggccaggagttcaagaccagcctgggccacatagtggtgagacccctgcctccactaaaatttttttaaaaagttagccaggcatggtgtgtgcctgtggtcccagctacttggaaggctaaggtgggaggattgcttgagcccaagaggttgaggctgcagtgagctgtgatggtgctactgcactcca

SEQ ID NO: 29948 - DNA, 809 bp, Artificial sequence
  DNA replication origin
aactggggacagcaggggggtctcgggagttcataggcagggtcctggtaagcagcagtgagtgtgaatcatgggcctggcatatggagggtgtcctaaaccttcactctatgaacatgaggtgttgatttgatttgtgttgccccagaggaaatggattggtaggaggaaggcaaggaggccagttaggctgctgtcttggcccaggtaaggagcagtgatggaggtgaggtttttgtttgtttttgttgttgttttgttttgttttgagatggagtctcgctctgttgcccaggatggaatgcagtggtgcgacctctgctcactgcaacctccacctgccgggttcaagctattctcctgcctcagcctcctgagtagctgggattacaggtgtgtgccaccgcgcccagctaatttttttttttttttagtagagacggggtttcaccgtgttagccaggatggtctcaatctcctgaccttgtgatccacctgcctaggcctaccaaagtgctgggattacaggcctgagccaccgcgcccggcctggaggtgaggttttagcaggtcgtgactacttggtgtgaggagtggaggcaggagagcaggcctgttaatgccaggctgtgatgaccagctcaaacagtgccacccttctctctacaaggacattaaacagggagtacaggttaggggtcaaaggccctctttttttttttttttttttgagacagtgtctctgtcactcagtctggagtgcagtggcatgatctcagctctctgcaacctcttcctccaggattcaa

SEQ ID NO: 29949 - DNA, 1217 bp, Artificial sequence
  DNA replication origin
gtgggtactcggggcgcggggacggcggccgcggggggcgggtgtggggagcgggcggccgggccgggagccgccgtgcacgaggcaggggtcacggccggggatcgctggggccgaagaacggccgcgtggacccgtgcggggggggggggtcccacgacccggaggcgccggcgcagcctggtggagacttagatttacctgcggggagcgggaggcggggaagagcggcctgggctgcaggacccaggaccctgcgcgcccttcgggccccgcccgcagccctgctccgcctctgggttccggagaagccgcctaaacccgccccttcccgttctccgcccctggggcccagcgcgccccgagtgtgacgggcggggggctccggggtggccggagaaggaggatggccacgcggccctcagtcctcacgctccggcctcccgcgcacacgcctggctctgagattcattcattcatccaggggtccgggaaggggtgactgagccccaccgtgtgcctcgctgcgtgtagggagtgggagccgtctcctgggagggactgacaaggaaacagctgattcctgcggggtgcgataaggaggcgctgcgtgtttgggagaatcaggaaggggttctggaggaggtgacacctgagccgagtctcagtgaggtgggcagggagagtgccccgggctggggaagccgcaggtgcaggcactgaagcttggactggctggcgacggtgcgaaggccccctcctggggggaggggtggggggagaggggactggagcgggccatctggcacatcggaatgcaggagcagtggggtaaactggggacagcaggggggtctcgggagttcataggcagggtcctggtaagcagcagtgagtgtgaatcatgggcctggcatatggagggtgtcctaaaccttcactctatgaacatgaggtgttgatttgatttgtgttgccccagaggaaatggattggtaggaggaaggcaaggaggccagttaggctgctgtcttggcccaggtaaggagcagtgatggaggtgaggtttttgtttgtttttgttgttgttttgttttgttttgagatggagtctcgctctgttgcccaggatggaatgcagtggtgcgacctctgctcactgcaacctccacctgccgggttcaagctattctcctgcctcagcctcctgagtagct

SEQ ID NO: 29950 - DNA, 982 bp, Artificial sequence
  DNA replication origin
aggtggtaccagagagtgggcaggaggaggggcccagccatagagctgccgtggggatggggggaaggggaaaggcgtcctagcctttgacctggagcccagggtcccccatgggtggctgcatcggctcctctggttacctgggacaacaggcatttcctccatccccagcccctcctcttcctgctccaaccatccgggccaagaggcctcccagtcagacctggacggctccagccgtgtcctgaggagctggaccagccacatcccctggggctgcagttgaagcagaaccaagtggccatcccggcgttagaccgtaggttcctggtcccggagtggtcggagcccgccagtgggcaggcagctcttgctcacaggccgcggtgcccaggccgctggctctccgcagggcggaatggcgctgcaagtggagctggtacccaccggggagatcatccgcgtggttcatccccacaggccctgcaagcttgtaagctgggatgctctgggctgggaggagggtgggagcgtctccccaaggccgggcagcccctctcaggcgagccctcgggcaagagctgagcagcggggaggggttccgatccttggcggggccagaacagactgaacaagacggggtgagtggaagagtaaggatgcaagggccactagcagcaggatttttggaagtggaggtctgggcttgactcttccccggcttcccgaacctcagtgggcagaaccgtgaatactgggcacaaaaggcaagtgccggctgctgtgaggtcgaaggaccagggcatggaagctccaggctcagtcaacgccccgctcctctccagtccgcagggctgggaccgcccaagactcagaacagaaggacggtgtgggaggtgggtgaagggtcacgggtgggtagaaacgggggagcgcggccctggcccggcccgcaggaaggggctggagatgcaaagggccc

SEQ ID NO: 29951 - DNA, 1145 bp, Artificial sequence
  DNA replication origin
cacacacccagcctcctgtgtgggaggggtgagcccagcagtgattgagaggcggaaaggggaatggggggtgctctccgtcctctgggccccagtcaggatatggccgttctgggtccaccccgacccactgggtggaaacaggaaataagtgagacctggtgtgcactgggtctacgcctggctccacggctgataagggccattgtgtggccgccggggatgagcctgctctggatagatgtgcttcccggaggaaggaaggaaggcttgctagcttttccggggcgggggaagctgtggggagagagaagggtgccggggggaaggcccctgcctatggggctgtcggtgccagcacacacccacgggactcagcccttcctatgccagcctctccctctggaaaggtctgtttcccctatccacttccctgttcttacttcctataaggaatggctggagactggagggctcagtctcaggccaggaaagtgtcagctgtgatttagcaacaataaaaatagaaaagcaggaacatcaggggtgggggtcacctgggggtactgttgaaacgcaagggatgaacagggctagaggttgcccacacccagggaacccaggaactaacctcacaagctctgaggctcagaggagggtaagccaagagcttcctcacagcgggacagccccctgtccgggccctgcatgaccaggccccagcagccctggtctctcaaactcatggtgggggctcacctgctgtggggggcagccccgttgaggggatgtgcaggaaagccagtgcctactaacgggtcctcttggcctaggggagggcatgccgtctggtttggggagtgggccccgtgctctctaggtggtaccagagagtgggcaggaggaggggcccagccatagagctgccgtggggatggggggaaggggaaaggcgtcctagcctttgacctggagcccagggtcccccatgggtggctgcatcggctcctctggttacctgggacaacaggcatttcctccatccccagcccctcctcttcctgctccaaccatccgggccaagaggcctcccagtcagacctggacggctccagccgtgtcctgaggagctggaccagccacat

SEQ ID NO: 29952 - DNA, 1282 bp, Artificial sequence
  DNA replication origin
caaggggagacagcagatgggcaccagggaagggtcagggagagggtgggagccagaacactgacgacactggctgggggatccgtgatggagcagaggatgctggcttgggttagcgtggggcagagggcggggaacagtctgcagacccaggctcactcgtggcggtcagctggggcagagggcggggaacagtctgcagacccaggctcactcgtgggggtcagcgtggggcagagggcggggaacggtctgcagacccaggctcactcgtggcggtcagcgtggggcagagggcggggaacggtctgcagacccaggctcactcgtgggggtcagcgtggggcagagggcggggaacagtctgcagacccaggctcactcgtggcggtcagcgtggggcagagggcggggaacagtctgcagacccaggctcactcgtgggggtcagcgtggggcagagggcggggagcggtctgcagacccaggctcactcgtgggggttagtgggggttagcgtggggcagagggcggggaacggtctgccagacccaggctcactcgtggtccaggatgtttgggatgtctcgcccctcacaattctgcatctccaggatccggtcaaagtgctccagccgctggtaattgttggaaatgtggggaggcaggtggcagttgatgatgctgacatagtagccataaagcttcaggcagatgttgactccacctttgttcccctggtagaacaggtcaacagaagagtgggaagctactcgggttggacacacccctctttccacatcctggacctgagggcagacagtctcacttcctgcagggtctcctagggacagtaactaagcttcccagggtgatctctccatgcacagagcccagctcgcctcgcctggcctcagggatagcaagcccactctgaggcaaaagaacaaacatgcattgggctggacagaggaccaagattcctttcacttcctttttcttttgcccagctccacagttcccagcccttcccagctcacgactcagacaatagctcagtccttacccagtacccaaacaggccagtgggggtggatttagtagacagaatctggatatagggcaaatgctgatacttggcaaagaccagtaagaggatcccctgcatacggacatgggagacctgcaggagagagagggcaaaggtcgctcattaaaccacacaggccaagtgcatcccttccaagctccgtgctagggactctagagagccctcagctac

SEQ ID NO: 29953 - DNA, 1390 bp, Artificial sequence
  DNA replication origin
gcgcggggcacgctgggagctgcggacggcgggcgcgggctgggccgggtctagtggcggccgcacacctcgcgtcgtctggggcagtgttgcgcgtgcgctgatgacaggcccgacacgcccctcttacgtccgcgaacccgtcttcgctcagcctctcgcagctttgcgctcgtgggagagtcccgcctccttctgcgaaccgcaccacccagatcccggggtgcgcggagggcgcgtctctgacggaagccggggcggacggtcggagtccggaagaaaaacagtccgcgacagctaggcgcgtgagaccggccgcccgcagggctgctctggccgggacccgctggccgggagacgcgaacctgccggaccaccgcgcggggacgacggcggccatgagctcgcggaagctgagcgggccgaaaggcaggaggctcaggtgagggcaccctggcggcagaggcaggcctgctcggggggatcggcgccccttgggctgcgggctgggggtggacaaggcaccagacctccatgactgcctttggttcagaggcgctctcgccttctcccacgcctgtgtcaggtgggctgtgttgggcccgagcctcgcgccccctctaagccgaggccgccaagctcgttcccactggggcgcagcaggtgtcccggttgctttctggagaggacagccgtgtggggttgtttgaggttaaagacataacgaggccgtcacccttcggctctcggttagaaatctttttcctacttttcatcagcacatacatcaggaggtctgcctgatcccatggtgaaccccgggaatccgaaatcagattgagataagatcctttagggaagtgacttagcctggtctcttgcctgctctttcacggggaacaacgctaatcgcccacttagtctaagtcacgatgcttggatttgctgctaatcgtcggatttgagagtgggaacaagaaatccggacttttgctctccatcctcttagagtgagtctgggaaaagaagtctctgagtaaaaggtctttgttccttaagcctctgtcggacagcagggggagatcgtaaacaaatgaagctcaaaatctcaggccgagtgcctgggaaggtggtttctgtatagtgttgtttatgctaacagggagggacaggaagttgctttaaactggccaagaatttcttgaagtgcttttgagaacgtcgacctctaaggacggggtctgttggaggagagatgttttggcattaactgcccttttctcccatccccctgtaccctctgccattccagatctccagctgctgcaggtactcctcatcgtgtgcctaggactcatgctaggctgttcctggtctctgcagggtctgt

SEQ ID NO: 29954 - DNA, 1790 bp, Artificial sequence
  DNA replication origin
gcgacggcgcggcgagggacgcagggcccggatggacggaggggcagcagggacggagggtgcctgaggcgggcccagcggggatggaggggatccggggcgggcggcacgtgaggcggggcccacggggcacggaggggcggccggggcgtggaggggcggccggggcgtggaggggcagccggggcgttcggcatctgagccggggcccacggggcatggacgggcagccggggcatggaggggcccacgggcacggagggacaacccgggcggacggctcctcaggcgccccgggggcctcggaggcccaagtggacccgaggagaggccggggacagcgagggcgaggccaggcccgagacggggtcagggcagggagagctggcccgggactgggggaggccgaggggacgccgagcgctgggagtgctgtggggtcgctctgcgcgggccgagggcgcgggctcagccgggactgcaggcggcgctgagaggccccgcggcggccgaggaagaggcgcaccggggcaggcagggcctcccggcggtggggaaaggtggagggccgaacagttcacacggagagccgggtggatgggtcagaggctccgcgatggagttgggatggggatggggaggagtggccgccttaggcatcgggtgaggggtggtggtaagtggacacaggaggaggactaggaagtcagggcctggctggggagacaggtgaagggtctgaggacatgcagagggggctgagatgcgggccggagtaaccgtggtgcccaagcagctggtgcggaagaggaggcttttggaacaagcttgggatgactgcttgggacgtggggagacttgggcgaggaggccagaaaatgttgggtagggtccgaagtggagaaggccgggaagttaccggggtcgaggctggtccggaaagagagtatgttgggatgagtatacctgccgttggagatgggggagaccagggcagggccagcttgtttctaggggattctcagtcttggtgcaaagagatggggaaattctttgaggaattgaggggtccatggagccgtgaactgaggagagatggtggaaggggtggggagctcttgagtagtgaagaggggtgcgtgggaaactggtgacttctggaaggagttgcaggatgacgggtttgctcctgaaatccaggggactgggggacaggtggagatgtttggtgtgctaaatctttcaagtacaagatgagccatcgttgaagctcagggttccaagtaagcatcacaggacatttttctccccaaagaggagagataggatgggtgtgtgtgtgtgtgtgcgtgtgcgtgtgtgcacagaatttacagtgaaactgctttcctggagggagggccagaagccccaggagtgggagatggtcaaacagagagcaacttgtgaggcagccaggcaggtgtgcagagagctcttgccactttgtcagcgatcgcactttgaccatccccaccaggctggctccttggaggtgcttaggacatttaggacatagagtggagtttgggtaacagagggagctgagacccacatgtcatcccagctaaacacctcatctgaagagcattattttgaggcctcatcccctctgtttcttgacatccagtctgatgttaattcagccagggctcggagcttttcctggtgaggaggaagaactttacgatgccaacaggagaacgtggtgcactttagattttaatcttcagtgtccagactgacaggct

SEQ ID NO: 29955 - DNA, 1710 bp, Artificial sequence
  DNA replication origin
cgcagcgccgcgcgggggcggggcgtctctgcggcaaccagagcgtcacacgccgcggtgcgcgctgacgtcacgcggggccgagccttcccaggcccgccctcccgtccttaagtgggccgcggcggcgctgtcggttccgaggtggggccccgcggctggggccagacccggcagaaggcggagcagactagggtgtccgtcaccgtcctcggtgtgaaccgccacggatgcacgcgggtgctggctggggggcctccccggttgagggaattgagacccaggaaaaggttgtttcaaaaaatattaatagccgcgcgcggtggcccacgcctgtaatccttgcaccttgggaggccgaggcgggcggatcacctgaggtcaggagttcgagaccagcctggccaacatgatgaaaccccgtctctactaaaaatacaaaaattagctgggcgtggaggcacgcacctgtaatcccagctacacgggaggctgaggcgggagaatcgcttgtaccgggaggcagagtttgcagtgagccgagatcgcgatcgcgccattgcactccagcctgggggacaagagtgaaacttcgtctcaaaaaaaaaaaaaagaaaagaaaagggctgtgaggccgggcgcggtggctcctggcagtaatcccaggcacatcatgcctgtaatgcagcactcaggcgggcgcatcacctgaggtcaggagttccagaccagatggcgaaaccccatctctactaaaagtacaaaaattagccgggcgtggtggtggacgtggtggtggtagtcccagctgctcgggaggatgaggcaggagaatcgcttgaaccctggaggcggaggttgcagtgagccgagatcgcaccattgcactccagctggggcgacagagcgagactctgcatcaaaaaaaaaaaaaaaaaaaagaatgaaaagggctgtgagaaatgagacacaggcttagcggcattacacggaggggcacctaattgagcgtcagggatgtagtcagggaaggcttcctggaggaagagattctcagatctgcagagggcttcggagaagagcatagcaggcagagtgaatgcaaaggctggaggcaagagggagagcatggtgcatttggagaactgacaagtgagtggaacagaacatttcagggctgagcagctcaataggggagggttcctggtgaacgatgataaggtatttggagtccaccctaagggcggtgggagggcatgtaagggctctgagcagtgacatgagcgggtgtcctgggcgaaggctcactctagtggttgggtggacagaggggatggaatgccagagcgtaggcagggagaccggcgaggaggctgctgcagatgtccaggtgcaggtggactaggacagtgggagggaagaaaaggaagggatggattcaggagcaactcagaaggtaaactccgtgagacttgttgactcattggctgagaggaggagagaaaagcagcgaggtctctggcctgggagccggggtggacggtactgtcttctctgagaacacaggcaagacaggctggcatgggggcaggtaatgactccagtgctggactcacactcagcgcaggacgctagaggggcatccaggggagatgggagtgggctgcctaagacagggacttgggaagggagggtggagcagctggccgt

SEQ ID NO: 29956 - DNA, 931 bp, Artificial sequence
  DNA replication origin
cttccccagtgcctctgagagctcacatggcagaggccaaagaaatgctcaaggaagccaggcatggtggctcacgcctgtaatcccagcactttgggaggccaaagtgggcggatcatgaggtcaggagttccaggccagcctgaccaacatggtgaaaccccatctctactaaaaatacaaaaattagccgggcatggtggcgggcacctgtaatcctagctccttgggaggctgaggcaggagaatcacttgaacctgggaggtggaggttgcagtgagccgagatcgtgctgctgcactccaacctgggcgacagagcaagaccctgttcccccccaaaaaaaggaggaggaagaactttcgggatgctccccagtccaggggcatgagaatctctgcaagtccataggatggctggccccagagtcccagctcccaccacttcaatgcccaggtggccagcccacaccgtgtccccctctcctcgccaacagcattcccacacacaccaccgaggaaaggggcttttacttagtgtgagggtcagaggtgggagaagcccctacggggccctggcagacccacagggtctggggaacttgggctgatggactgtgaggtgtttgcttcgtcctgaccctgtgtgacttccacaggctcaaaatcctgcctaggagggaaacagctgaaacacttggccaagagcagtgctttggctggcggggagtaacggtacaataacagcaggctgggggttggggagcaggggagcagcgggagaccaggatgacggaggagacgggggcaagactcacaactggaaacagactcacccaccgcccttcccctgccccagccccgaaatgcaaaggcacctgcggcagatcctgcagccacatgcgtgattcccgtcccctgaggccccgcg

SEQ ID NO: 29957 - DNA, 858 bp, Artificial sequence
  DNA replication origin
gctcccgcgcccgcactgtcccagggccttggccctgcaggcactcctgtccggtggtcatgctctatggccagaatgccaggggaggggccgcctgcagctgctgttttcccctctgggaaggtcacacagtccggcctgtttatgctgcagccagggggctgaaagagagagagtcacgggcttccctgtgtgactgaggctgcgtggaggcagtgagtgaacagcccgggctggcaggacaggttgacccgcacggaggcagaggcggcgagggggctgtgggaagcacctgagggcgggaagaggggcttgcactcccacctgtgagtgtggtggtgagtcaggaaacagctccggcttcctgcttggcagcaaagctggtccttcccctcctggggtccttcccctccgccagccctcgaggcccgcgctagggcgctctgctcagcgctcagccctcactccggcaccgcggcttcgaacagccattatgcgcagctgagaccggtggaggcagggaagctggggacggagtgagcgagagggggaatgtggggagtgacccagatgtcaggatgacctacgggagtccacaggcaaatgcaagcccatccgatgctgtggcgctggaccatggggaggtcagccgaaggcaacagcaggaggtgagggcagggggcagatgggtctaaaaggagcttcagaaggaatgtaagccatctctagttggggactgggcattgtggtatccccctgtagtctcagctgctcaggaggctgaggtgggcagatgagttgagcccaggagttctgcacaatagcgtgctgtgttgatgagatgtctacactaagttc

SEQ ID NO: 29958 - DNA, 1695 bp, Artificial sequence
  DNA replication origin
tctgcccctgcccacctcacgctgcgttccatgctggccccaggcgatgtcagtcctgctgcaggccaggactagttccacggccctgagcatgcgttagccccttcttgcctccatgcctcagtttacctcggagtgagctgcgggagacgtctccctgcctggccggggcggctctgtcgtagcggagggcagcggtacgagccggccgcgggctcggggtgtcccaggtccgggcagggctggggttcgcttcctctgctgcgcgcaccggccgccgcggccggggaggggtggcaatcccgagccctgcggcagcggtcggggctgctgggggcggccgcaggggctgggcaagggccggccgctgacgccgagttctgtgcgcaggtggtgcagagccggagccggagccggagccgcgccgcgccgcaccatggcgcccaccctggccactgcccatcggcgccgctggtggatggcctgcacggccgtgctggagaacctcctcttctcggcagtcctcctgggctggggctcgctgctcatcatgctcaagtcagagggcttttactcctacctgtgtaccgagccaggtgagacaagcgcctggggttgcggggggctcctggagctggggctttgggagggggcgggatgggggcgaagacctagcgagccacagcaccgcattgcccagtgcctctagggtatcagaaggcccatctgatcctcacccagccctgccgggtacttgtcattgcccctgttttgtggacgaagacatcgaggctcagagcgatctgtcttgcgcaaggccgcagagcctgggcctgccatccacccagaaccccacctgctgtccagggtgttccttccacccgctacgaacagtgctggactgctctcctctcctcccagccctggaacatagcttggctggtagtaaacatgttgctgtctgcttgtgagaaagaggaactccagattaaggggctggggtgcagcaggagaggaagtggccttgcctccaccccagggagggctcatctagaatctagacgttcctcaggccattgtggagtctcctaagtgcttgctggacacaatttcttgtctatttttgctgccttatgattctccaaaggacatttcccccacgggctctgaggacatctccgtggctttccaaccccatggggatgaaggggaagagaagaaaggaacgtttatggaaatgatgctagggttgttctctcctctttgccttgtcactggaattgctgaaggcaggctgaggatgcttctctacatgacatctgcaccacccaacacacacttaccttcacaccttcataccctgttggagggtcctgatgactacagggcagtaaattcagccccacaggagggccacagcagcccccagcctctagcctcctaccctccttcttaggcaaccttgacaggaaattttccctctgccttctccttgatcccaacggtagctgcataatagctgagctcacataatccctgtcgccagtgctagagtgcccttagatggaggtagcccaggtttgacttcctgaatccccagcagcaggccttttctttctagagctctttgcaggaagagaaagctttggaccagctcatgctgggtgtaatcctttgtggaagcctccctgtttc

SEQ ID NO: 29959 - DNA, 993 bp, Artificial sequence
  DNA replication origin
ggacagaccagccccaaatccccttgcagatttccaagggccaacttccagggaccgggcagacgccaccggggagaggggaaggggtcggtgcatcagcggggggcgccacggctggaccgggtccgggatcccaggccccgaatacgccgggacgggaaccaccggggcgggggagcgaggaaccaggacccaaagcccgaggcggcggggacggcggcgctgcgtggggaggaggcggggtggggattcgagagtggaaccaccgtgcggagccggcgcatctgggcgtggtgacccgcgcgcagggggcagctggggacggcggggcggccgcgggagagcccggctgggggcgctggtggcccggcggcttctggggggagtccgctgggggccgggacgcggagccggagccccagcctcgcagggtcaggccgctggagaggccgcggggcgatgtcgccggggattcccggccgcgctgtgactcgggttgaaggctgcaaagccgaggcccggcccgcagcgcccaggcccctcccgtcccccatctctcttgtttgtctccgagtccggccggaaccggcttctgctcgcggcggggcgggcggggggctggctgctgattggtcgacgcctgtttccagccccgctcagccaatcagcgggcggcagtgttttcttcttggggtcggaataaaagggctggaataaaagagggcagaaaaggcgccgggcgggcccgacacacgccggaggagccgggtgagctgcagcagggaggggatcgcggccggggcgagggcgcgggggcagaagcggccgccgaaggggcgtagggagaaaacgtgggaacgaggagagagatggagcgatgaggggccgccagggaagagatgacgaacagatgcgggctggggaatggaggcgcgggggtccgaggccatggaaacgggcgagttgccgggggaacgcccgagatgggggtcg

SEQ ID NO: 29960 - DNA, 951 bp, Artificial sequence
  DNA replication origin
gttctgggggatatttgaggcatgtttgagccctgcagcgccgtcaggctgctcaaagaggagggaagggtgaagaaagagatttttcagatggcagttgaaaccttgggagtgggaagggttccacagggtgaggaaccgggtaggctaccagctggagccgccccccagcaggctgacagctccaagcgttgtctgggggaggttgccctcgccaggtggcccgggcggattctagacagtagggggcacactcggactggggcaggtggagcaagaggcgtttggggctcccacagccctggggtggtggtggggttttatttttggtttttattttggtagagatggttctcgccatgctgcccaggctggtctcaaactcctgtccccaagtggccctccgaccttagcctcccaaaccgctgggattccagacgtggacaccgcgcggcagccctggggtgctaagccagccccccggagcgagccagggtgaccaaggcgattctggggcagtcagagggtcttcccgggtcgggttagtgcctcgaatccgggggacgaagacggggagctgagctttcggagcccgggcttatcagacggggacccggagccccctcgaaccctccctagcttgtaccagctggcggacgtggcccgtagcatcgccctgcagaggggaccttccctgaaagggacggggaacggggtgaaggtggccagcgcgggcagggagcacccagatgacgatcaagggtggagggtccccggaggaccgagcagtgcgtgaacacgggcggagaaaggtcagtctgatggggggagctcaggagaccccatcctaggacgggacagaccagccccaaatccccttgcagatttccaagggccaacttccagggaccgggcagacgccaccggggagaggggaaggggtcggtgcat

SEQ ID NO: 29961 - DNA, 1094 bp, Artificial sequence
  DNA replication origin
cgccctctgccggctgggccactgatgactccttctcatccgatcctgagtctggagaggcagatgaggttcctgcctactgtgtgccaccccaagaaggtagccccccaacagcccacatagcccctgagcagccctgcccaccacgaccccctctttagtcctccagcaaagttatttatttttatttttttttgagactgggtcttgctctgtcgccaggctggagtgcagtggtgcgatctcagctcactgcaacctctgcctcccgggttcaagtgattcccctgcctcagcctcccaaatagctgggattacaggcgtgcaccaccacacacggctaatttttatattttagtagagaccgggtttcaccgtgttagccaggatcgtgatccacccgcctcagcctcccagagtgctgggattacaggcatgagccactgcgcctggccagcaaacagttattaagggcccattttgtgttagtcactgttcttggctccgggcatgcaagagataacaagacagattcctatcctcaccaggcttagagtcagatgggcagtcatcagacaatgacaggacacagtgatatgtgtttccatgggggacatacaagtagggactcatttgctagccatgttggggtgactggggtcagggacgatgtgtgtggcatcccagtcgagtctagcagaatcagtaggagttggccaagtgaaagtcagggagaggagggaatggtgtttcaggaagatggaacagcatacacaaaggcccagaggtgagagggatgtggctgtgtgccatcgaaagagttttagcttggtaagagtgtgacagtatttcaaagtagggagaggtggtgagaaaagagtatagagaccaggtgtggtgactcacacctgtgatcccagcactttgggaggctgaggcgggaggactgcttgaggccaggggtttgataccagcctggccaacatagtgagaccccatctctacaattaaaaaaaaaaaaagtgtagaagtaacagtgtctacctgaattggtccttctgccactctcctcatccttgccctcttccttgccc

SEQ ID NO: 29962 - DNA, 1158 bp, Artificial sequence
  DNA replication origin
ctggcagtcgggacactgccctcatcgcgggcagccttgtgcctctgctgctgctcttcctgggccttgcctgctgtgcctgctgctgctgggccccccgatcagacctcaaggacaggtgaacgccagcccgtcccttccccacacagctcaggccacagggtgggagcaggggggcatctggtttccttgtggggtggggagggctggccttgttgcccacgtgggtcagaggtgatgggggtggggagggctggccttgtcgcccccgtgggtcagaggtgatgggggtggggagggctggccttgtcgcccacgtaggtcagaggtgatggaggtagttggcagtgcccgtggcctggagacactggagacaccgggtcagctgcctgccctcctcggaagccttcaatgaggaagtttctgagttgcatgggcaccaggctggcgaaccggagcctgcagcgggaggcagaaagctgacaccggcggggaccagaggaggagggctgggaccacggaaggagcagcccggctctgggccaggagggaaagagaccaggcctcagatggcccacgaaggaaagagacatcaatgtctgtgcagtggtttagcagagagtgtagctgcctgagagacggagaggggaggaagggttgggctggtggggcccgcgcagggggcttacgcagagctttgttcctttatgaaacctcgtcacattccaggctcctttgagactcacagcagcgtggaggtttggaacagggagtgtggggccgggaggataaatgtcctcaattcccagaggacattgaggcccaaggtgatctagttggtactggcacacaggaagcccctctccacctttttggactctttgtctggtgctctcttactagttcctgccctagtccaatagcacatcctcctctgtgcttgtgcggcattcacagaggagcagatacagttgcccctggcccagggcatagagcccagggtgggaagaagcccctcgcagggacacgaggacaggtgcaaaggctgttggaggaacagtgaagagcagagcagtctcctccacatgtgggggtagagcagagtgggaacaagggaaggcttcctggagggggtgtcatttgagacaggtgcgccgg

SEQ ID NO: 29963 - DNA, 1134 bp, Artificial sequence
  DNA replication origin
cgggctggtggggtcccgaatgccagcagcagtgcgagtgtgtgcggggccgctgcagcgccgcctccggcgagtgcacctgcccgcccggcttccgcggagcgcgctgcgagctgccctgcccggcaggcagccacggggtgcagtgcgcacacaggtgagcgggcggggcggggacaggtgggctggcggggcgggggcggacacaagtgagcaggcggggcggggcggagacaggggggcggggcggagacagggggcggggcgaagacaggtgggcggggcggacaccggtgggcggggcggacaccggtgggcggggcgggcaccggtgggcggggcggacaccggtgggcggggagggggcggggtggaaactggtgagcgggcagggtgggggcggggcgggcacaggtgagcggtcgggggagggggcggaggcggacacaggtgagcgaggctgcgcggagacctgtgagcgggcggggcggagcggagacaggtggccgcggcggggcgccgggaggaggggtcagggcttcgcggtgctcctctcaaaaaacatacaaagcagaggaacgagaaaggggaaaagtcggataggtggggtggctcacacctgtaatcccagcactttgggaggctgaggcgggtgcatcacctgaggtcaggagttcgagaccatcctggccaacatgctgaaacctcgtctctactaaaaacacaaaaattagccgggctgcgcctgtagtcccaggtattcggtaggctgagacaggagaatcgcttgagccctggaggcggaggttgcagtgagccgaggtcgcaccactgcactccagcctgggccagagagcaagactccgtctcaaacaaaacaaaacaaaaacttttaaaaacgctttgttgccccaggtccagcctcacctgctcatttcattgattactgctgtgcaaaatatactagcactgctagcaagccatatgtaggtaataagtggatcgagtccaacaatgatagactgggttaagaaaatgtggcacatatacaccatggaatactatgcagccataaaaaatgatgagttcatgtcctttgtagggacatggaagaaattggaaatcatcattctc

SEQ ID NO: 29964 - DNA, 1375 bp, Artificial sequence
  DNA replication origin
gaagggtcagggaaggagaggggaggggctggggaccctagctgtaaagatccattaggcctccccagggggctaaggcagcctcccccactgcagccagagacagtgatccaccttcctcagggccaggctgcaccccccaccatgtccggctgacccctttttgccccacagcccctctgctgagctgcagtgctgcgcaggctggaggcagaaggatcaagaatgcaccatccgtgagtagccaggacagaccctcagccaaggagaagggaggccgtagcccagtgacaacccttccttcctaccccatggggcctgcccctcctgataccaggagtcagggtttctcctgtgacgcacccccaggcctgaaggggcacctcttgaggaggcatggcccctggagccagtgagagggcaggggtgtcccctggtcctgctcccgtctttccaacctgggtggggtgtctttcagccatctgtgaggggccggacgcctgccagaaagacgaggtgtgtgtgaagccgggcctctgtcgatgcaagcctggattctttggggcccactgcagctcccgtgagtctcaagggccagatgaagttgctgggcagagctgggtacgggggcagtggtgtgggagcaggcgaggcaggtagccatgcagcctcaggacagcagggccagaatcccccccagcttcactgaggaattgcggtccagagacaggaagtgacacacactcccgggagatgacctgagtcaccgggtttttacccacatccacaaagcactgcccacctgagcatcttcctcttccacttctcagaaaacctgtgattccccttcattgtaaaatgagtgtattacttgcctttcccacatataccttatacatgggcagtggatggaagggggcccctggctgggctctctgccctctctggcagaaagagagggaagggaaaggggttgggaagcaggagagccagagggtgggcatcaggaatcaaggaatcactaggggaaaggtggcttctcccgacaccctggcgggcagtatccaggcctgagatcaggagaaagccagctctcctccagcccagcagagatccatctcggcagggaggagcaggcatggaggaaggcccaccaacctcggtgccacgctctgggcaagtcccctgcccactcaggatctctgagtgtgttctggaatgtgaagtggcaggctgagcctcccactaatggctaagggttttctgtaggtcagagcggagcaggaagtgagtgttgcccaggacaggctgccggatgttctgagggtctgtccccggctcttggaggatgggcccagcgccccttttccttgag

SEQ ID NO: 29965 - DNA, 1016 bp, Artificial sequence
  DNA replication origin
tacacagaaactgttcctcgcctgtctgtccatgtctgtgccacctcccaaccctgccaggagcagaggcaggctgaggggtcctcgctggtctccttgctcagtcactgggtggggtggcttcttgcagctcaggccttgctttgggagtgtggcctgatggaaagccgtggctcccagcctcagtccacccccttccctggccccggcacccagggacctgcaacttcattcttctggcccttccaggcccaggccagtcagccctgccattgcctttctttccctttctttttttgagtgtcagtctttccagccaccccctccctctcagggaggtgcctcgtggcagcccgcccctccggcctggtttcctcaggaaaagccctgagaggaagcagggagggggttgggagctgtgggggccagacgaacccgagcgctcccaccgagctgcctgccatggggctggggctgctgctcccgctgctgctgctctggactcgggggactcaggggtccgagctggaccccaaagggcagcacgtctgtgtggccagcaggtgggtctcgtgggagtctgatgcgtgtggccagcaggtgggtctcgtgggagtctgatgcgggtggctgaaccggtgttgaggccgttaggggaaggaggagactaggaagggggcttaggctgaaaggaagggactgctgatggcggtctggcaggtagtggccagccagggcagatggtggaagggtcagggaaggagaggggaggggctggggaccctagctgtaaagatccattaggcctccccagggggctaaggcagcctcccccactgcagccagagacagtgatccaccttcctcagggccaggctgcaccccccaccatgtccggctgacccctttttgccccacagcccctctgctgagctgcagtgctgcgcaggctggaggcagaaggatcaagaatgcaccatccgtgagtagccaggacagaccctcagccaaggaga

SEQ ID NO: 29966 - DNA, 958 bp, Artificial sequence
  DNA replication origin
gggagccacggctttccatcaggccacactcccaaagcaaggcctgagctgcaagaagccaccccacccagtgactgagcaaggagaccagcgaggacccctcagcctgcctctgctcctggcagggttgggaggtggcacagacatggacagacaggcgaggaacagtttctgtgtattacgggcagttctttattacatgagctcaggccgtctgcacaaagccctgggagctaggcagtcagctctcatttcatggatggggaaactgagactcagagaggcactcttatatctggccccagaggctcggtacagagacgtagagagggaggcgggctgagaccccgtcctgccctgatgcaggccaggattggggcagacccctggcgagggctgtgaaggcgggagccctgtcctcatttgaggccacacatccttccacagccagacccctaagtcaggcctctggggcggctgaggcccccagacaaaggtgttcgtggagggcagaacagggcggatcaggagctggagactgtggttgggcctcctcttctccccctagcttgctgggtgcagggctgctggtctcatcctcagaggattcagctttaccccgataccataggccaaagctggagagagacagccagaggcactttgagccaggaagccagagaggtcaaggatatgggtgagggcaggggatggtgagaaaaggggagagggggaagaaagggcagcctgagggagtgtgaaggtgatgggggccagggccagagaagcaggaggggacggtgtgcttagagccaagcacagcagggtgacgggcagagaagcgggaaaggggatcctgagaaggaccagccagggcccttcctccctccccacactcttgcctttcccctttccccaacatacaaactctgtattttggactccgggggtgggggat

SEQ ID NO: 29967 - DNA, 1657 bp, Artificial sequence
  DNA replication origin
gcgccagcagcctggcgaagccgcgactccgcaggctaaagagcgagcgcgggggcaggccgggcggcccgggcaccagcacggacaggagcccgaatgggcgaccgccggcgcaggcgccccagggaaccctgaggacccggtgagtgccgtatgagggcaaggacccagcccaggacgcagcgtccagccctcggtgggcactcaagcaaggtttgcatgctgcacagcaggtcggccaggaagcggggaggtggcagacagatctgcgcccccggccggcctcggcccccgctctcagctggagcactgctctgttatctgttagggcacccttgtcccccaagtctcccggcccgtcacttcctctagcattcccatgatggccctggggcgggggaacgccagccgaggcgaccctctgactgtgcctgtccttccaaaggcggaggccgcgcagcagctcgggcgcccctcggaggcagggcagtgccgcttcagtcgggaggagtttgagcagatccttcaggagcggaatgaactcaaagccaaagtgttcctgctcaaggaggaactggcctacttccagcggtgaggacgctgggaagccggggggcctccgatcaccccacctcattctccagtcattgacatgtccacagtgacatgtgccaggcctgcgctgggaactgggaggacatgaattgtacagcccttgccctcctgcaatgtcatccagacaggggagagggacagtacaaagggttgcagctgcagcagccagggaatctctcctaggagggggccacggggccacctaatttaaggtctgagggtgtcagcaaggcagagcgcttcccgtgttcagggaagagctgcgtgcacaggtaccaggagtgaggactgcggctggcatctccactgctggcatccccatggctggcatcaccagggctttctccctccctgccccttttctttagggagctgctcacagaccaccgggtccccggccttctgctcgaggccatgaaggtggctgtccggaagcagcggaagaagatcaaggccaagatgttagggacaccagaggaagcagagagcaggtaggtccctgcctgcattcccacggagccaggcctccctccctcattctgctgagcctgatgacccagcctggtcaccctctgagcccattgtctcagactgaggctgtcaccccaacccggtcaccccttgagcctccctagcctggccgcttctagggcctgctgacctgctctggctgtgtcccatggccgctgtccagcctgcgcccttctccctggatctcaccactccccttgccttgcctgccatccattctgcctgacaacactgcctctccacattcattcttcaagttcctgtcttggctgggtctgtttattcttacgggggtgaaactgtagccgcggctgtgtcagggcctgctgtgtgtcaagctataaaataaacccttggcagggcgcggtggctcacgcctgtaatcccagcactttgagaggctaaggtgggtagatcacctgaggtcaggagttcgagaccagcgtggccaacatggtgaaactccgtctctactaaaaatacaaaaattagccgggcatggtggcatgtg

SEQ ID NO: 29968 - DNA, 2250 bp, Artificial sequence
  DNA replication origin
taaaatagcaccaagtgctggttttccagatgttttcagcttgtgaaaatacactgagctgcatgtgtgctcatttgcttgtgaatactatgcttaataatcagctggggagcttgtgagcagtgcagattcctggaccccactcaggagattctgatgtggtaagtccgcgatgaggtccatgtctaacattttgaacaagcaccccagctgattctgatacagggggttctgatcacgttttaagaaactctgtcctcgttcttgggggaaggaaggaaacagagggctggcagctccaactctgacctggtactaagaagagttttggttcctgacccctttgtctccagattgcaggatacctatatggggtgagcccaccagataacccccaggtgaaggagatccgctgcattgtgatggtgccgcagtggggcactcaccagaccgtgcacctgcctggccagctgccccagcatgagtacctcaaggtaatggggagtgatggagcctgggagtgtggaaaagctggtgcgattcctgtctgtggatgggattcagctctgtactcctctttacctataggagatggaacccttaggttggatccacactcagcccaatgagtccccgcagttatcaccccaggatgtcaccacccatgccaagatcatggctgacaacccatcttgggatggcgagaagaccattatcatcacatgcaggtgggcctgggctccttgggaggaagtatggtggggcagggattgcaggccagggcccagaacagtggcctgagctgttactctgtcctcgttcctcccccagcttcacgccaggctcctgtacactgacggcctacaagctgacccccagtggctacgaatggggccgccagaacacagacaagggcaacaaccccaagggctacctgccttcacactatgagagggtgcagatgctgctgtcggaccgtttccttggcttcttcatggtccctgcccagtcctcgtggaactacaacttcatgggtaagtgggaggagcctggggatgtggggatagcagtagggataaggtgaggccatcgccctttgcacttggggcctggctggcttggaggtggcgcaggctgcatgaggcaggagccctgttaacattggctgtttccttctccccgaaggtgttcggcatgaccccaacatgaaatatgagctacagctggcgaaccccaaagagttctaccacgaggtgcacaggccctctcacttcctcaactttgctctcctgcaggagggggaggtttactctgcggatcgggaggacctgtatgcctgaccgtttccctgcctcctgcttcagcctcccgaggccgaagcctcagcccctccagacaggccgctgacattcagcagtttggcctctttccctctgtctgtgcttgtgttgttgacctcctgatggcttgtcatcctgaataaaatataataataaattttgtataaataggagttcaggggctggtttgttttttttttcccccccaaactcaaattctggatttaggtctaacaggaggctggactggagcggttcacagcaagatgctgggctcggctgtgaaggggggagtatgaggcccccttcctattcagggctttggggtagatagcccctggactcagtggagacctgaggcagggctgggctttcacactccgctgccttgaccacatttgctgctttttccacaaaactacttggaagctctcgcctcctttccacagttttgggagcagttgccctttcccgggtctaggaactctgtggcttgtgctgagcggctgcggtgtccagcccagccctttaagctttctgtgtcagtcctggtcaggaaaacaagcacacaggcaggcagtttgtgtacagccgggcggaggccagagaccggctgcctacctgtcacctctcgcctggagcgggccactgccaagttggccccatgactccaaacgggcggagcctggattgggcctgtggggagggctccactcaagtgaccacttgcagccctgaacctcagctcttggacgcctggctggaagttggctgtcttgtttcctgtgaccttgggggtggaaaggacagagcccaggcgacctagggcactatctccctaccccacgccttctcccttcctcgttcctccctacccttatcgcttctaccccgcccacaccgccctaaa

SEQ ID NO: 29969 - DNA, 969 bp, Artificial sequence
  DNA replication origin
ggcgcctctgcccggccgcccctactgggaagtgaggagcccctctgcccggccagccgccccatccgggagggaggtgggggggtcagcccctcgcctggccagccgccccgtccgggagggagatgggtgggggggtcagccccccgcccggccagccgccccgtccgggaggtgaggggcgcctctgcccggccgcccctactgggaagcgaggagcccctctgcccggccagccgccccgtccgggatggaggtgggggggtcagccccccgcccggccagccgccccatccgggaggtgaggggcgcctctgcccggccgcccctactgggaagcgaggagcctctctgcccggccagccgccccatctgggagagaggtgggggggtcagccccccgcccggccagcccccccatccgggaagtgaggggcgcctctgcccggccgcccctactgggaagtgaggagcccctctgcccggccaccaccccgtctgggaggtgtgcccaacagctcattgagaacgggccaggatgacaatggcggctttgtggaatagaaaggcaggaaaggtggggaaaagattgagaaatcggatggttgccctgtctgtgtagaaggaggtagacatgggagacttttcattttgttctgtactaagaaaaattcttctgccttgggatcctgttgatctgtgaccttacctccaaccctgtgctctctgaaacgtgtgctgtgtccactcagggttgaatggattaagggcggtgcaagatgtgctttgttaaacagatgcttgaaggcagcatgctcgttaagagtcatcaccactccctaatctcaggtacccagggacacagacgctgcggaaggccgcagggtcctctgcctaggaaaaccagagacctttgttcacttgtttatctgctgaccttccctccactgttgtcctatgaccctgcca

SEQ ID NO: 29970 - DNA, 1241 bp, Artificial sequence
  DNA replication origin
gaggcgcccctcacctcccggacggggcggctggccgggcggggggctgacccccccacccatctccctcccggacggggcggctggccaggcgaggggctgacccccccacctccctcccggatggggcggctggccgggcagaggggctcctcacttcccagtaggggcggccgggcagaggcgcccctcacctcctggacggggcagctggccgggcgggggactgacccccccacctccctcctggatggggcggctggccgggcggggggctgatgccccgacctccctcccggacggggcggctggcctggcggggggctgacccccctacctccctcccggatgggcggctggccgggcagggggctgacccccccacctccctcccggatggggcggctggtggggcggggggctgacccccccacctccctcccggatggggcggctgccgggcggagacgctcctcacttcccagagggggcggctgccgggcggaggggctcctcacttcccagacggggcggctgccaggcggaggggctcctcacttctcagacggggcggccgggcagaggtgctcctcacatcccagacggggtcgcggccgggcagaggcgctcctcacatcccagatgtgatggcggccgggcagaggtgctcctcacttcctaggtgggatggcggccgggcggagacactcctcactttccagactgggcagccaggcagaggggctcctcacatcccagatgatgggcggccaggcagagatgctcctcacttcccagacggggtggcggccgggcagaggctgcaatctcggcactttgggaggccaaggcaggcggctgggaggtggaggttgtagcgggccgagatcacgctactgcactccagcctgggcaccattgagcactgagtgaaggagactccatctgcaatcccggcacctcaggaggccgaggctggtggatcacgtgcggttaggggctggagaccggcctggccaacacagcgaaaccccgtctccaccaaaaccagtcaggcgtggcggcgcgagtctgcaatcgcaggcactcggcaggctgagtcaggagagtcaggcagggaggttgcagtgagccgagatggcagcagtacagtccagcttcggctcagcatgagagggagactgtggaaagagagggagagggagaccgtggaaagagagggagagggagaccgtggggag

SEQ ID NO: 29971 - DNA, 1625 bp, Artificial sequence
  DNA replication origin
catcatgtcccaataacccaggcctgaagaaagaggcttccacgcagtctgtggggctccccaaacacctgacctttatgcttttacctttatcctggggccctgagcagccttgaaacaacccttccatagatggaaccaggcttggcccagggaggggctgtctcaccccctaatacccccttaacctcccattcctgggcttgcttgctttttttttttttttttttttttttcgagacagactctcactctgccaccaggctggagtgcagtggtgtgatcttggctcactgcaacctctgcctcctgggttcaagcaattctcctgcctcagcttccagagtagctgggactaccggtgcgcgccaccacacccaggtaatttttgtatttttagtagagacggggtttcactgttagtcaggatggtctcgatctcctgacctcgtgatccacccgcctcggcctcccagtgtgctgggattataggcataagccaccgtgcctggcctagggctttcatgccccatacccacaccctataccaggacacccccttctcagaaaagctccatattccacatttctgtgatcagctggacacctgtgggggcacccaaactccttaggctcacatggtgggtgccctggcatggtgggtgcccttgtatggtgagtgccctggcatggtaggtgccctggcctggtgggtatctggactccccagctgtggccagcagccacctcctccccctaactcagcctaagactgggagccaagcaccagctgggggcagagactgtgggaaattataggacagcaaaatgaagagagggccgggggcggtggctcatgcttgtaatcccagcactttggaaggctgaagtgggcggatcacctgaggtcagaagttcgagaccagcctggccaacatggagaaaccccgtctttactaaaaatacaaaaaattacttgggcgtggtggcgggtgcctgtaatcccagctacgtgggaggctgaggcaggagaattgcttgaacccaggaggcgaaggttgcagtgaacagaggccgaaccactggaccccagcctgggtgacagagtgagactccgtctcaaaaaaaaaaaaaaaaaaaaaaaaaaagaatgaggagagactgggaacctcgggctggacagggctcccctcctcccttcctgtctggcttctgccctcagagtctcaccaccaaatgatgacagagaagatcccaggtcttgcccaaggtctggttccacagcaggtcagctccgtctgccaggaagtaacctgtgggcatgggggtaggggttaggctgctccagagcccgggcagcttagagaggatttccagcccccccgccccgcccctctcccagttcttagttttcccttggtaaagccttcaggaacgtttaacccccatgggggcggggaatggacctggaaggacagcagaacctgccccccgccccatccccaccaccggcccagccttccctgcagactcacccacagacacagccaccagcaccagagcccagcgcgggtggccatggatggggtcggcggccatctgagggtacagtgacaggctggggg

SEQ ID NO: 29972 - DNA, 1416 bp, Artificial sequence
  DNA replication origin
caatggtttggttgggaatttattccttttctgctgtaacgaaagtttgcaataggggattgcttaagtaaattattgtatctccatccagatggtggagtaccgcgcagacattaaaagtcatgtaaaagaacatctgactgaaagaaaaatgctccttgaatattaaaaggttgtaaaaatagtgcatgttatgtgatttcaattttgttttttaaaatatgggtgtatgcttgtatacgtagagcagataaaaaagacggaaggcatactaaaaaatgttgagtggttatctttgtatggtggaacaaagtcactgtaattttcatctttggtttttctgtaatttccaaattttccacattttgtatttcatataatataatttaagagatcagtgttattatttaaacctttggagaggtgggggtagaagaatgaagggaagacctcagctttttggtgagaaggtttggttggggcacctcttggtttatgaacttaattctttgaagtagctggaatcctccctctcagcctgcaggaaacagctctgacttgctgactgtctgccagctgaagaggtggagtggagtaaggtggaaggaaagcagtgcaacctggggctcttcaggtggtgaggggctgggggaggctcttcctcttaaggctggagggttctggaatcctaaccgccctgctactaagagcaggacaggtctgtttttctcttctgactctgtcccagccttgaagggaccctgtgttacctttccttgccctcggattgaagatattctacccacccaacgggtaccaagcccttggggaaggaagtgcttttcaagactgggggccagcgattcccttttgcgtcctcttcctaatgaggctcctccgtagggccgaaaacaatgctgggggtcggggcggggcccagtgggtcgcttctccaacatggggtctcctgggggttgtgggggagggggagcagaactgctggaattacaggtttgccgggatatggtaaaggcgtggaaacctcaggaggccgaaggggtggctccaagaaagtggggcaccccgtccccaccacggacgcggggagggaagtgggggcggcggccaggctcgggcaggtacgagtgggctgcgctagcctctgccttgcagggtgtggcggtgggtggtgatgacgctcagcaggtgaaagtcgcgggagccgggaagaggtcaaggttcgtgggtggggcccgggagtgtcagttgaggttagactggagacccaggtctgcaactccagcgcttcaggacgcttggagctggggaggacccctattggcgaacatcccggaggccccccgagctccagggcatggtctactgcccggagcccccgaaccgctcccccggctg

SEQ ID NO: 29973 - DNA, 939 bp, Artificial sequence
  DNA replication origin
tctgtcaccttccagatgatggggaaagcagctcctcctcctcctcgaagccaggggcagagggcaacagttcttcaactggcagctttagctgggtcaggacataaagcttgccactgaagaactactgcggctcagccaggtgagggcgtgagaggaacaggctcctaagggaaagggagggaaaatgggaaagatctgagcagggcatgttgctgcaacgctgacccactcgctggccatcagggtcctgccccagtagacctctgagattctaatgcagggctgcagctctgatctgggcccgcggaagctgttaacctcgctgagcagcaagaggtggctgtaaacagacttcccttgctcttctttccagaactggagtctagagaaacccagtcctgctctcaccctcccctgccctagcggcccctgggggcccagcctcctcagcattcagacagggtggggcccgggaccctggacacaccccaccagcacgcaggtactagaagtgtggtacctcaggtccagaaatgtgagttcagtgatcagcccaactgacttgttcccagggagttcagctggaaggagagttctgggggcctggattggggaagagtgaggaagggaggaggcctagcgtttgaaagaaggtcagcagaggcccccggggctgtgaggggcggacaggggaccacaggctggagaggagggaggtatcggcagggtggccggggctgtgaggggcgggcaggggaccacaggctggaggggagggaggtatgggcagggtggctgggcagcttccccaggactctcagatgccaggcattccgcttgcgcattccgggtacatctggtatgaattccaggctgtctgccggcccctccatgtctgaactttgttccaagttccaagccccgcccccacagttc

SEQ ID NO: 29974 - DNA, 1323 bp, Artificial sequence
  DNA replication origin
gccgccggccgtggggagcggacgcagtgatttgctccccctcgtgcagcaacccccacacccagcaccaggtgggtgtgagctggcgacccggtcacgcagcggggagccgcggtaacgggatggagggtgaaagtggggtccgggcggccacacccagcccttccgggaggagaaggggcggcgggggcaggggcgcctcggggagaggggcctggactggccgggttagtgtgtcaggagctacgaggaaagagtctgggacgggagtcgtggcggaagggctggcggagtggcggggggcggggggagagccgaggggccggagggccgggggcggctcacccggcggcccccggtctgaggatacaggggccggccatctagcctggggagggtctggaccccccgagcgggcggcgaggaggtgctttgcctctgccggcgttcactgggtcagggccagttcagcgccctggcagggaaggggtcgctgggcgggccggcccctcctctcgttctctccaggggatgttatgtaaggggggaggggagaggagtagggggcggcggtgccggggccttatgcaacccaaaggttagggtttcaccgtggttgggcggggggaagagggcaagaggagggcctggaaactctaacccccgctccccagactaactggccgtcttgggccgagagaaggtcacctctgcacctccccccagcctgtccgattgtgaggcccctagcccaggcctggccctgactgcctgggaagccggctggctgggtggggcgcctgggttagtcatcactgggctgcctctctccccacctctcggccaactcttggcccctccccatggcctccggcgaggctgtcacccccacctccctccggccctggttccagcctccaactcctttggcctgtcatcctggctgtcagattgggctaggagctgtcagagtgccagagggttgatggagcagctggtcagagggtcagtgccctgggcccaccccgccctgcagccaagggcacctgcttggcacagactctcagcagctgctgagtcctctgggttgaacagagctatctcagacagaggaaggtcggacggagttggactggtcacccaggggaaggaagatacacaaagttcatgcctcccaagagggtttcggaatttgaaccgcaccccgtatcccccaatctttcttaccctctgagtatagaaattccaaggcaagaccgccttggcccctcagcctggcgtgggccatgcccttggactgagtgtcagcacggacccgccctc

SEQ ID NO: 29975 - DNA, 1811 bp, Artificial sequence
  DNA replication origin
gccacgactcccgtcccagactctttcctcgtagctcctgacacactaacccggccagtccaggcccctctccccgaggcgcccctgcccccgccgccccttctcctcccggaagggctgggtgtggccgcccggaccccactttcaccctccatcccgttaccgcggctccccgctgcgtgaccgggtcgccagctcacacccacctggtgctgggtgtgggggttgctgcacgagggggagcaaatcactgcgtccgctccccacggccggcggcgctgtctcttctcggcacccagcacacaccggctccaggctccgatcagctggcggcgtcgtgacgcacgagctgcgaatgcacggcccggggccaatcaccgcccactgctgggcaacgtggccccgcccacccgggggccgacggggcctcgccctggtcccgcctctccgggcgccctggctctgattggcaaggaggccacccttttgccgggcggaattgcacgaagccacgcccacccactgaggagccggccaatagacggacaggtgtggcccagccctccgcgtcagcgacccgcttagaaaagcgctacgtcaaacgagagtcctaaagagcaggcgaaagccacggcgtctgcgtttgcaatgcatgctggtccgtgtagttctcagcctgacaccgtcgttcccagaacccagcgcgctctgtgagttggcatttttaaactgagctcggaatccagcccggggaagtccttaaagggcgacagcccctccttgttggagtcgtgagtgcttcttttagacattccccaaactgactcgccggcctctgcgggacgctatagctctttaaggaaaggtggagcggaccaaggagcaggagtgggcagagcgtcagcccccagggcagcagagactgccgttggagagctctccagggtttttggaggagggagggtgctcgcctcgcccagcccactcctcctgggggctcttcctaaccacaggaggctttttttcttggatgtctcttcccagtcccagaagagcccccagagcctcccaagaggtagctttctaacaaaagattcatagcacagtcctcaccttagggtagagggagggcttctggtcagaaattaggggatgggccatgccaaagtgcaaagggtcagcaatcgcatcctctgattaacccccattcagtcccgccctccaaagctcttcactgactcaggcctacttagggaagagattcgaaggtggagaccaatgagcaggctgctccttccccaggggccaatcagagtctagatgagcgggggatgggcaaaaagtgaaatgaacccagtgacttggcaaaagctgctggtcggcgtttttaaaggggcaagccggagacctgccctaccttatcaatccccgcaagtcccccaaagaggaacatgtggactgaaatccatgccttttccttcagctccaaataggggctgagggtaactaagcaggaatgatgaggctggagggtgagatccttccttctgttaaatacgcactccatcaggtaattgataaggttcacttggagctccaaaattctgagcctgcgttcaggacattgcgcctttaaggaaacttcctgccttgcgccccagtaacagctgattgttggaaagtgtgacctctggggacgaatcagctgttaccacatcctcctccttgcttaccctcctccatccccttatccactcccatgggtggtgaaggaaagaacgtgggggatgtgattgtatgatctttctttt

SEQ ID NO: 29976 - DNA, 1321 bp, Artificial sequence
  DNA replication origin
cctccaggccgcccgggggcagcgcggggctgagcccagccacggccctgctggcgacggcttccggggtgccaggccggcggggctgggatgggcgcgggacaggggctggggcggaggcggccgcaggaagccggcggcggcgaagaggcggacggggggcgcgcttacccctccgcgggtcctgcgctccgggcgcggcggggcagaggctgccgggcgcgagcaccgggctccaccgtgacgggtcagctgacgcgggtcacgtgatcgccccagcacggaaacaagcgcacgtggctccagaggcccgggcgggaccccgcttcctgcccggcggcctccccgccctccctcccgctgctccgctctggctcggtctgggctccgcttcctcccggggctgaaagggtctccagccagctccagccgggcccggcggagggcgatgcctaccgccccacccctccctactccctccagcacgcaccagcgcgcgggtcccggaggctgttcccagagatgccagcctcttagttaagtgcggaccgcacaaccaggggcagaactgggacttctgttgtgtctatttttgagacggagtcttgctctgtcgcccaggctggagtgcagtggcgcgatctcggctcaccgcaacctctgcctcccgggttcaagcgattctcttgcctcggcctcccgagtagctgggacgtcaggagcgcgccaccacgcccggctaatttttgtattttttagtagagatggggtttcgccttgttggccaggctgatctcgaactcctggcctcgtgatccacccgtctcggcctcccaaggtgctgggatgacaggcgtgagccaccgcgcccggccagaactgggacttttgacatggaatccccccggcgcctccatgccaccttccataggaaggagctttttaactttcctaagtacttcaacagtcacattccatttggccctcgcaacacactctgtgaggtagggaggacagttattactgtttatattttacaagtgataaccaacaaccgccagagaggcttgtccgcctggcggaatggagacttagaaactggtgccagccttctttctgcccaggagcactgcctcctgacagccctctcacggctttttaaaaaacaaaactggccgggtgcagtggctcacgcctgtaatcccagcactttgggaggctgaggcagctggatcacgaggtcaggagatcgagaccatcctggctaacacggtgaaaccccgtctctactaaaaacacaaaaaattacctggccgtggtg

SEQ ID NO: 29977 - DNA, 2051 bp, Artificial sequence
  DNA replication origin
ggcactgcagtggcacagccggctggacccggggctgctcaggcacctccaacaggccccctaggcctttggccaagaagttgcccgttttctccagctcctccagggcctgcatgggattgaagccctcgggaagaagaatcctcccctcctcaccctccccagggtctgccccagcagctttattcctgcggcctggacgggaggctgaggccactgagaaagagagaagtccaggggacgcttgactggaggagcccagctggtcacctgctttcccagcaagggaaatggaatccagagcttctgtggcctgttccaagtcgtcttctcctgccaccggcctgtctctggtccagctagcctcacagggagtggcctctaaaactggccggcccactccatttggaagctgtcccgggttttccgtgaagtcctcccggcctgtggtctcctggatggtctggaccaacagcttggggatgaggggaggctcgggggcaagggcaggagccccagccaggcgctgggggtgtggctgatcgaagagctgcaccaccccgtagctggccaggtgagtgtgggcgtccaccaggtgcagacacacattcttttccttgacagcctccttaccctggagtttatagccaaacgtgaggtcgatccaatggtgcaggtcccgggatacctcgcggctctccagcagggctcggtgggcagctacgaactcctggctggagctgcaccaggctggcacatccaggtcaggcatgtcggggtggatggagcggaagatagagggatcggtgtagaactccggaatgcactcatccggggtccagttctgcatccgctccatgctggccggatactcatggggctcccactgcgcgcggacgtgtccgcagagcaccgaccgaggcgtgcgccgagccttgtacacatagtacgtgatgtcggagagcacgtctgagatgtggtggggaacatgagggggttccccgccgcccgccccgcctgctacgaatgcctgccgtgtcatctcatacgtgaagtccagttgcttatcccccttgttgaggcggaacttggacttgcgcaggtctcggaagcgcccatggggcgtagtgaagtccaccacccagggcagcacggggtggtagttggggtccccctgccgccgacctgccaaccgattcagctgcatgaggtagtggaagttgctgatgcggccgtggacccaatctagcacgaggctccgaagttcctcctggccagtgggttgcccaggttgccctccctgctcctcttgagacacaatgcccgcctcatcccttgccacaggggcctcctcattctcgtcctcctcgggcctctcataagcactcaggtccagtcgcagctcgctgcaaagcttctcatccactgcgatgtgatacaaagacagggccccacacgccagcccctggcggtgacaggcgtccatagccctcagcacgcggaagagaatgaacagcaccttggcctggctgttggtcagcttggcagggctgaaggtgaccacgtcatgtagggagaactgtacgtaagggtgtaccacatacagcatctccggcgactccagcaaggcctcagcccgtaaaagactagggcaagcagggctgccccgaggggggcaggggccttctctggcatatgaagggcattgggtagtttcacccactggcaggaaggagcaaccatagaccctctgcagagcctgccgtactgagtccaaggcagggacagctgagggggcagggctgtgactgtacggctggccgtaagtgtggtatgcatggcgccacaggttgcgataattctgggcggcaacctcctgcatgaagcgagtgagggtctcagggccgcaggacccgtcctcaaagggcaggcccccgcccagagggtaggacagtctccgcttccgcagcccatgcacctccacgcgcgtccagccggcaggcagcctttgcacagagcgctgcaggagagtcctgacttccgcttctccc

SEQ ID NO: 29978 - DNA, 1577 bp, Artificial sequence
  DNA replication origin
ctcggcgcacgcctcggtcggtgctctgcggacacgtccgcgcgcagtgggagccccatgagtatccggccagcatggagcggatgcagaactggaccccggatgagtgcattccggagttctacaccgatccctctatcttccgctccatccaccccgacatgcctgacctggatgtgccagcctggtgcagctccagccaggagttcgtagctgcccaccgagccctgctggagagccgcgaggtatcccgggacctgcaccattggatcgacctcacgtttggctataaactccagggtaaggaggctgtcaaggaaaagaatgtgtgtctgcacctggtggacgcccacactcacctggccagctacggggtggtgcagctcttcgatcagccacacccccagcgcctggctggggctcctgcccttgcccccgagcctcccctcatccccaagctgttggtccagaccatccaggagaccacaggccgggaggacttcacggaaaacccgggacagcttccaaatggagtgggccggccagttttagaggccactccctgtgaggctagctggaccagagacaggccggtggcaggagaagacgacttggaacaggccacagaagctctggattccatttcccttgctgggaaagcaggtgaccagctgggctcctccagtcaagcgtcccctggacttctctctttctcagtggcctcagcctcccgtccaggccgcaggaataaagctgctggggcagaccctggggagggtgaggaggggaggattcttcttcccgagggcttcaatcccatgcaggccctggaggagctggagaaaacgggcaacttcttggccaaaggcctagggggcctgttggaggtgcctgagcagccccgggtccagccggctgtgccactgcagtgcctactccacagggacatgcaggcgctgggtgtcctattggcagagatggtgtttgccaccagggtgcggacgctgcagcccgatgcacctttgtgggtacgcttccaggctgtccgagggctctgcacgcgccaccccaaggaggtccctgtgtctttgcagcccgtgctggacacactcctgcagatgagtggccccgaagtccccatgggagcagagaggggcaagctggaccaactgtttgagtacaggcctgtctcccagggcctgcccccaccctgcccaagccagcttctcagccccttcagctccgtggttcccttcccaccctacttcccggcactgcacagattcatcctcctgtaccaggcaaggcgtgtggaggacgaggcccaggggcgcgagctggtgtttgctctgtggcagcagctgggcgcggtgctgaaggacatcacccctgagggcctggagatcctgctgcccttcgtgctctcactcatgtccgaggagcacacagctgtgtacacggcctggtatctgtttgagcctgttgccaaggcactgggccccaaaaatgccaataagtacctcctgaagccgctcattggtgcctacgagagcccctgccagctacacggccgcttc

SEQ ID NO: 29979 - DNA, 976 bp, Artificial sequence
  DNA replication origin
cctgccagctacacggccgcttctacctgtacacggactgctttgtggcccagctgatggtgcggctgggcctgcaggcatttctcactcacctgctgccccatgtcctgcaggtgctggcgggcgcagaggcctcccaggaggagagcaaggacctggcaggggctgctgaggaggaggagagcgggctgcccggggccgggcctggctcctgtgcttttggggaggagattcccatggatggggagcctcctgcctcctcgggcctggggctcccagactacacgtctggcgtcagcttccacgaccaggctgacctccctgagacagaggacttccaagccgggctctatgtgactgagtctccccagccccaggaggctgaggctgtgagcctgggccggctgagtgacaagagcagcaccagcgagacctccctgggtgaggagcgggctccagacgaggggggtgcccccgtggacaagagcagccttcgatcaggtgacagcagccaggacttgaagcaaagcgagggctccgaggaggaagaggaggaggaggacagctgcgtggtgctagaggaggaggagggggagcaggaggaggtcaccggggcatctgagctcactctgtctgacacggtgctgtccatggagacggttgtggccggcggcagtgggggagatggagaagaagaggaggaggcactgcctgagcagtcagaaggcaaagaacagaagatcctccttggtaagttcccaggtctgggaggtgttggtcaaaaacacctcctgctggccgagcacagtggttcacgcctgtattcccagcactttgggaggctgaggcgggcggatcacaaggtcaggagatcgagaccatcctaataacaaggtgaaaccccgtctctactaaaaatacaaaaaaatagccgggcgtgggggcaggcacctgtagtcccagctactcggaaggc

SEQ ID NO: 29980 - DNA, 1259 bp, Artificial sequence
  DNA replication origin
agaagtcctcgctgcttaggggtgccacgcacttgacggcccccgagtggcccgggaagctctgcaggcggatctggtggaagtgaaagtgggcatcctgctggctcacgccgatctcgtactgccagtacgccagccagtttccgctcagcccgtgcacgctccgcggcagctcctgcttcagggcgttgtcgtcgctcccgctgcccaggcccccgccacccacccccgagatggggcccagtggtccggggttctcaggccgagagtcattggggatctgaatgcggttccccaccaggacgctcccaaaggtccctgagtggccgtcatcctgagggcagcccccaccatgggggtcccactcgggcccggtgccgggcatggtgggctccacgctggcagggttgcgactgctggggctgatgctctccaagtacagcgccgccagctccccaaccagctcgtggttggggatgattttccggatgatgtcacctggataggagtgggagaggtcctgagacagggaagatggcaggcggctgctatcacccatccaaggactcgggagccacagaagatggggcaggaactggctctgcaactctgggcaagtaactctgtctctgagcctcagtttcctcctcagtgaaatgtggattcattccgttgtgatgtacacatgagcatcttctatatgtgccgtgccgtgctgggcactaggaatagaatatggaacaagacaggtggtgccctggcctcccaagcttagatttcagtggcaggatgataacaggtgtaaccacaaggctgtctgtcctctccagggagatgacacgctgaaacgatcagcacagcaccgtgcagggcccagaggggaagcttcgtaaacaggaggccactccttccctctcgccagctcctgcggaccgccagtccacctccctgactctcctgccttccccagggacactacaggccagcttctgggcctctcttgctggctactgctcagtccttgtttgtgtgtcaccttgggggtaggggtctgaggccaaatccctttgctctcacccatcctgctggctcttagaacccactgctgactctggggcaagggcagagaatggggcctcccaagggaggagacagccacgaagactgtgatggggaacgtgatggggcagtacccaacaggcaggagaagggcacgtagattgtgtatgccatctccagggtgaacaccttctgcagct

SEQ ID NO: 29981 - DNA, 815 bp, Artificial sequence
  DNA replication origin
tctgttagacttgagtctgaattggctccaccggcttacttgctgagtgaccttgagcaagttcctgctgctggaagcgtctcctttcccatctataaactgagaatcagaaaaactggcgtagaagataacacacagccgggcgcagtggctcacgcctgtaatcccagcactttgggaggctgaggcgggtggatcacgaggtcaggagatcgagatcatcctggctaacatggtgaaaccccgtctctactaaaaatacaaaaattagccgggcgtggtggcgggtgcctgtactcccaactacacaggaggctgaggcaggagaatctctcaaactcaggtggcagaggttgccgtgagccgagatcgcaccactgcactccagcccgggcaacagagcgagactctgtctcaaaaaaaaaaaaaagaagaagataacacatgtagggttttggcttcatgtgtagcagatatttggtcaatggttgcttattttttggcgtcaccatagggagaaatatggttaaaagggggaaagggatggtgtcggggaagacagagggaggtggcattgggtcagcagcactgtgcagagagaggaggttgctttggggatgggagcctggccgggccatggaagcaggaaggtgggagagtcaagaaacatctttaggccgatgcagtggctcacgcctgtaatctcagcactctgggaggccaggagttggagaccagactggctgacatggtgaaaccccatctctactaagaatacaaaaaaaggccggacgcggtggctcacgcctgtaatc

SEQ ID NO: 29982 - DNA, 3983 bp, Artificial sequence
  DNA replication origin
tggcgcctgccaggagtgagtccatgcgttgtctgcccacccctaccacagtgtttgtgccttcagctgagggggcagcctctgggccctgaacccctgctggggctccacgaccctgagagaaggggtgagaagaatcatctctgcacctcgggtctctgccagaggaagacttaagcatccctgcgacctcacattctagacagagatgaggtccaggggttggcccctgctgccttctcacaatttgcaatagatgtaaataggaccaataaatcctttggaagagccatggggtgaactgaggcttgtcttttttttttttttcaatagagatggagtctgactatgttgcccaagctggtctccaactcctgggctcaagcgatcctcctgcctcggcctcccaaagtgttgggattacaggcatgagccaccacgcccagcctgaggcttatcttgctggtggtgtcagggtggggaaagtcgagacccagcagtttccaggacagtgagggtgggaaggggcctgatggagggagtgaggagcaggacagtgagggtaggaggcggcctgatgcagggagtgaggcgcaggacagtgagggtgggaaggagcctgatgcagggagtgaggcgcaggacagtgagggtgggaaggagcctgatgcagggagtgaggcgcaggacagtgagggtgggaaggagcctgatgcagggagtgaggcgcaggacagtgagggtgggaaggagcctgatgcagggagtgaggcgcaggacagtgagggtgggaaggagcctgatgcagggagtgaggcgcaggacagtgagggtgggaaggagcctgatgcagggagtgaggcgcaggacagtgagggtgggaaggagcctgatgcagggagtgaggagccggacagtgagggtgggaggcggcctgatgcagggagtgaggcgcaggacagtgagggtgggaaggagcctgatgcagggagtgaggcgcaggacagtgagggtgggaaggagcctgatgcagggagtgaggagcaggacagtgagggtgggaaggagcctgatgcagggagtgaggagccggacagtgagggtgggaaggagcctgatgcagggagtgaggagcaggacagtgagggtgggaagtggcctgatgcagggagtgaggagcaggtgtgagggcgggaagcggcctgatgcagggagtgaggcgcaggacagtgagggtgggaaggagcctgatgcagggagtgaggcgcaggacagtgagggtgggaaggagcctgatgcagggagtgaggcgcaggacagtgagggtgggaaggagcctgatgcagggagtgaggagcaggacagtgagggtgggaagtggcctgatgcagggagtgaggcgcaggacagtgagggtgggaggcggcctgatgcagggagtgaggcgcaggacagtgagggtgggaaggagcctgatgcagggagtgaggcgcaggacagtgagggtgggaaggggcctgatgcagggagtgaggcgcaggacagtgagggtgggaaggagcctgatgcagggagtgaggagccggacagtgagggtgggaaggagcctgatgcagggagtgaggagcaggacagtgagggtgggaggtggcctgatgcagggagtgaggagccggacagtgagggtgggaaggagcctgatgcagggagtgaggcgcaggacagtgagggtgggaggcggcctgatgcagggagtgaggcgcaggacagtgagggtgggaaggagcctgatgcagggagtgaggagcaggacagtgagggtgggaggcggcctgatgcagggagtgaggcgcaggacagtgagggtgggaaggagcctgatgcagggagtgaggcgcaggacagtgagggtgggaaggagcctgatgcagggagtgaggcacaggacagtgagggtgggaagtggcctgatgcagggagtgaggcgcaggacagtgagggtgggaaggagcctgatgcagggagtgaggagccggacagtgagggtgggaaggagcctgatgcagggagtgaggcgcaggacagtgagggtgggaaggggcctgatgcagggagtgaggcgcaggacagtgagggtgggaaggagcctgatgcagggagtgaggagcaggacagtgagggtgggaggcggcctgatgcagggagtgaggagccggacagtgagggtgggaaggagcctgatgcagggagtgaggagccggacagtgagggtgggaaggagcctgatgcagggagtgaggcgcaggacagtgagggtgggaggcggcctgatgcagggagtgaggcgcaggacagtgagggtgggaaggagcctgatgcagggagtgaggagcaggacagtcagggtgggaggcggcctgatgcagggagtgaggcgcaggacagtgagggtgggaaggagcctgatgcagggagtgaggcgcaggacagtgagggtgggaaggagcctgatgcagggagtgaggcgcaggacagtgagggtgggaagtggcctgatgcagggagtgaggcgcaggacagtgagggtgggaagtggcctgatgcagggagtgaggcgcaggacagtgagggtgggaaggggcctgatgcagggagtgaggcgcaggacagtgagggtgggaaggggcctgatgcagggagtgaggagccggacagtgagggtgggaaggagcctgatgcagggagtgaggcgcaggacagtgagggtgggaaggggcctgatgcagggagtgaggcgcaggacagtgagggtgggaaggggcctgatgcagggagtgaggagccggacactgagggtgggaaggagcctgatgcagggagtgaggcgcaggacagtgagggtgggaaggggcctgatgcagggagtgaggcgcaggacagtgagggtgggaaggggcctgatgcagggagtgaggagccggacagtgagggtgggaaggagcctgatgcagggagtgaggcgcaggacagtgaaggtgggaaggggcctgatgcagggagtgaggcgcaagacagtgagggtgggaaggagcctgatgcagggagtgaggcgcaggacagtgagggtgggaaggagcctgatgcagggagtgaggagcaggacagtgaaggtgggaaggagcctgatgcagggagtgaggagccggacagtgagggtgggaaggagcctgatgcagggagtgaggagctggacagtgaggatgggaaggagcctgatgcagggagtgaggagcaggacagtgagggtgggaagtggcctgatgcagggagtgaggcgcaggacagtgagggtgggaaggagcctgatgcagggagtgaggagcaggacagtgagggtgggaggcggcctgatgcagggagtgaggagccggacagtgagggtgggaggcggcctgatgcagggagtgaggagcaggacagtgagggtgggaagtggcccgatgcagggagtgaggcgcaggacagtgagggtgggaaggagcctgatgcagggagtgaggagccggacagtgagggtgggaaggagcctgatgcagggagtgaggagccggacagtgagggtgggaaggagcctgatgcagggagtgaggagcaggtgtgagggcgggaagcggcctgatgcagggagtgaggagcaggacagtgagggtgggaaggggcctgatacagggagtgaggagcaggacagtgagggtgggaaggagcctgatgcagggagtgaggagccggacagtgagggtgggaagcagcctgatctttgcacgggctgccaggcttctggttcatacagccccaggtcagtttccagaaccctcgctcttgggtaggggaaagagacattgctctggagtggcaggacggtgggagaagttgagtccctctcatttctcctccctcaccccctgccttccatcccagtctga

SEQ ID NO: 29983 - DNA, 1153 bp, Artificial sequence
  DNA replication origin
tgaggtcgggagtttaagaccagcctgactaacacagagaaaccccgtttctactaagaaatacagaattagccaggcgtggtggtgcatgcctgtaatcccagctattcgggaggctgaagcaggagaatcgcttgaacctgggaggtggaggttgcggtgagccgagatcctgccactgcactccagcctggtcaacgagagcgaaactccgtctcaaaaaataaacaacaaaaaatcccaaaaagacggtcttattttggtcctcaccatgcatgtgagaagagtgagggacttgtgccaccgttttacaaggtaaggccaagcctggtggagttacgggaaatgccgaggtcctttggcaagaggtagcctggattcagacacagatctgattcacagcgcagggccttgtagaatgagaacgtttttgatttggtatctccctcctattcaccaaaacaccctcagtgcatgaaatgcatgaaatatgaaacaccagaaactaaaaagggggagaagccagggcggatgtcccagctgcaggagtgggagccgctgctcgtgtgtttggggtctgttctgattctggagcctgcttcttccccttggcaatcatgacccaggacttggcgttatctgtgatcgcgtgggtaggattccctggcgggcgtggggatgtgagatgggaacagagctttctgtccctgccacaggaacatggcgctgctctgggggctcctggtgctcagctggtcctgcctgcaaggcccctgctccgtggtgaggctgggctgaagtcaaggtggggtggggtggagggggaagaagaggggcgttggcatggagggagggcttggctccgaggggacctcctatcctcatccctttctccacagttctcccctgtgagcgccatggagcccttgggccggcaggtactggggagtgaggagcctgtgatggggggaaggtcccgggggtctcactggtggcttgggcagggtggggggcctgtgggaagggtcggtctccatctgcttgctcctttccgcagctaactagcgggccgaaccaggagcaggtgtccccacttaccctcctcaagttgggcaaccaggtacaaccaggtggggctggggaagagtgggcg

SEQ ID NO: 29984 - DNA, 955 bp, Artificial sequence
  DNA replication origin
ctggtcctgcctgcaaggcccctgctccgtggtgaggctgggctgaagtcaaggtggggtggggtggagggggaagaagaggggcgttggcatggagggagggcttggctccgaggggacctcctatcctcatccctttctccacagttctcccctgtgagcgccatggagcccttgggccggcaggtactggggagtgaggagcctgtgatggggggaaggtcccgggggtctcactggtggcttgggcagggtggggggcctgtgggaagggtcggtctccatctgcttgctcctttccgcagctaactagcgggccgaaccaggagcaggtgtccccacttaccctcctcaagttgggcaaccaggtacaaccaggtggggctggggaagagtgggcggggctagagggaggagggcccatcggcaggggtcggggggtgggggcgcgtgctgaggctgaggctctggagtccagaggccagaagggagagagggtggggaggaccgaaggtgggcgccaggccccagaatgccagtgccctccgtctgacgctccctcttccctggggctgggacaaggccctgctgtcctcaggcacaggggctgtgacaaggccttcaacacagaacctggagctgaccccttgacctccctgacccctgatctgtccctgcaggagcctggtggccagactgccctgaagagtcccccaggagtctgcagcagagaccccaccccagagcagacccacaggctggcccgggccatgatggccttcactgccgacctgttctccctggtggctcaaacgtccacctgccccaacctcatcctgtcacccctgagtgtggccctggcgctgtctcacctggcactaggtaccctggcaccacttgtccagaccaagagagctgggaggccagtaggaactcagtactccaatggttctcc

SEQ ID NO: 29985 - DNA, 1135 bp, Artificial sequence
  DNA replication origin
ccttggcaggcagcacgggaaacaggacagggaacccggacccaggttccaggccaggcttgggcctttatttctctagggctggagtttctccagcagcaaaacagagagaaaatgtcttgccttgcctttcaggggatggagtagggacatgaataagatcccaaaagagtaaaaatctgaagcacttttaacaagtccagggcaattctcctgcctcagcttcccaagcagctgggattacaggcatgcaccaccaagcccggctcattttgtatttttagtagagacggggtttctccatgttggtcaggctggtctcgaactcccgacctcaagtgattctcctgcctcggcctcccaaagtgccgggatgacaggtgtgagccaccgcacctggccaggatcttttctcattaccttgtcttcctagtgggggctccactgagcaggtcatgttcccggacatttgttcggatactgaccaggctgtggcagggagtgagggtatggagtgacctctctcctgcccagaaagggcgcagctgggttcccaaggcagatacaggcacatggagggaagcctgggccatatgagtgttatggggtgagtgttggcggaggcccacccttgagggacaagagcagctgggcatcttggcgagagccctggactttcgtgaggtcagagtatgaattctgcgtctccctcttcctagctttgtgaccctagacaacccttacctcagtctttgcttccttgcctatgaaatgggataaaaacacccattctacagggccatgtggccactcatttatttctcatctaccaaacacctactcgacaggggctggcaatgggcggaaataaaaactcagttctgccgggtgcggtggctcacacctgtaatcccagcagtgtgggaggcggagcaggatgatcccttgaatccaggagtttgagaccagcataggcaacatagtgagacccctgtctctacaaaaaagcaaaaattaccaggcgtggtggcaagtgcttgtggtactacctacttgggaagctgaggtgggaggatcacttgagcccaggagattaagactgcagtgaggggccgggcgcggtggctcacgcctg

SEQ ID NO: 29986 - DNA, 1161 bp, Artificial sequence
  DNA replication origin
ccacccgggtcccgcgcgctgcgcagttattggcccgagaagttgcgcgcaccgctcccgcccccgacgtgcgcgcggctcaggggcgggcccgggcgctacgcagccgccgcattggccgaggcgcggcccacgtgacccacccatggtcccaagcgaggcctggcgcgggacgccggacgcggtgcggggcggagcggggcgccaaggggcgcgccaggagctgcgcgggcgctgggagggagaccagggcgcagttccgggcgcgtctgagcggttctcgaggcgttctcgcctcggtctctggcgagtgcacgggttggtatcccagaggaggttaaagctgttccttgagacctccgctgctaaatagagtcgcagtagtgacccgattcgtccagcaacgcggggctgacttcccgcctccaagccctgagcttggcaccgtggcggtggggggtgggggtggggggtctccgaaagggaatcagacccggcccccgtccttagagaagaggacagtgtgtgggggcactttatgccgtcagtaaccccacctccaggtagacgtggtacaggccccaagggtgttggaatcacagctgggaaatcagggacgccgtcccggaggaggtgccatttgagccgagtcgaagaacgtgtgggaattttccaggtggactccataagccagggtagggttggtccggaaagcatgagtagcctatgccaaaacattggagagttgaaatagcctggcaagccggggatagcaatgagttgttcagtatgcaagggtgcatgcagaggagtaagtgacacctgagaattagaaagtcagacaagggtcaagtaaggatggttttgtcctgggcttcctggtatgcttggagtagcgttgatgaatttaagggcagagcactgacttctgtctcagtgttggaggctggattgaaagtggggagtggtgccaatggcatggacattaattataacactctaggaagaatgccagacgagatggtgaggacttaatcagaacgctgaactatgtaagagagggaaataccttgttaaatgaatagttgctggggtgggtgagaaagaaaaatctgggatgtgtctcagagaaactagagagggatcaggccgggcgcggtg

SEQ ID NO: 29987 - DNA, 947 bp, Artificial sequence
  DNA replication origin
cagagaccgaggcgagaacgcctcgagaaccgctcagacgcgcccggaactgcgccctggtctccctcccagcgcccgcgcagctcctggcgcgccccttggcgccccgctccgccccgcaccgcgtccggcgtcccgcgccaggcctcgcttgggaccatgggtgggtcacgtgggccgcgcctcggccaatgcggcggctgcgtagcgcccgggcccgcccctgagccgcgcgcacgtcgggggcgggagcggtgcgcgcaacttctcgggccaataactgcgcagcgcgcgggacccgggtggggaagctggagctgttgcggggtccgcggggaagtcttggcggtggagccatggtcggccaactgagcgagggggccattgcggtgaggaggtgccgggggctgggccggcggtccggggtggctgcggccccgagcctcgcggagtagagagggggaggggagcccggggcgacgggggatgaacgcgaggggaggagatggcggggggcggtggggacccgccgggcgtccctctagtgtcatcgccccctcctcaaagcattctttcgatcgtctttaaaacatgctcacatttttcctacgtaagaacaaactaaataaacgcttgcctttctctgcatcttccacctgcggacactttctgtctcttctcctttccccacccacagccaaacttcttgtctggtttcagccacttcctttcctcgcctttcatcaactctttaacccactccagtcatccctttgatcgctgtagaaaaccctggctgaaggtaccagtggcctccaagttgctaaatccagcccttttccgttttcagcttacctgagttctcagcagcgtttgcgtttaagccctgcttgcttcaggtcacaccctcttccttggtttttagtggctcagcttggcaggtctat

SEQ ID NO: 29988 - DNA, 1073 bp, Artificial sequence
  DNA replication origin
gagggaaggagggggtggcagctcagatccaactgggcctctgggccacagaacagacttggagggaccttactgagagagatgggagccacagaggggtgctggatctccctgcctactgtgtcagatgagatacaggggcgaggttggggcagagggaccacttaggagcctattgcaatagtccaggtgagaggtgatggttgcccagactagggtggtggccatgagaagtgggtagttgcgtaatacattttgaagttggccgggcacggtggctcatgcctgtaatcccagcactttgggaggccaaggtgaacagatcacctgaggtcaggagtttgagaccagcctggccaacatgacgaaacaccgtctctactaaaaatacaaaaattagccgggtgtggtggtgggcacctgtaatcccagctactcaggaggctgaggcaggagaatcacttgaactcaggaggttggaagttgcagtgagccgagatcgcaccactgcactccagcctgggggacagagcgagactctgtctaaaatatttctaaggtgtttggccggagaagctgaaatgaaggcgctgcgtctgactgagatggattatatgcgagtggaggaggcttgtgggggaagagcagagctcagtttgggaggctttcgtgtgacagatggagatgtgggggaggccgacgtccgcagacaagagggccacgctggagctttaaatgactgccccattttgcaggtgaggaagatgaggctcacacaagcgtggggacacaccggttaagttgaggatccagggctgggcgaggtagctcgcgcctgtaatcccagcacttcgggaggccgagcccaggagttcaagaccagcctggggaacatagtgagatcctattgctacaaaaaataaaaaattcacggagcgtggtggtgtgggcctatattccaagctgtctgggaggctgaggtgggaggatctcctgagcccaggaggttgaggttgcagtgagctatgattgtgccactgcactcctgcccaggcgacagagcaagaccgtgt

SEQ ID NO: 29989 - DNA, 903 bp, Artificial sequence
  DNA replication origin
cccaggtgggaggattgcttgaggccaggagtttgaaacaagcctggtcaacatagtgaaaccccatctctattttttaaaaaaagactgggcgcagtggctcacacctgtaatcccagcactttgggaggccaaggcggtggatcaagaggttgggagttcaagaccagcctggccaacatggtgaaaccccatttctactaaaaatacaaaaattagccgggcatggtggcgggcacctgtaatcccaactactcaggaggatgaggcgagagaatcgcttgaacccgggaggtggaggttacagtgagctgagatcgtgccactgcactccagcctgggtgataggtgagattctgtcacagaaaacaaaaaacaaaaccaccaggttgctcagacaaggcctcaggggacttggggcacctgaggaagaggcagggacagctgcgaatggtggggtgagggcaggagtcccccagacaccctgggaagcgctccaggcagagggaacagcacgtgcaaaaggctagaggtggagcatccctggcgtgaatagggtgtatcagggaggccactgcggctggggagggaaggagggggtggcagctcagatccaactgggcctctgggccacagaacagacttggagggaccttactgagagagatgggagccacagaggggtgctggatctccctgcctactgtgtcagatgagatacaggggcgaggttggggcagagggaccacttaggagcctattgcaatagtccaggtgagaggtgatggttgcccagactagggtggtggccatgagaagtgggtagttgcgtaatacattttgaagttggccgggcacggtggctcatgcctgtaatcccagcactttgggaggccaaggtga

SEQ ID NO: 29990 - DNA, 967 bp, Artificial sequence
  DNA replication origin
ccataaacagaggggcgcttacccaaagcgaggagactcagagcctccagggtgagagcagagactaggccctggctctatctggaggcttcctggtcaatcacggggtgaccacacggtgaggagagctctgggaaggaggatccagccccaggccagccagaggcccagggcagggtgaccagggcaggtttgcctgggacagaggggttttccaggatgtgtgggactttcagtgctaaaaccaggacagtcccaaacaaaccaaccaaccaggacaggtcagtcatccaggtcattcaggtcaggcaaatccaagcctgtgcctccctcaacaaaaacctctgaatgcaggaaggggaggggcacacaggcaggcacaaggcacgtgtcttctcaaacaccatgcgtcccgctcagtccctgcagccaggaggccggcctgggcccagactgagcctgtgcgtggtgtgtgtacctgtgtgtcatgggcatgtgtacgtgtgtgcacagggtctgtgtccatctatgttgaatgtgtgtctgtgggtgcacggggtctgcgtggatctatgtgtgattgtgtgtctgtgtgtgcatggcaaatgtgtgtgtctctgtgtgaatgtgtgtgtgtgcacggggtctgtgtgcatctatgttgaatgtgtgtctgtgtgcacgtgtgtctgtgcatctctgtgtgaatatgtgtgtgtgcatgtgtgtctgtgtgcatctctgtgaatgtgtgtgtgcacggggtctgtgtgtgtctctgtgtgaatatgtgtgtgcacggggtctgtgtggatctatgtgtgattgtgtgtctgtgtgtgcatggcgaatgtgtgcgtctctgtgtgaattgtgtgtgcacggggtctgtgtgcatctatgttgaatgtgtgtctgtgtgcacgtgtgtctgtgtctctgtgtgtgcacgtgtgtctgtgtatgc

SEQ ID NO: 29991 - DNA, 1042 bp, Artificial sequence
  DNA replication origin
ttttagtagagacggggtttcaccatgttggccaggctggtctccaactcctgacctcaggtaatccgcccgcctcagcctcccaaagtgctgggattacaggcgtgagccacaacgcctggccaagacccactgttcttgaaggccctggtgctcacgggcaggccaaggtgtcaacaatgcaaaacaggagctgggagcctgcctttgagaagcaggtgcagaacgccctgccagggtccttgttccccagccccgaagacccgccccttccctgcgatcagtgaaaggcattcagaaccggcatctagagctctgagcgcagcccagatcctgtccatcacccggttctgaatctatccccactccttcattcacgagagtgactgagctccgggtttgcttccacagcagcaagaggctcggctccttccctcctggggcctacattctcctgggggtgcagtcaaaataaaggaaccagataagccccaaatgacggatcatggtaagtgctggggacaaaaagggttgagatagagacaaaggaagggacctatcttagctgtgtgctcttggagggcctccctccctgggcgacttctgaattgaaacctaaaagataagaaggagctgaggaacagcattccaggcagagggcacagcaggtgcaaaggccctgaggcaggactgagcttggcttggacaagggcagaggggcaggagatggggtcagaacagcaggagccaggcctcgtatggcctgaaacaccaccagaaagggtttggatctaattctgagtgtgatgagaagtcactgaagagcccggggcgggagcaacaggattgggtttggatttgggaggttgcatttggagggtgagttgggggggagcaaggagggaggcctgtggccgtgagagaccttgggggcctgaagagggcaggggccatggagacagacagtgctgaatggaccggacagatgccaggatggggcccgacaggacacactgacggatcagggtgagggaggcgacgg

SEQ ID NO: 29992 - DNA, 1837 bp, Artificial sequence
  DNA replication origin
ggaaataaatagggctgggtccttatgacattgagagtggccaggagcagaggggccgtgggcatcggctggagacagggaggtgacttttgagccaagacaaatgttaagaaggagatggtcccccaaaggcctggggcagagagggccccgtgggaaccgtcagtgtgaaaactccgaggccaacgtgctatgatccatttgtatgaaatatccagaagaggccaatccacagagacagaaagcagcagattagtgtttgccaggggctgggggagggagaatggggagtgactgctaagggggatggagtttccttttggggtgaggaaaacgttctgagccagatagtgatgatagttgcgaatatgctgcgtgccagtgaattgtacgctttaaaatgttaacttttagttatttatttgtaataaaaatgtgtatattttacaagaaaacaaagcctccaaggcaagaatgagctcgctgtggtctaggaacagaggccagtgcagctagcgctgtgaagagtggcgcaggacggggctggagagggaggtggggccgctcacgagggcgacgtgggctggtgagcagcctgcattttattctggtgcaatggaaagccactgaagatttcgagcaggaaagtaacatgatagcacttactgtttttgaagatccttctggctgtgcttaggctgtgggtggtgatggggctgcaatataaacagggagaccagtgagggtggccacggcagaggtccagggaacagaagagagtggcccagggtagggtgggggtggtgggggcggggtgatgtgaatttgggatgtattttgacggtggggccagtgggacttagtggattaaaggaagagatgatgaaggaaagggaagaatggagaataacacctgcatttccagcttgagcagccgaaatgctacaggtgtcacctgctgagacagggaagcctacacggtgaacacaggacaatcggagtttgagctgcttattagatactaacgtggcagtgccaggcgggcaggcgggtggactggtctgcagtttagagccagaacacatgtctaatccccacccctatgaagatggtatttaaaacctgagcctggctgggcgcggtggctcacgcctgtaatcccagcactttgggaggccgaggtgggtggatcacgaggtcaggagttcgaaaccagctgggcccacatggcgaaaccccgtctctactaaaaatacaaaaattagctgggcgtggtggcgggtgcctgtaatcccagctactcaggaggctgaggtgtgagaatcgtttgaacatgggaggtggaggttgcagtgagccgagatcgtgctactacactccagcctgggtgacacagtgagactctgcctcaaaacaaaacaaaacaaaacaaagacttgggcctggacaagctcacctggggacaggtgtgactacagaagagagaagtttcaagggctgagctctggggatttaggtgtatgtggtcatcaggccgggaagagcagaccaagaagaagcaggcagcaaggcagacaagacgacagagccaggtctctgaagagaagagaagaaagagtttccagaggggagggccaactgtgtccagtgctgccaaggtgagcagattaggatgaagaagacactattagattcagcaataccatgataggactgcctctctggtgagtctgagcacccagcacatagtaggtgcttattaaaggccagaggcatgaaatgattagtttctgcactgtgtgccatagactgcccagagtataagggtctcagccag

SEQ ID NO: 29993 - DNA, 1323 bp, Artificial sequence
  DNA replication origin
ggggtgcaagatgcgggatgaggggtgcggggtgcaggatgcaggatccagggtgcagggtgcggggtgcgggacgcggggctccgatgcaggtgcgggatgcggggtgcaggatgcaggatgcgcccccgaccccggctcccacccgggcggcccgcggccgctggttggctcccgggagcgccgctcgccctatcacacacctgcgcggttgccaggcaactgggacagagttgtaacacctcggtgagggccgggatggggtttttaatctgctggctgctccgggtctctcctcagaagttggagacggatgacattggtttccctctgcaaagggacctcctcccgcccccacttaccgctcccctcccccagccccaggccccgcggtctctggccaggccgccccaggtctcccagccgcgggtggttcctgggtcccagacaccccaggccggcgggcggggtggggggcggcactgggcggctctcgaccccgctcttgtttggggaaagtcatcctcagggggatggggacctccgcctgagacgaggtggtggatccagggagaaccccgaaggtggggaagggcaggctccaaggtcgtcagggtcaccaccgccgttgctggccttggactgaccttggggtggaacgaccttggggtggccgtggggtgggtgcggggcgctctcgggcctgactctgcctttctattgcctgggtgttccccagactctagtctctgcctcgcaccttcccagcgtctcgcccgtctgtgcacacctgcactatttttgcacttctgttttcttccgtagattgacccattttcacttagataaatgtattttaaaaggaaactggatacggcatctttaagtggagaggcagagtatctatcacctgccataaacagaaactaactgtaaaaataaatacaaagaaacaaaatgtgattaaatggtagcacagggagtctgatctgagaggccacaatggtaacaaaataagcacttactccgagccaggcactagctaagcactgtacctggactggctcatttgatctcatgttatcaatgttcccatttcacagatacagacgctgaggttcagagaagctaagggctttggccaagagcaaatagccactaaatgacaagttgagtcccagccgagttccacccaaagaccgggctttagttttaaccatggcctgtgctgtctctggacagtgtcacccctggctccctgccccgtgagctgggtggtggtctctttccaggagtggggcaatggtttgagccccaactgca

SEQ ID NO: 29994 - DNA, 1450 bp, Artificial sequence
  DNA replication origin
cccccggctctagagcgagaagaccctcccgggcggggccggtgcccaaagggcgcgctcggctcgggtcggcctgcgggaggccttggggcgccgggtctgggcaccgccctcgccctgcagctccggatcaatgcgacagccctccccgcccctcccccaaaggccaaacaaaacatagtaaatatttaatccgggccagggagccaaggaggcctccccgccccctccgccgccgtctggctcccctgccagccccggcagctctccctcggtaatgaggccgggagaggccgggatcgatcgcggcctggggcggaggcgggggtgggggtggggcgcccggcaccctgagggggacatcgctgcccgcccccaggccccagacccaggagcccaaccgaaggcacctgcgcccacgctttccccagaaggcctgcgaggagcgcgccggcccctgccggcctgcccttgtcacctcccttctcagagggcgtcagctggggtcgggggtctgcggggatgcaggcccgagtaggagggctgtgaagggggcggggacctcccagccccggctcaggcctgacctccgagtcctagtggtttaaagccagcaggggcttggatgaggcctgggtggggcaggggcagctaggggtgccctagagggaggctggcgaggtgttcctgtaccttggagtaggataccttagtgtgctggtggtgctcccgatttcctgggcattgcctggggaatacctagaggggacggtgacatcctcactgctcattcatgcagtggtttatgattgagcacctactatgggccagtcatacttgtcgactaccagacagacaagttcagacctgcagagggatcgcattccagagagcgacagttaataagtaaacacatgcgatgatttcagatcgtggttggactcagtgtagagaataaaactgttaatgtgatattgtacttggccgggagaggagccacatcagctgggctggtcctggagctggctgaggacgatgggttggggaaaaagcatcccagacaaagtctgtaggaagtgcaaaggcccagaggcaggaaataatttgcgaggaaggccagtgaggttgattgtcgtgagtgaagaagcaggtagtgagcggcagatccctgaaggtctcgtgggccacggaggagtttggattttgttctaagtgcagtgtgaatgcattagaggttttaagcaaaggaatgacatgatctgatttacatttttaaaagcctctgctggctgcagtgtggagaatggaagatagttaagggggaaggcggggaggccaggttggttgcgggggatggtgcagtggtgtacacaagggtggctggtcccctgcctggcttgggttatgactgaagtggccatttacacatctgcagctggcagggccccca

SEQ ID NO: 29995 - DNA, 1424 bp, Artificial sequence
  DNA replication origin
gccccaaggcctcccgcaggccgacccgagccgagcgcgccctttgggcaccggccccgcccgggagggtcttctcgctctagagccgggggcccgcgctgagagatcggggttaccgcgcggggagccgcggccgcgctgggatccgttccctctcgcgggagccgccggccggggatctgcgcaccccacgcgccccgctcgggtcgggcctcccctccccgcggctgcccccgggccggccaccgctgcccagcgcgcaggtccctgccggatccccggcggctttcctgcccccactttacagacgtgaacgctgaggcggagggtgggggacgtggggccggctcgcctcctcctgggctcgccgggatgtggcctccgaggtcgccgcggcgctttcctgcccaagctggcgctgccggagcgcccgggccccgctcccctcacgggcctcgcagcacagacggggacaggggcggcctcgcgcgcacggggaccccggggtgggggtgggggtggggctctgcgagggccctaaaaacgctggggacgcgggtttgacgcactttcccggcagccgaagacgaccccggagcccctttattctctacgcgctcatcccacgcgcagaacagacacaggccctgccctcaccgagggttccagtcggctgtgcacaactgaagagctgctcccccttccctgcacgatgccatcctctcacacacagggcggggaccactccacagccccttacagcgatgttcactcgccccagagagctgctcacgccagtctacaccagacacatgcgcgatcacacacacacacacacacacacgctgcactgaatgtgtgctcatcatacacacacacacacacacacaccggccgggcgcggtggctcacggctgtaatctcagcactttgggaggcggaggcgggcggatcacgagatcaagagttggagaccatcctggccaacatggtgaaaccccgtctctaccaagaatacaaaaattagccgggcgtggtggcgcgcgcctgtgatcccagctactcgggaggctgaggcaggagaatcacttgaacccgggaggaggagattgcagtgaaccgagatcgcgccactgcactccagcctgagcaacagagcaagactccgtctcgaaaaaaataaaacacacacacacacacacacatgaactgccccatccctatccacgtatgtgcacatgcagctcccaacacccatacacaaagagctgttcacccactgccaccctgtacatgtcggtgtacacacaagcacacacgtacacagaacatccagcctcttcttcctgtccctgcacacatgcacaaatacacactgcagtgcccactccctatacatgccccccccacacacacacgcacag

SEQ ID NO: 29996 - DNA, 983 bp, Artificial sequence
  DNA replication origin
acacaccccaggttctccttttccctgcagaaagggacaaaaagtcctttcagcaaccgagcagtgctggccaaagtgtctttgcacagagaaggtgctttttacagagctgagcagaagcccgggtctgagaaacttgggcctggagcgtgcaaacttgccccggtcgagaaggcttcccagacagctctgagaggccgccatgtctgggctgcaggtctgtgatagggataatggagaggaactgacatctcatttcccttttggtcttttgtcttttggcagtttatagttaaaaatgagccaccaagcagcccacacactttatttatatggtttaggtgcccaaggaggctccagcagcctccaagagcctttctctcccaccctggctagccagaggcccagctgtggatgagcacagtgcactgtgggggccgctccccggggggaggctccttaccctgcacaagaggcggccaccggaggcttagcagtcacgtgtgtttgccactcgggctgtttcttccttcctgcacagcctggttggctgaagaggttccaccgataggtttccacctggattggcccaaaggaagcagagcagagaagcccttcactgggctgggctcagcctgggtgacctggagaccgcccctagggcatcgtgtggacgggtgacttgtgttggttctttcctgggcaggcagttttctctcttggccccagatcctgatcttttggattagtttcttctgcacacctgtataggacactcagattctctgtatggattctaggtaggcgcccaaagccaaaagcatgcctgaggctaatgcccagggaggtggccattgaagtgtctgcttctagaattcttcccaaagtttccaagcgaaaatgatacaggaggccaggtgtggtggctcatggctgtaatcccagcattttgggaggccgaggtaggaggatcacttgagacc

SEQ ID NO: 29997 - DNA, 1184 bp, Artificial sequence
  DNA replication origin
acttgaggacagctggcttcgcgaccaccgtagctagacgccccagcagcccggcccggtacggagcgcggcaaagttggtgcgggcaccggggaagtcccgccgcgcccccacgtggttgccacgcggggcgccgtcccccgggccctgggagggcaggtgatcacgccgggagcccacgggccccgccaccagctgttccagcctctgcgtctgcctctcccctcccaggcccgagcaggctgtggcgccccgccgggatcccccccgcgcctggcccggccaggaggctgagaagccgcggcgcctgcggctggctgccccggccctgcgggagcggctgaggcgggagctcaggtagccgaggggcctgatccctgcgctccacgctccagccttaatccgcccctgtttccatggcaacagaccgaggtgtcgtaagcacaggattctgacctcacagcaggatggggaaggagaaaacgcgcacggggagggggtggaggggggggaggttggggaggtggggggaagcgaagccctaagatgggcggagagaagcagatgtggaggtgatggcgaagacccagatataagcaggtcaggcaggtgggtggaggaaccacgcctttggtggggcagtgaaggccgtgtggtggtcctagcttgggccgaccgaggaagctgagttgccccgtcgtcctggaatagtaacaaacttgtgtgtgacttgtgccctccacgtgggtcggtgcagttcagggggaaacgccggctgccttcgctgtggtatggaagagtttctggggctagttggagaaaccgcttcgcagacacaccccaggttctccttttccctgcagaaagggacaaaaagtcctttcagcaaccgagcagtgctggccaaagtgtctttgcacagagaaggtgctttttacagagctgagcagaagcccgggtctgagaaacttgggcctggagcgtgcaaacttgccccggtcgagaaggcttcccagacagctctgagaggccgccatgtctgggctgcaggtctgtgatagggataatggagaggaactgacatctcatttcccttttggtcttttgtcttttggcagtttatagttaaaaatgagccaccaagcagcccacacactttatttatatggtttaggtgcccaagg

SEQ ID NO: 29998 - DNA, 744 bp, Artificial sequence
  DNA replication origin
ccccctcaaaaccgcctgcgaagtgctccgggtggcagaagcaggccgccggctccgcggagcaagccgctcgccccggggctgagcaagcgcgcggggctgccgggcagcaccacggttgcttgcgggcgccggtgccctcggcgcggggctggagctcaccatgcccctgcggggccgggccaccgggcacgagcggatccccggcttgcccccgcctcgacgcgctcggattagctgcagctggcgcccagggatttgaatctggaccccgggagggagtgcgcctaggccgacctcggagcggcggccccgtggccaacatgcttcgcaaaggtgagttggagccgcaggggcaagttgaagttgaatgcgctccggaaagagccgcgagcccgggcgccgcccggcgccggggctcccggtctgggaagtagcccccggcgggctggtgggttttgccgggcgcacccgccgaggggctgctgctggggctcagctcccgtcagcggccagttgtgagacacggggttttctccatggatcgagtggccaggcctagagatccggcccggaggggtcagtcggagaccagagtgagcggccggtggtggaaggggagccggcctcctgggacctttgctttgctgggataaagttttgcacttgcagcctccattccctgcgcgggcacacgcccttgcttctgccgctttgtggaggccgagtccgcacggcgccccc

SEQ ID NO: 29999 - DNA, 1846 bp, Artificial sequence
  DNA replication origin
aggtcggcctaggcgcactccctcccggggtccagattcaaatccctgggcgccagctgcagctaatccgagcgcgtcgaggcgggggcaagccggggatccgctcgtgcccggtggcccggccccgcaggggcatggtgagctccagccccgcgccgagggcaccggcgcccgcaagcaaccgtggtgctgcccggcagccccgcgcgcttgctcagccccggggcgagcggcttgctccgcggagccggcggcctgcttctgccacccggagcacttcgcaggcggttttgaggggggacgccgccccctggccggccggccgcagccccctcctctccgccccctcggaccaccgccgccgcggctgcagcaaaagggcgctcgcacgcaccgccgagctccggggaaagcgcccggcgcgcgtttgcaggaccgagcgatcggcggagcggggcgcctcccttcctccccccggcttccccctcctctcctcctccctccctcccttgctctctagctccctccctctcgctccgctccccgcccccgctcacggagcgcctcccatacaaaatttatgaaagtgctctcagctcgcagtgccgagcgccgtcctattcccaaggcagcagcgctcagccgcgcggcgccgcctcccaaggtgttttcactgcgcccgcccccggggaagatgctcggcccgcgtccgtccaggcacctgcccccagtccccaagccggtcctcggaccactccacgcccctccccggccccgcaggcctcctggagcccgaacccgcagcccagcccccgcccgctcgcccttcgcggctggaggtcatcgggagacgcggctgggacgcgaggaccgccgcccagagtacggatcgcgagtccgctccctgccccgtctcctccctggccagcgccccttctcccagtctcgacggctcttccccgcactgaacagctccagcgaacccggctgccccgcaccccgagtcccaggacactgttctttcgtggggagaggaggggagcaagcattcggaaagggccagctgcaaattccagggagaaggaaggacccgtgcgggttcgggtgggccgtctccgcctgggtggggtggcggcggggggtctctgatctcccttggtccacacagaccccgccggggggttcgcggaaaatggaggaggcgccgcttggaaagcgggtcccgcaggggcctgttgagctgagggaagagaaggttcgggccaggcgagatcctgggtggaggcggcaccccctgctggcctgggatcagagggattcggagagaagaaaaagcggatggaccaaggctgtcattcaacacacattcaccgaaggctcagcatgtgtggggcactactgttcctgaaaattcagcagacgaaaaagacttgtctttgccctgtcctcaaggagtttccattttaataggggccaaatgaggaaagtccagagaagatgggaagattgtgcttcgaagaaaaacaagcagagtattgttctggagctgacacgggggtagaggtggcagtcaaggaaagctgctctgagcaggtgacatccaagcagaaatccaactgaatccctccttgtaggaaaaggtgacatgataggaaggtcaaaaagaaggtcagggccgggcgcggtggctcacgcctgtaatcctagcactttgggaggcggaggcaggcagatcacgaggtcaggagttcgagaccaccctggcccgcatggtgaaacccggtctctaataaaaatacaaaaattagccgggcatggtggcaggcgcctgtaatcccaggtactc

SEQ ID NO: 30000 - DNA, 1120 bp, Artificial sequence
  DNA replication origin
tctggagctgacacgggggtagaggtggcagtcaaggaaagctgctctgagcaggtgacatccaagcagaaatccaactgaatccctccttgtaggaaaaggtgacatgataggaaggtcaaaaagaaggtcagggccgggcgcggtggctcacgcctgtaatcctagcactttgggaggcggaggcaggcagatcacgaggtcaggagttcgagaccaccctggcccgcatggtgaaacccggtctctaataaaaatacaaaaattagccgggcatggtggcaggcgcctgtaatcccaggtactcgggaggctgaggcaggagactcgcttgaacccgggaggcggaggttgcagtgagccgagatcgcgccactgcactccagcctgggtgacagagtgagactctgtctcaaaaaaaaaaaaaaaaaaagggccaggctgggcgcggtggctcacacctgtaatcccagcactttgggaggctgagcagatcacttgaggtcaggagttcgagaccagcctggccaaggtgaaaccccgtctctattaaaaatacaaaaattagccgagcgtggtggtgtgcgcctgtaatcccagctacttgggaggctacgggagaatctcttgaacacaggagatggagattgcaatgagccgagatcacaccactgcactcctgcctgggtgacagagcgagactgtctcaaaaaaacaaaacaaacaaaaaaaaagaaggccagtctgacgtattcactcacacctgcatttggtggcactgaagcttcagatttgagctaaggctctgggcttggacttccagaagcttcaggtgtcgtgggaaaagaaagacccgcaaaccatcttagagtgtgactgacagaagtcacaaagactgcgaaagggctctgctagctctgccaggggctaccagataatcaggaaacagtcacagaagaggtgcccttggagttaggtcttgaaggctgagttcaccacactaagaagggggaagggcattccacgtagatgcttgaaggtgagaagtaaccttgttctgaagatagataagattggtccttcctgaggaccatgggctcacacctataatctcaccact

SEQ ID NO: 30001 - DNA, 1728 bp, Artificial sequence
  DNA replication origin
cacttaattttttatagattaaaatgtatgcaaattggcctgagccccagagagcatccccaaggggcaagacggtgggagcagggaagtgagtctgtggcaacaagatggggcagcaggggagggagggcagcagcaggggagggggatggggcagcagcaggggagggggatggggcagcaggggagtgggggaggaggggagggggcagcaggggaggggggagcaggggagggggaagggggagtaggggaggggaatggggcagcaggggaggggatggggaaactggggagggggatggggagcaggggaggggagggggagcaggggagggggaaggggaggggagagagggggagcaggggaggggaaggggggagaagagaggtttgggggagcaggggagggagggtggcagcaggggagggggatggggcagcaggggatgggggagcaggggagggggatgggggagaaggggagggggagggaggagcaggggagggcgatggggcagcaggggagtgggaggttcccagcatgagatgacctcccctttcttcgttcccctcccctgttcctgtgctggttccagatggctgagctctcaccctccccaccaaggatggctcattgtattgcagaaacttagagtgacaggggtaggatgtagaggaactgaataccttctcccaggcacctcccactccaaacccatccttgccctacttccccaaatgtgcccgaggaacaggtgccccccaccgcccccgaccggcagacctcccactgatcactcagcgcatttcaggggcagcttggagaattcttagggtcctccccaggtcctaccacctgctctgggtctagctttgaagacactgggattgatttctttctctgtcccaaatgtttaggggaggggggatttgcagggacaagcagggctctcagcaagctgggagatttgttttgggttttccctgagtgtgtgtatggttgtgggagggaaagggggaaggtggaggttcagaaggaaaaaatgcccgccaccagggctttacccacccgggtaatgagcatagggggtgggggaagcctggctcaccctcctctccagtgccccaagcctcacctttccaagatatccacaatggtacaggcaaagaggaggaggccttccggcatttgcaaggccactgcaagacgagcagagacatgagaggtggagggctaggaaggggctgcaagggggacactgtcccatctgggccaggcaacctctccaccccaaccccagctcaatgatcacaggctcacccttcttggcctgggcttgttggatcctccagatggtcttggggatctcaaagttgtagttggaaggcaggacccggattgctgcctgcagctgagggttcttcaggatctcaggggggatctgattggccacgcggccccgaggggcccgacctagaatggatataaggcctgagttggtgtctgtctttggctgaagccagattgagatggaatagggatcccttttcagggcctgccggtgcccccgctcaagcatagaaataaaaattttgagtcatctcaagaaaaatcccaggcatcttagctagccctacaaccagcaattagggaattaaataacttgctaaacaagaagataataaacaacagtcacccaagtcagagtcacgagatgcctggtt

SEQ ID NO: 30002 - DNA, 738 bp, Artificial sequence
  DNA replication origin
gcttctgggcacagcctgatttggggaagggggtggaggagggggtgactagcaggagctcaactcttccactgccacacccccaggggaaggatggggggaccccagtcactgagccaggctccacgccccaagtgtgagtctctttcaaggaagagggggttctcctccattcctagggtgagttcaggggtacaaggtcttccccacccaccccctcccccagtgattcaggcctggcagcagttcccacggcagtgttctggccagagcctcctcttcctgatgcaggaggcgtgtaggtggtgccatgtgctatgggggagctgtgcctgggtccccccatcctgggcaccaagggccctgcctgcggtggggaggtagtgggggtccggacgagagggccctgcctgtggtggggaggtagtgggggtccgggtgagggggccctgcctgtggtggggagggggtgggggccctgcctgtggtggggagggagtgggggtcccggcaagagggaggctgtgtgtattcatacagccacgcccatgcccaccacagcactcagcgcgggagtgaggacctttgggtgtgtgtgcgtgctcacggctctgggtgggtgagtcagggcatggggcgtctgtgttttgaccccacgtgtgccggagtgagggttggggtccctcctgcagcctgagcctgggtagaggaatgagggtcctcacgcagcaacagttc

SEQ ID NO: 30003 - DNA, 1230 bp, Artificial sequence
  DNA replication origin
ccgagcggaagcacaatgcacggggcggaaccgaacgtcagcaccgccccgagggcgggcctcggagcgccaaggcgttcccatgacaacggcaaaaggcggggcgcacccagagcgggggctgatacctgaggcccgggagcgcgtcaaggagccagcggcgccaccttctcgtccctgcagctgcagtcctcgcaagccacggccgaagggggacgcgcggacccctcctgcacctgaggtcgcagactttggttagggtctcgctcctgcgaccctgcgtttccctccgctccgctcctgtgcgtttcccgtcgcggtcgcagggcggcggccagtgcccaggcgcggtctctcctccctcctggaagcccccgcctaccttcccccgcgcgggccggcccggggcgtggggacggcggtcctggccgtggttcaccgtccagggccccaaggagctgccagcgtagaagtccatcgggtagggctgctgccaggaaatgtccctcagagccacggccgcctaggggaggggagggagggacaataacatctgccagtgtttttctgcccctggattactgaattcagtcctcacgacggcctgtgaagggcacactgtcccctgccacagaagggaactgtgtggttcagggccttgcctaaggctacacagctaggaagtgactccgctggagaaatcgagacagactccggaatctacgaacataacgaagtgctgcccacccaccccactccactccagacctcacctttgagaaccacgtccaaagcccactctctcccagagcttggtgttacctcatagggtgtcagcagcggcttggggaaggctgtgccccagtcaatggagagacgtggacatgccacctgcacccacctgggaagggaagccaggtcagaccctaggaagggcctcctcgtcgcccaggcagcatgctgaagaacatgacagtgcccccagcacacccattcattaacaggctttatgaatcctaaagtaaagacagtgacccactgctgtttggaatactgtattgttgcgtgttttctcctgtttcctctgccgacaatgagctttccagggcagctcactggtgatagtatccccagaaccacatttagtacctggtacagggcaggtgtcagccaccgctcaaactcatctcacaaggacaaatgtgatgttgccattgcctctgagcccca

SEQ ID NO: 30004 - DNA, 944 bp, Artificial sequence
  DNA replication origin
gattgtgccacctaggcctccttcccttcagtttgggacttaaaacttccaccaataacgtgagtatgtgcacccatgcagcagcctgtccgaggactcacaactggagacacctccctgcttggcgctgcccagaaaactatgtagatggccaagaaaccgacttccattataaaatgtttttctgtgtgtaccaggaaaaagatgctcaaaatccaaatcaccactttattatgtggcagtcaccatggtgccagcctctgccttccccatgtcaccctcctaatccagggctctccaaccatattcatgtttgcgttttcacaagtcaatgtccattaaggccttgtgctccccttttcttcagtacagggcagggcccttataatttgggtctcaagaattgatagttgtctcttaactggttctggtgaggcgcactcacagcagtgagtggagggtcctgggagggcatggatgacggaggctgcccctagaggagctggatgtaggagcagagacatttcttgatctttcactctgcaaactggtccaagaacttgaggtaggcctgacgctggggtgcagctgctggaatgaagtggccaccagagtgggtgagggtgatggctccgggaaattggctggccagttgcacactctcctgagaggggatgactttgtcagtgtccccaaaaacatggagcgaaggcaatgacaagggcctttgcaggatggattccttgaacccaatgccccggggacagaaaccagacaccaagaggataaaccgtggcaaggggaagcggggatcgcctgcctggcccagggcacacacaagggctgctagcgcagccccttggctgaaaccaagaaggccgtcaaaaggccccagcctgttcagtgcctgtgccaccatccccagtgattcctccaggcccctg

SEQ ID NO: 30005 - DNA, 1398 bp, Artificial sequence
  DNA replication origin
gctgtccgcggtgctgatcaacgcaggcgccgccatcgggccgccccgtccgggtccctaggggctgcgaggggcggtggcccacgcgcgctcctcagcccccgccgccccgcccgcccccccgcggccctgacgtcagcccgccccgcgccggcgccgtccgcgcgccccgcccccgcgtctccagggcaaccgtggctttcgattgttactgtgggaactggaggtaacagtctacagccatggtcgccccgcagcacgcccacgcgccgcgccacgccgcgccccgagccgcgggctggggacgcggagcagaaggaggcgggggcggcgagtcaagatcccacgtgcccgcgcgggtggcaggaggtgctgcgcagggaggcggcctcccggggccggcggctgagtccaccgaggctcgagcgcgcgcgtcctgcggagtgcgtctggcggccagcctgaggccgtcctgtcctcccggccaaggtatcccagccagggctcggcgagagaaggggtcgggctgggactcgggttctttcgatttcggtgagagggaagccactgggaccaggaggcttggaaggaggtttgtctcctggggcctgaagacagtagagggaggaaagttttctgagatactccacagccccgttcttccaggaacccctagctgaagtgggcattgggcgaagagtaaactcttgaatctttccctctgagctaggaggataagaagggtccccaaccctctggaagccaatgagcttgtaaagttaacctggtccgcgaagcgtctgaacagatcagcctgctcacctcagcctatctctaggtgctggattccaatctgagacagtttctcaaattagccctaaagaggagtgaataccacaggggctgaagtcctctggtgcggatgaagtgtgaacaaggatctctaaaaatattattgtatatgtcgcctgcctctgccaacatcacccactacaggggatgtctattgaatatcaggtgtgagacttccccagagatagtgttgggaatggttaatgcaacccagcccacgacacgttaatccaatttttcttaacgtctcacgccccaccccctccttcactccccacccggctcctttgtgaagtacttctaagacactcgtgccggtttcccagttaatcaacacccacatgctagccatcccacctccccagggccccgaggtcttgcagattaaaacgcacttgcttctgggttccaggggatgtcagtgggtggactgcagtggactgctgggtgtagtgctctgggaagccagaggtccaacctggcattatcagcaactggtggttaaggggccatattctgtttctgagctttctgtaaaacgggata

SEQ ID NO: 30006 - DNA, 2478 bp, Artificial sequence
  DNA replication origin
ttataggcgcgcgtagtactcgtgcggcggctcattcatgcggccgcggctcctacacactgacgcgctgccgacgtcagcggggaatttaggaaatgggaaaaggggctatttatagtggcgaggcggggggtggggaccgaggcgaccgggaggggaggagggggcgcggaagcggcggcggggtagggggagccgcgcccctgcccagccgacaaggggttaactttccggaaccgcgggcctggggccggggaggcggcgcggaggggcgcggcgggcccttcgagcttattcacgctctccttccggagccccgcggctcctgggggtcttcacgtggcagccccttccccctcctcagttcctggacctgacgtttctgccgtcacaccccgcaaggccactgcggtgtcgccaccctctcgtcctgcagggtgggcaggagaggaagctggactcccgtgggggcctggggcgcagcgagggctgtggcgtcgggggccgggagaagaagagtaggggagcccaaagtagcccaggagtctttagcggaggaacctgggcctgggagggaaggcccagcggggattcaggtaccacccaggagctggagacccgagggacggcagagaagttggggaaggtgggccaacctccccagaaatgatgagcaacgggatcctctatgagggagctgggggaacgcgccagaggtaggggtgagaggaatgggcagcctcagcaagggagagaggaaaggctgtcagtgccacgctccagagcctggcatccaggacccaccttcggaccatttgtggcacgatggacgctcccagagctcacgttagggtaatagagagtgaaggagaccagcagcttggccaagaggggcccccaggggatgaggaggacggtttcctggagaagttaatgttcccggagaccagaattggcagggagagcccatgacttgtggggcagttcccctggttgggagcggggaaatgcatggtcctggcccagcctggctccatcgagatggaggaagggtctaaatgagaggagtgtgttcagacgaggagctggaccaggatggggagggctgtgcaaggcatggccggaagagcggggcagggagagaaaggtcgaagagtgaagtgcacaggagggcaaggcggtcctcaccctgcctgggctggggcagggctgtgagaccctcccttacagaagcaatgagggcttgaggagggggttaggggcctgggctggggcagggctgtgagaccctcccttacagaagcaatgagggcttgaggagggggttaggggcctgggctggggcagggctgtgagaccctcccttacagaagcaatgagggcttgaggatggggttaggggcctgggctggggcagggctgtgagaccctcccttacagaagcaatgagggcttgaggagggggttaggggcctgggctggggcagggctgtgagaccctcccttacagaagcaatgagggcttgaggagggggttaggggcctgggctggggcagggctgtgagaccctcccttacagaagcaatgagggcttgaggagggggttaggggcctgggctggggcagggctgtgagaccctcccttacagaagcaatgagggcttgaggatggggttaggggcctgggctggggcagggctgtgagaccctcccttacagaagcaatgagggcttgaggatggggttaggggcctgggctggggcagggctgtgagaccctcccttacagaagcaatgagggcttgaggatggggttaggggcctgggctggggcagggctgtgagaccctcccttacagaagcaatgagggcttgaggatggggttaggggcagtaagttaacttggggagcggatgtgggggaacgctgaagaataaagactgtgggcacagcagacccctggggcaggttagcaatgcacagactccactgcacaagatacatggggcggaggggctctttggaagtcgggggtgggggatctgactctatcaaaaagagaaaagataaaagagatggggtcagagaggccctgcatagtctggatttggcctactagagctccagttttcttgccgctagcctttgttccagggattctgttattcacaaatgccttcctgctcggtagaagaactcctattcatccgtcaaagcccagctctaggagcacttatgaggagcctctccacctcccctcaacactccgtaacttccacctcaggccgcagcacgtccctcgggcgagatgtcggggtccgccttccctagagaccggcagctccggaggcctccgttttcctctttgggacctcactgcttctaaagtgaggatgctatggggagacatgggagagggagtgggtaagatggatccagaacatggggcggactcaggcagcggcgggaatcaggc

SEQ ID NO: 30007 - DNA, 1301 bp, Artificial sequence
  DNA replication origin
gatccagaacatggggcggactcaggcagcggcgggaatcaggcggactcgtttggaccgaagcctccgccaggcaccgaagccgtgaagtcgcctgcgcagcaaagggagcctccggggggcgcccgagaccttggtgtcgctcgggggccgctggtagccgcgcccgctgcccctcgcccggtgactcagccggtacctctggcggggccatgggggccagaggacagcgcggggggcggcgagcgcggttgctaagctctccaaggcctcggagggacaggatctgggcgcacctcaccggttgccatggtaacgcagcgccccagcccctcgcgctccgcggtggagggaggcgcagccaatcggaagcggcggagttctcggggaccccccccccccccgctccacgccgtgtgtgggcgggggtcaggaggtgcggggcggaggcggagcgtgggccgcggagatccggcgttcgcaggaggcttggtgcgcggcggggctgcacggggccacttccggagtagtactgcgagcagcggcgcgacagtgcggggtcccctttctcccagaagagacgtcacccacacaaacctgaccttcacgtggggcgcgggaccttgcggggtcccagccgcaggcgcccctgttgtttccttcgggcgggtgggttggagaagaagtccacgcgggattcttcaaaacggcgtacagggggattctagggccccatggttacttctttggaccccccggaggcgctgtccagccacttccagtcgccctgatgactcgtcgtgggttcctttaggagacccgaaagttcagggcgggctgtgtgggtaacacctctgcccaggttcccggagggccctacgtggctgcccctggagtatcccagagcgctagggctgcgggaaggggcgggtgtgcttctggaaacatgagcgcctgttagtatcagtgcctggatagggctggggacaaatcagtttatgccgcgcacaccgaatccatgcgcctgagtgagggtgggtgtgttggggagtgcgtccaagtggacagtgccgtacagtaatgtctacggggagttccaggagagctcggctactcctgcgcaggataacctctcccccaccacccgagtcccgtgctcgcgggcaggacttttccgaactggggctgtgtgcctagaaatacgtacatgggagcgctcagctcaaagccccagggtttctgggactcgcgtgtccggggtcggggtcccaggtgggtacaggtgggagggcgaacctgcg

SEQ ID NO: 30008 - DNA, 1868 bp, Artificial sequence
  DNA replication origin
cttcctgcccttatcaacctgggtccctcacacttcgccagttgcgtccccgtggacagtcatgagtctagaggaaaggggcatctggtctcaggcccgtgctctcgggtggcctccacctgctccctctctcctcactggcctttctttccgtctagcttcctcttcaggaaatgtcctgactcccctcagctcccccttcacccctccttgcccgcctaccctccctccagaatagcccctcacccttcttccccttctagttgatccttttcacctccctgatccccttcatttcttcaccgcggttcctcgtcataggggttctcactctgaactttccctctctactacccatggcaggaacctagtacaggtctcccacccagggccttccaccctcggctcctgtgctgggagaaacttccaggcgtggacagcccagcctgaggcattccagtgctggggcaccgtcgcctaacctggtttctagctttgccctcactccccggaaaaactgacactgacacaggggccctttccttgcccctttagctggtacctcagtggggaggcttccttaccaagaatgagttcctgaaacccagggccagagacaaggacaacttaggggaagacggggttttcggtggagccaggggcaaatcttaatgggaccagtgggggataccccagagcccatggcctgactgcacagcctgcctggaggatgggtgcgcagctctgccctccctgaggcccaggactatgccagaagcgatggggtaccgtgtaggggagccaaggccagtagtttgggggtaggagtcccctagagtctcagaagactgggctctttggagtacagggtccccggcctctcctttaagattctctccccagctggaaggccgatgactgggtggtcgggagggagacccagctctcctttctgtcccgtttgcagcactggttttgtttccttaataaatttttagttatgaaacatacctgacctcttgctgatctgtttctgggactggggagggaggcaggtccaagcctctgcacctgtgtgagggtggccctttctggctcctccacccagcgggcgcagcccatccaggtccttgtgcaggggcagaagagagcagcggggtcggggtccttggttactgctttattgctgtttggttcgagtatagaaaatggaagcggctctggaagagcctgtgtacaaggtaggaaatatacaaacgaagaggagggagctaaagagaccgcgttccagcccagcccagcctgggctcgggatggggggccgccggggcgcatgcaataaatatggtccggggccgcagggaagggaagggagggcaccgcgggagtgggagacctggtggtaggctcttcgccttccgactccagaactccccgcccttggtgactgaggaaggaagggttggccctggggctagtgccacttgtgcaaaatgaggaacttcacattatcagtcccggggtgggtgggagcgggggtgcggggggccctccggccggctcagtcccctccccactccccaactctgcccgacgctccgaccccagcggggagattcacagtgagaatgggtgtggtcgcaagggccggaggtagggctaggagtgccccgacagtgacacccctccccctctaagagcagcgcggagccgggggagggggccgacgaaccacaggaagaggcgggaggggcctggggtctcctttggtcaaagctgatatcaaaaatataaatttcccttaccccatcccacccccgtcccggggttctcccccgacccccgagctaaggcacgaagcagtgagg

SEQ ID NO: 30009 - DNA, 1175 bp, Artificial sequence
  DNA replication origin
tccagctggggagagaatcttaaaggagaggccggggaccctgtactccaaagagcccagtcttctgagactctaggggactcctacccccaaactactggccttggctcccctacacggtaccccatcgcttctggcatagtcctgggcctcagggagggcagagctgcgcacccatcctccaggcaggctgtgcagtcaggccatgggctctggggtatcccccactggtcccattaagatttgcccctggctccaccgaaaaccccgtcttcccctaagttgtccttgtctctggccctgggtttcaggaactcattcttggtaaggaagcctccccactgaggtaccagctaaaggggcaaggaaagggcccctgtgtcagtgtcagtttttccggggagtgagggcaaagctagaaaccaggttaggcgacggtgccccagcactggaatgcctcaggctgggctgtccacgcctggaagtttctcccagcacaggagccgagggtggaaggccctgggtgggagacctgtactaggttcctgccatgggtagtagagagggaaagttcagagtgagaacccctatgacgaggaaccgcggtgaagaaatgaaggggatcagggaggtgaaaaggatcaactagaaggggaagaagggtgaggggctattctggagggagggtaggcgggcaaggaggggtgaagggggagctgaggggagtcaggacatttcctgaagaggaagctagacggaaagaaaggccagtgaggagagagggagcaggtggaggccacccgagagcacgggcctgagaccagatgcccctttcctctagactcatgactgtccacggggacgcaactggcgaagtgtgagggacccaggttgataagggcaggaagaggagcagcaggaagggtgtgtggtaagtctggggtggatggtagaagaggtgggggcccagggctgctgttagggacatgctgtctagaagccgacttgggttcatgggcgagtccaggcctcagggagactggggacacacaccctgggcacttcttcctgacttaaccaaagcctcttgaacacattcacgacagaggttctgaagatgaaagggaactgtgatttcactgcatctgacggaaactcagaacccctgccctgtc

SEQ ID NO: 30010 - DNA, 1282 bp, Artificial sequence
  DNA replication origin
gccagactcaagagctctatatcaagcttatccaacccgtggcccacgcagcccaacgcaaatttataaactttcttaaaatactatgagatgttttttgagacttttttttaaagcttattagctatcgttagtgttagtgtagtctatgtgtggcccaagacaattcttccaatgtggcccagggaagccaaaagattggcacccctgctctatgtactgtatgattttatttatacgtcattctggaaaaagctaagttacagagacagaaaacatcagaagttgtcagggactggggttgggaagggagctggttgcatgagggaatttttgggggtgttgaaaatggtctatatcttaattgtagtgatggttacatgaaagtatgtgtttctcaaaactgtacaacagagtgaattttaacttatgcaaacccgcccatcttggttgctaagagtctctatggcacaggggtaaactggtggaacgccactccacgcggtgactgggggaacctggggatgcatgtagagtgtgacggtgactggggaacctggggatgcatgtagagtgtgacggtgactgggggaacctggggatgcatgtagagtgtgacggtgactggggaacctggggatgcatgtagagtgtgacggtgacgggggaacctggggatgcatctagagtgtgacggtgactgggaaacctggggatgcacgtagagtgtgatggtgactgggggaacctggggatgcatgtagagtgtgacggtgactgggaaacctggggatgcacgtagagtgtgcggtgacgggggaacctggggaggcacgtagagtgtgacggtgacgggggaacctggggatgcacgtagagtgtgacggtgactggggaacctggggatgcatgtagagtgtgacggtgactggggaaacctggggatgcatgtagagtgtgacggtgactggggaacctggggatgcatatagagtgtgacggtgactgggggaacctggggatgcatgtagagtgtgacggtgactggggaacctggggatgcatgtagagtgtgacggtgactgggaaacctgaggatgcacgtagagtgtgacggtgacgggggaacctggggatgcacgcagagtgtgacggtgactgggaaacctggggatgcatctagagtgtgacggtgactgggaaacctggggatgcatctagagtgtgacggtgactgggaaacctggggatgcatgtagagtgtgacggtgacgggggggaa

SEQ ID NO: 30011 - DNA, 1242 bp, Artificial sequence
  DNA replication origin
ataaagaacatgccgttgcaaacggaagagcaacgtgcccgaatctaggtgacaggaagggcttaggccttttcggcacgaatggagccttccagtcaacatgcttctacgtgatgcagctttatagcgcaaaaaaatgacaatgcaaggggtacaaacagccctgctagaccaacagcccgagcctcgacagtctacatccggcgccttcaagcccccaaccacacactgcgaagtgggaaaagttcccagcgcggcttggcgaacccgctaacacggcgctctcacgagctgctggaaaagaccttcgcgagagggcgcagggagtcccgctccctggagggcccgcccccttggaggggaccggaagcgcttgtcctggcccggaagcagtgctgactccgtacacgcgcgctgcggcatggcggcccaccgccccggcccgctcaagcagcagaataaagctcataaaggcggacggcatcggggtcggggatctgcacagcgggacggcaagggtaaggagataacgtagaaggaataagggctatttggccgttattaactctttttcctcatgcccagactgagcttctgtctcccgtctgggctccacgcgaaaggccctttctaaggtgggcggagaggagtcccttttcttgaccttgtggggccgatcacaccagccccttctaatctgccattcaggccgtctggcactgaaaaccctaagcaagaaggtgagaaaagaactcagcagagtcgaccagaggcatcgcgccagccagctccgaaagcagaagaaggaggcggtgagaggagcgggatttgggagaatgcggcttctctggtgttctaggtggctaatgcctcgaagtggaaaatgagaccgggaggagggtccagggacagagcatagccctagagcacgtgtcgagcgtgcaggtctagcattctttgctttggtcagaattcctgccaccccgctggcatacctgtggtcttttactagagagatgctggttttgggtagggggagcatctgtgggagtggaaatgcaatgctggagtgaagtactgagacactgagatgttctcggatatctttctattttcaggttctggcagagaagagacagctgggtggcaaggatggccctcctcatcaggtactggtggtgcccctgcacagcagaatttccctgccagaggccatgcagctgcttcaagatagggacactg

SEQ ID NO: 30012 - DNA, 937 bp, Artificial sequence
  DNA replication origin
tcccacagccggaggggggttgcgcacagcgacgggggatcggggcggggagaggccgtgcgcgcctaggggcggcagacccgggcgcgcgccacgggggtcgctgtcatggcaacgcacccgctcccgcatggagggcgcgaagccgcattgtgagcgctggccctggagcccgcggccccgcggctgagagcgagcctcggtcccgctgaagctcccctgacttctgcctgctccctctcccgacgggacggaaagggccggggctcgggcatggggtcccctgcggtccgagcctgcccacggcgaagccggtgcagcctggccccgtgacccctctgaatccccgtccggccgtcgccgtgcagttgtcaagtttctgggaagattagtgggagcgcagccgcccgagcccgacggccggagggtcgcggccagtcccccttgccgggtcgccacgtcccacaaggtccttcccggccgctccgtgggaggcggggcgcaggttggagtaacagggacgggcttgagctggtacggaaccgggcaaggtgagagaagtgtcttccacgcgattcccaagcctcgctagggaatcgagggagaagaaaggttgctcagagtgataaagaacatgccgttgcaaacggaagagcaacgtgcccgaatctaggtgacaggaagggcttaggccttttcggcacgaatggagccttccagtcaacatgcttctacgtgatgcagctttatagcgcaaaaaaatgacaatgcaaggggtacaaacagccctgctagaccaacagcccgagcctcgacagtctacatccggcgccttcaagcccccaaccacacactgcgaagtgggaaaagttcccagcgcggcttggcgaacccgctaacacggcgctctcacgagctgctggaaaagaccttcgcg

SEQ ID NO: 30013 - DNA, 1173 bp, Artificial sequence
  DNA replication origin
ctgaggaccgctcggcgccgcctcctgccacaccatgggcagcgcagaggacgcagtcaaagagaaactgctgtggaacgtgaagaaggaggtaaagtcgagtcaagaaccccggggggctcgcgccctggcccgcgcggcccagggggcagaaaggtccgcgcccaccccccggcgcgggcacccgggccgaacctgggccgggcggggcgggtcctggacgggctgcgcctccttcccctttctcggatgggggagggcagcgcccctctgcccgggggacccggccggcgctcccggcttgtttgcttcgcagccccgcagctccccgcccagtgacggcagcggcgctgggagcccaaggccgggggaggggtggcggcgatggcggggatggctggatccggagctgcccattcagtgcccgcgccgccaggggagggggcggggccccgcgcgagctcccgcggcgcaggtgggtgtcgtgcgggccgagcttccccacgtcctaagtgggtgtcgtgcgggctgagctcccccttgtccgacgtccgctgtgcctccagctacggagtgatcgctgccggaggggtgcgccgcacacctcagtttctccctccacgcccacctccttagccagggaccaggggcttgtttggaatggtttttaacactcggaagtttttcccttttgagggaagcccccctacttcagaaagagaagtagtccttccctctactaactccgtttaccttgaccctgcccaaaagcccatttccatttcgggtggggggcagtgaccatgtgaatgactcactcccatatgagagctggagagctccaacccacagcgcagcttagaatacattgggcctccttcccctgcctgcctctgtggctgttgtctgcctggtaagtaaactccaccagggcaggagaccctctgttttgtccactgccttgtatccagtgcctggcatactgtaggcactccgtgactgtttggtaaataaatgtgctgattttggagacttcgaggcctggtgtttggaaagcatacattttggaatagtctggacctaattctgtgtgaccttgagtctctatgccgtctccctaatatatatatatataacctcacgcctgtaatcccagcacgttgggaggcctag

SEQ ID NO: 30014 - DNA, 2439 bp, Artificial sequence
  DNA replication origin
ctcctgggctgggctcaagcaatcctcccacctccacctcctgagtagctagaatacaggctcatgtcaccacacccagctagtttttaaattttttgtagagatggggtctccctgtgttgcctaggctggtctcaaacttctgggctcaagtgatcttcccaccttggcctcccaaactgttgggactatagatgtgagccactgcacctgacctagagtttttttgtttgttttttagtagagacggggtttcactatgttacccaggatagtctcaatctcctgacctcgtgacccacccgcctcggcctcccaaagtgctgggattacaggcgtgagccaccgcgcccagccaagttttttatactaataaaaaagattgtattctttgttcacacctccctttttgtaattaaaaggtgtcatgcaattataccattctgcatcttgctgttggcgagctttccattattcattcctagagagcatcctcattctttttcagagttgcatgatattctgctagagatgtaccatatttacttcacctgtcccctattgatgggcatgtggatgacttccagtcttttgctgttataactaaataatcacgcagttatatctgtaggacggattctcagaagaggggttactggatcagaggttatttgcagcattagtggagagggccatattgcgtctatacgggttgcagcatcttgcctacctaccagcaatatatgaatggattcagcagctccccacgtcccttccatctgtgtcttcctggcgtctcctctactctaaattgggtctcttggaatggtgaaatcagtgtgtaagggttgggggcagggaccctatatcttagaatggtggaatcggggtgtaagcgttggggaagggaccccatatcttagaatggtggaatcggggtgtaagcgttggggaagggaccccatatcttagaatggtggaatcggggtgtaagggttgggggaagggaccccatatcttagaatggtggaatcggggtgtaagggttggggaagggaccccatatcttagaatggtggaatcggggtgtaagggttgggggaagggaccccatatcttagaatggtggaatcggggtgtaagggttgggggcaggggccccatatcttagaatggtggaatcggggtgtaagggttgggggaagggaccccatatcttagaatggtggaatcggggtgtaagggttgggggcaggggccccatatcttagaatggtggaatcggggtgtaagggttgggggaaggggccccatatcttagaatggtggaatcggggtgtaagagttgggggaagggaccccatatcttagaatggtggaatcggggtgtaagggttggggcaggggccccatatcttagaatggtggaatcggggtgtaagagttgggggaagggaccccatatcttagaatggtggaatcggggtgtaagggttggggaagggaccccatatcttagaatggtggaatcggggtgtaagggttgggggaagggaccccatatcttagaatggtagaatcggggtgtaagagttgggggaagggaccccatatcttagaatggtggaatcggggtgtaagggttggggaagggaccccatatcttagaatggtggaatcggggtgtaagagttgggggaagggaccccatatcttagaatggtggaatcggggtgtaagggttggggaagggaccccatatcttagaatggtggaatcggggtgtaagggttgggggaagggaccccatatcttagaatggtggaatcggggtgtaagggttgggggaagggaccccatatcttagaatggtggaatcggggtgtaagggttggggaagggaccccatatcttagaatggtggaatcggggtgtaagggttgggggaagggaccccatatcttagaatggtagaatcggggtgtaagagttgggggaagggaccccatatcttagaatggtggaatcggggtgtaagggttggggaagggaccccatatcttagaatggtggaatcggggtgtaagagttgggggaagggaccccatatcttagaatggtggaatcggggtgtaagggttgggggaagggaccccatatcttagaatggtggaatcggggtgtaagggttggggaagggaccccatatcttagaatggtggaatcggggtgtaagagttgggggaagggaccccatatcttagaatggtggaatcggggtgtaagggttggggcaggggccccatatcttagaatggtggaatcggggtgtaagagttgggggaagggaccccatatcttagaatggtggaatcggggtgtaagggttgggggaagggaccccatatcttagaatggtggaatcggggtgtaagggtt

SEQ ID NO: 30015 - DNA, 979 bp, Artificial sequence
  DNA replication origin
gaatcggggtgtaagagttgggggaagggaccccatatcttagaatggtggaatcggggtgtaagggttgggggaagggaccccatatcttagaatggtggaatcggggtgtaagggttgggggcaggggccccatatcttaaaatggtggaatcggggtgtaagggttgggggaagggaccccatatcttaaaatggtggaatcggggtgtaagggttgggggaagggaccccatatcttaaaatggtggaatcggggtgtaagggttgggggaagggaccccatatcttaaaatggtggaatcggggtgtaaggattggggaagggaccccatatcttaaaatggtggaatcggggtgtaagggttgggggaagggaccccatatcttaaaatggtggaatcggggtgtaaggattggggaagggaccccatatcttaaaatggtggaatcggggtgtaagggttgggggaagggaccccatatcttaaaatggtggaatcggggtgtaaggattggggaagggaccccatatcttaaaatggtggaatcggggtgtaaggattggggaagggatcccatatcttagaatggtggaatcggggtgtaagggttgggggaagggaccccatatcttagaatggtggaattggggtgtaagggttagggaagggaccccatatcttagaatggtggaattggggtgtaagggttggggtgcccataggattccatcagcatctgtggtctccagccgtgtgtagcatttgttaggctgcagaacttgatggctttgaggtcacatcggggctggtgaagggagccccagggctagtctgggtctgtagttcctggcctttccctgggaagatggctccagacctttgtaggggtgtccaacagtgtgctggagttaaatgcagttatgctcctgcccactcagagttgcagttccttgagccttgctgtcagcaggatg

SEQ ID NO: 30016 - DNA, 1527 bp, Artificial sequence
  DNA replication origin
ggctgggcacagaggcccactatccaatgtgacagagaagaacaggcccagttgcagcctcagaagatgactccttagacacagctacgctgccagcgacagggcctgcccagccagcccaggcggtctgaatcagaactcaagaccctcgagagcttccacggcccacgtggggcagggcactgcttaagggggactctggcaggtccagggagccacagacatgaagcaaagtgagagaggaagtggaagcactggggggtgatgccgggagggagggagagagtggagaagagttcggaagaacagggatggagagccgtgtgtgctgagggagtcctgtcagcagcagtttgctcggctggctcagcctgggccggggcccactgtggcctgccgcaggcgtgggcctggctttggtgggagctggactccagctctgggtgtgccttggtgaggagggctgagctgagccccttccggttccctcagcggttgccctgccttggccggggctctcttcccagacccacggccgggagttttgcagatatctggcccttcagctccaccaggaggcaaattaagggaacacgcgtggtgaggaggggctgcggctctgggagtgagggcgttgcaagccatgcctgagactctgggaagaaggggagggtgcaggtgcagtggggcaggagcccagctcaggcccctgcagcaggcaggagagaagaggacagtcccgggaggagccggggtgggaagaggcccagccaggcaggcagcaggcaacaggcgggcaggcagggagggcaacaggggtgagggcgggggtgggcaaagggaaccaagctcatgcccagaaaggaggcccagccaaggtctcctgggccaatgctcttcaccttaatcctccaggaaggagctgaaccagccacattcgaacactgtctctgagcgagcccagtgcagatagctggggctatggcgtgactgggtgagggcacaggctggacggggggaggggggtctgctgggtcagctttgactctgactctctcctctgagcatgaggaaagtgtaaagcaagaaaacagggtgggcgaaccccacagcccctaagactccgagtgaaaggtgcctggcctggagcagaattagagtgaatagcatctgctctgtggggaggcagcaggaaaaggaaggggagaggaagagggagggagaggaaatttggacaccccgccactgattcacatgcacaagtcaagcatgttgcaggcctgaaaagcaacagctggcagaacggactcaacagtgttgtcattatggactggagtggaggtggggggcccccattccccagccctctccccaaccgcctgctgattctgctcttatgcctcctctcctttcccaagtattaggggcccagaagctctatactaggttggcctagcccctgagttccttgagaggatgcacagatgagccctgaggcctctggacccctggaagtgggtctggaag

SEQ ID NO: 30017 - DNA, 2364 bp, Artificial sequence
  DNA replication origin
gcccctcctcaccacgcgtgttcccttaatttgcctcctggtggagctgaagggccagatatctgcaaaactcccggccgtgggtctgggaagagagccccggccaaggcagggcaaccgctgagggaaccggaaggggctcagctcagccctcctcaccaaggcacacccagagctggagtccagctcccaccaaagccaggcccacgcctgcggcaggccacagtgggccccggcccaggctgagccagccgagcaaactgctgctgacaggactccctcagcacacacggctctccatccctgttcttccgaactcttctccactctctccctccctcccggcatcaccccccagtgcttccacttcctctctcactttgcttcatgtctgtggctccctggacctgccagagtcccccttaagcagtgccctgccccacgtgggccgtggaagctctcgagggtcttgagttctgattcagaccgcctgggctggctgggcaggccctgtcgctggcagcgtagctgtgtctaaggagtcatcttctgaggctgcaactgggcctgttcttctctgtcacattggatagtgggcctctgtgcccagccaccactcccggccccgcagtggcctcgtagtcctgggacctgtgacttccatccagctccctggtgttttcgggaggccaccatgctaactgctgtcaggctaggcagggatggagcagagctcagaaaggggccataggagctgacagcaggggtacctggcctgggcacggggcactgctcatccgtagccactggccaccagatctagactcccccagaagagccaggcctacgggcaggtgactcagattcctcgggggctttgaacagtggggactccctggaggggagcgttcagagttggaagtattccaaagacctccttgagcatctcagagtttgccaagaggaccgagctgaatccgtgaaggctgagctagctggtggctttgaggagctcaggtctttgttccttctctttctttcccttccctctagaaaagcaagtgcttgctggtcgcaggatagagctaggcacaatcatccaagactcagtccaagcattttaccacatgcagaaggacgccttgcgcccctctccaggcttgctggaggctaggaagtgtcaggcgccctctctccctaccgtttccatctctgggctctggaccaggcaggccccacctctgtgattttccacccatgggtgacttgatgctgcagctctgggcacagaggtgggcatggtgcagggtgcctgggagagaaggtgtctcaggccctgaccatgccacccttcctgcccgcagacgctggtgacatgatcgagatgcagggctttgggcccagcctgccagcctggcacctggagcccctgtgcagtcagggctcctcctgcctctcctgctcctccagcagctccccacatgcaacccccagccactgtagctgcatccccgaccggtgagtgggcagcgctcggccccagcttcccgttagcgtgtccagccacgtgtgtgtccgtctgtccttaaaggccgtgtcacctgcacgacagggtggcctctagagtgggacagatctgggttcaaatttcacttttgctacccacgtgacttacaagttatggaattaccatgagcctctacgtttctgaacctcagtttcctcatctgtaaaatggggatgatgccacttgctgcctgcagtacttatgaggacagaatgagagagaacccaagtgaaggtccggagttgtgccggcacatcatgggctcagtgcccgtgagctccccttcccgatgtgcacacagaccctgctgacaggccgtccacctgaggacactcagcagccacctgccgtgtgccagggcagtgagtgaatggcttttatgggaggtgttctcttttacctttacttcgtcttccgtttattaatcctgatgatcctccgctgcctctctccatttttcacatgaggaaacgaagattcatgtaggtgaagttcgttgaccaagatccctgggtggttgggggccaggcgggggccccacagcactctgtccaggtggcaggcagggacagggcacccactgacggctgctgggctgcggctcctcctcctcgcaccctccccagtgccttacctgccccccaggacagagcctcctcccttctctctctcctcccaccagaggggccgcagcccctccctgctgagcccggttgttgccacaggttgccgctcaggctactgtgtgagagtatgaagaggcagatcgtgtcccgggccttctacggctgtgagtg

SEQ ID NO: 30018 - DNA, 1905 bp, Artificial sequence
  DNA replication origin
tccaggtggcaggcagggacagggcacccactgacggctgctgggctgcggctcctcctcctcgcaccctccccagtgccttacctgccccccaggacagagcctcctcccttctctctctcctcccaccagaggggccgcagcccctccctgctgagcccggttgttgccacaggttgccgctcaggctactgtgtgagagtatgaagaggcagatcgtgtcccgggccttctacggctgtgagtgtggggcgcgccgggctgtggcgggctgggggcgggcggccctgggtcccagcctcctgctgcccaccgctgcccaccgcagggctggcacactgccgccacctgtccacggtgcggacccacctgtcggcgctggtgcaccatagcgttatcccacctgaccggcccccgggggcctccgcgggcctcaccaaggacgtgtggagcaagtatcagaaggacaaaaaggtgccaaccctggggttccagggccacaggtcgaggggctggggcgggcaggagtgagggcttcagggtaaaatgtgccagtgggtgcggttgacaggccagggccgatgccacggagtgaccagggtcccggcagaatctcttgcagctgggcctggggctgacacgggaagggggctggactgggaagccgtcctgcctccacatcgccctgtgaccctggacaaagctttgcctctctccgggcgccatttcctgccccttaaggaaggagagcagaacgagatctcatcccactgtgagctggggcacgggaggacgtggccaccccaaagcaggccttgcctgggcttcagcagtcactacaggccccgccccagcccattctccgtgggatggggctcacccagctgggccacggtgactgtggaggctgcacagtcttgactccccgggtccctcagaactacaaagagctggagctgctgcggcaagtttactacggaggcatagagcacgagatccgcaaggacgtctggccctttctgcttggccactacaagttcggcatgagcaagaaggagatggagcaggtgaggggagcctgttcccatggggctgatgagatggggagctgggccaggggacgccagggaggggaccttggaagcctcagccccttcccagccggaaagaagcatggcagggcagctccaccgtccttaccctgaggcccgtcttgagtctgagactcaggacccaaggtccagtgcaggcccagctcctgaaggggagggcctggtgcacgcttcccccatggtcgtggtgtggtctgagtacaggtggacgcagtggtggcagcaaggtaccagcaggtgttggcagagtggaaggcctgcgaggtggtggtgaggcagcgggagcgggaggcccacccagccacacgcaccaagttctcctcaggcagcagcatcgacagccacgtgcagcgcctcatccaccgagactccaccatcagcaacgatgtgagccagacgggacctggagggttgggggtctcgggggccacccgcgttttatgcacagtggtcctgagcaccagcctgacctctgggaactggtggggccctgcgagaaaggcctaaggtgcctgtgtctcattttctccaactggaaatggctaactgtgcctctgctgcctacttctctgggtattgtaggaataaagtgagagagtgcattgtgctcagttttagccaactatagggaaagatggacttactgggatttagggaagccctcctccttgtagaaagacctcaaagctagcaacaggcagcgctgggttctagtcccagatccactactgacaagctgaatgtctctgggcaagcacttcccgtctctgggtctcagtttcccctctccacc

SEQ ID NO: 30019 - DNA, 890 bp, Artificial sequence
  DNA replication origin
cacctctgcacatccttgtctatgcggtgcaggtttaaggccacagtgtccagtaattctatctggaagagtggagggccctcaggcatgagaccgggcagcccttcccaggctgggggcaggaggtgacgccccaagaaatgcagcaaaacggaacccagagaccagagcgagtcctgtggggatgctgagaaatgggctcagaactcccttccagggcagtcagggcgccccgccttccaccccaccagcgcttccccagctctgggatgtcaggagggcctctggggcggctgggaacagcctggggagcatgtacgcacagtgtaggcagccgcacacacagccgcaagctcctctccggcctccagttctccggcctgaggcttctcctggctgggatcctggggctccctcaaagtgtgagctgcagggccgggcccactggagccttcctccccaccgccgtcctcctcttcgaagcccacgctctgcccctcatctaggcttgactggatgcccgaggccacggagtaattgcgagaggagggcagtcctgagtctggagagtcgaactccacggaatgctgctgctccaccacggcggtgcccggagtcccgggtcctgcttcctgctcaggttttggtctggaatcttcagggtcctggggctccgggggttccagatcatccactgagataaacacctggggggtgaacacagggcggctccacctgcactccagcaccttcccgcagcccaccgcctcctcgggccagaagggagctggaatgcaaaactcttcacaccccctctcccaccacagcctccaacactgtggccacggggcaccaagccagcttctgacccagccagccaggcggagaga

SEQ ID NO: 30020 - DNA, 1021 bp, Artificial sequence
  DNA replication origin
cgtcctcaagccagcttgagtgtgctgactgggaaggagggcatggtgaccatggtcacagggttgagcacggtctggcccaccagctgggggtggtgcaccacctgagcccccacggccggctttgccatgacagtagccgggggccccaggccggccgtgccgttgacttgctggtgcgagagggtgtgggcgatgtggctcactgccacgggctgcgggtacaagggcagctgggagcccaggtgggccacatggttgagggtggcagggtgcacagtgatgtgcccaatggggggtgtggcaggcgccagttgcaccgcagggctgggggccgagggggcgatgtgggcgatgtgcttgccgcctggcccctgcagaacgtggttcacagtctggatgactgaagcgtgagtggtggctgtgtgggcgatgaccgtggagccacccccagccgtcgccaccagatgggctggagctggcaccagtgtctgggcaggggcagccggtgggggaggaggggctggcagaggggtcttctgctgtggctgctgctgctgcacggggaggtgggcaggaggtagggccacggagtgggggtgagggtgtgggtgtggaggcagaggcgcaggggtggtgctggggggtggcagggtggacttcagcagctccggctggggacgatggctcagcttaggtgggcccaggcccgcccggtcctcctccatatcctcgtctatgttgtcctcaccctctgtggggaacatggggcagggagcaggtcagaagggcggggaagcaagtggctggaggcgtagatgctcgtgggggcgtgggaatgtgatggggctggggccagggccatcttttctagcaggcaagaaagagcctggccagggaggctggaatttgaggtgtaacatctgagggctggggggccagcgtgggggctggggctcaccagaggcggtggaggtggaggcctggtcatcctcgggctggcccgtctgccgcagcacgc

SEQ ID NO: 30021 - DNA, 857 bp, Artificial sequence
  DNA replication origin
ggaggtaggggctgagatgtggtcttggagcacgggcagataagatctagggggtaaagggaggaggatctgtgtgtgatgagggcagacggggttcagagaggaaaaccaaggcgggctggtgagttgtgtgtgtgaaaagcctgcgggccctgcacctggacatgaccagtaagcctgggaagctaggagctcgagagcaggccaagaaagggactcgggaggcagcaaggacacgtgtcggcgttgcctggtggacacattggtcatgacgtgcctgggcgaaaagctgccagcagggaggtctgtgagacttgaaagggtgggattgatgaagtgtcgggttggagcacgggaaagactgagtgtggaggggagctgggtcatgggacgcaacagccatttctcatggatcggtttagcccaagtacagggggcacgttcctaggcttgggggttgttcagcccagggagtctggaggggagtgggcagggtgatggggagcagcatgtaaatggagcctcgtcgagaagcgtcacaggcgggcacagtggagagtcgcctagggggtcggggagcaggtgcagaccagcagccaggagggaggcgagtcctggagatgagatggggcgagggcgtgtcactgcctagtggctcatcgtgcaaggatgttgatgttaccagggagacaagtgaacggtgaggtggaagcgcaggatcaggttccttagagggtagctcgcggcagaagtgtgcaaagtgaagaggctgctggaggagggatggggcgagaggcggagaagcccctgaggatgaattgtggaggacagggaaggacctgcacacctggttgagc

SEQ ID NO: 30022 - DNA, 954 bp, Artificial sequence
  DNA replication origin
tggaggggagtgagagatacagggagagaaggggacagaggcaagaaaaggtgttgatcaagaaaggcaagaaccaggggtgagggctgacagagaatcaaagataaaacactagtaggccgggcgcggtggctcatgcctgtaatcccagcactttcggaagccaaggcgggcagatcacctgaggtcgggaattcgagaccagcctgaccaacatggagaaaccctgtctctactacaaatataaaattagccgggtgtggtggcacatgcctgtaatcccagctgctcaggaggctgaggcaggagaatcgcttgaacctgggaggcagagattgcagtgagccaagatcatgccactgcactccagcctgggcaacaagagcgaaactctgttggaaaaaaacaaacagtaaaaaaaaaaaattgagggagagtgggggaggggaatataaccaaaacccaccccaaatccaaaccagcctcgaaaaaaacggtgcggtgcctggaagggcttggaggcaggaggatgtggcagacagaaggacagtgggggaggtaggggctgagatgtggtcttggagcacgggcagataagatctagggggtaaagggaggaggatctgtgtgtgatgagggcagacggggttcagagaggaaaaccaaggcgggctggtgagttgtgtgtgtgaaaagcctgcgggccctgcacctggacatgaccagtaagcctgggaagctaggagctcgagagcaggccaagaaagggactcgggaggcagcaaggacacgtgtcggcgttgcctggtggacacattggtcatgacgtgcctgggcgaaaagctgccagcagggaggtctgtgagacttgaaagggtgggattgatgaagtgtcgggttggagcacgggaaagactgagtgtggaggggagctgggtcatgggacgcaacagc

SEQ ID NO: 30023 - DNA, 1772 bp, Artificial sequence
  DNA replication origin
tctccctgtccatcctctgaggaagctccgggggcggcgcggcgtcacgggccccgtgggaggggtggcgaggagggtccagcgcgcgaggagccagccgctgggcgccgcccctcccccggcctcgaccgcggggtcacagccctgaggtaaccggagcctgacttgctgagggaggggctgaggcgctgcttcgcgactgctccaggggggcagctctctcccagcctcccgccaacgcgcccttccgcccgccctcccggccagggggcggggctggcgcgcctccaggccgcttccgggcagccgggaggggcggggccgggctcgcggattggctgcagcgggcgggggcggtgctctcgagtcgcggagggcggtgcagccggcgagggtgacgcagggaagccgcggccgcgtgggtgcgcgcgtgcttcggggtggggcctcggggcgccgagcgggagagggctccggaggccgcggcaggccggtggcttatttctggaatcgttttgcagaacctgggcttggttgtagtttagtcgcagggctggctgagggtgttcatgcagacacttcgctgcactcccgacatttgcttagctattatttttgagaaataggaaggacggcatggcgagttcctctttgcagatactacttgcagagggcgccttgcgtaacgtgtgggtttggaaatgaatcggaagaagactcagcagcagccgcagaaggaagctcttgaggagctgggcccggtgaagtaggagccggggtaggcctcactcaggctgtgcagaagggacacccattctggtgctggtcacagaagcaggaacctcaaaggcctgtctacaaaccatttattcatttattcattgaggtgcttttagcgaagtctctgcttctgggcgaatggtggcgagcaagtaaaaaagcctgggtcttgtggcagatgacgaacaagtcattctacagaaggcggccgtatgggcataatagggaccgggcggcgggatctgttctggggagggaggatagctgttcctgaggaaaggacctttgagctgagacctgcaggataagtctgggtggcacggagcaaagtggaggccaagagcccaggggcagcccagtttctccagcaggagggaacaggatgctttttggaaataaaagtgaggcacggtggcttgcacctgagtcccagctacgctactcgggaggccaaggcagtaagagcgcttgagcccagggagttcgaggacagcctgggccacagagtgcgacctccgtctctaagaacaaacacaaacatggtcaggaggctgtcactcagagacaggcagaatcaagagctggtcctggagagaccagtggggctgtgtagactgggagctttggttgtttgctgagagcaggaagctgcaggaagaaggcagtggtccccagccagaatacggagtggcttggaggtggtcaaaggtttgaagacagccacagtaaagtggacagagacaagaaaaataggtaccaaaccgtgcatccaggtagtcacagaaaggaaatgggtttagattgaagcaatgtgggttaaagttagaccctggggaaaccttgcaggggtctgtaggcctgtgaagaactggactaggtgagaagaagaagcttttgacccatgtcactccctggcccagaactatatcctacccacaggtgggttgagttcaggactgctgcttccagcccccagcagcaaggttcaagtg

SEQ ID NO: 30024 - DNA, 1937 bp, Artificial sequence
  DNA replication origin
tcacggcgcgcgcctcacggccccggggacgccgaggctgcaggggctcgggagcggcgcgggaggggagccgcgccctcctctgcgcacgcgcgccctcccgggcagggagccccgctgacgtcagccgggccatgtgctcagcgcccgcgtggaggtgggagggaggcgcgggggagccgccggggcgtgagggcggggcggggcgcggccgggggaggggcggcggagggagggcgggggaagctgcgcgacgccggcctccgggccccatacctggatgtaccgcagcgccgtccgcagcacgctcagattggacgtcttcttgtcatccacgttggggatgttccgcttcagggtctcaaagcactctttcagatgggccctcctgaagagaggggcgagcgccggtcagcggtgcctggggcggggctgggacggggggaggcaggaccggggaagctggggccgagggccgccggggcccgggtcgcgcgcgcacgcacgcacgcacacacacacacacacacacacacacctgttcttctccaatttgttgtggacttctctggttccgatcctgaaacccagacagataggaggctcagggaggaggactcgattagacggccttcctgaccagcgccgccacccgcaaaattgccacaggctgtttgtccccaacactgtcttaaagcagactgggagacgttcgccctgtgccatgctgcgcccaccccctggaggacacatctgtgctcataatcacaactcctgtcaccctccgtcccaccaggagggagacaggaggactcctgggactcagaggcagccggttgaccccagccctcacccaagaggcccatactctgtccagaggcctgggaatgccataagcctcagccttggactgcgttaggaaacacagaagcctgggaacggggggcaatgggacattccttcccaggatagacatgggcacagtgatgacgtgttcaaatacagggggcacttctaagctggggagggcaccttgtcttgcacacagcccgggggatgggcacctctcctatcccccaccagcccgaccccgccacaccccactcaccccccgggcctcttcttctgttcactggatttgacttcttcagctggtgccaacttcagggtccccagcgtgggtgggggcggctgctggggggccagctgaggctggactccagggtgtggcgctatggtcaggacaggcgtggggaggggctgcaaaggcttggggctgccattgggtggaatggtggccttcgagtccggcagtaggggagcaggggtgggcacctgcggcctgctgggcaggggggcaggctccttaatgctgagtccgggggcgccaaccagggccggctgacgaggcgccaggggcagaggctgggctgccgcgggcaagggtgggggtgggggtagaggctgaggggagttggtcaccacagggatagggatgacagtcagtggggcaggggtggcaagtggtggtgggggtgccggcgggggagccggtggagacagaggcaggggtggcgcctccatgcggggttcctccacaggaagggtatgtgccagcctggccaggctattggccttcttctgttcctgctctcgctcctgctccaagcgaagccgctcctgctcctctacacagagagaacacaagggggggagggtctcagcggggccccagaactccagccctaactcgtcctctgaccctagcccagtcagtactcagtgacacccctgctcagcgagagacaccacaaatagcctaccagcccagccaggcacgggggaaagtgccgggggcacagcagtgaacaaatcaagcagacctgttccccgccaccagggaatagtaggacagtcacgggggctgacagtcacgg

SEQ ID NO: 30025 - DNA, 1311 bp, Artificial sequence
  DNA replication origin
ccagcccctgaactccggctgctgggaaaccactgaggcttcccctcccaggacgcttccccctccgcttcctcctcggcctcttccctctgcaggagggcggggctgggagcaggcctggctcacactccagttgttgattggccaaagggcctgaggcctcaggttttctggggcgcctgagccagtaagagtgtgggaggtgggtgctctcctccccagggggccttagccgactccagtcccccacgccaccccttgcccgggtgtttggggcgtgtccacgagcccgggctgtctgctgcgttcgtcagcggagcggggcgggcgtccggggtcagaggagagggctgcttgtcccggcggctccctggcctggagtctgcagactccaagggcctgggccagccccgtagccagggaaccagaatggtggcgcctgggagaggacgaggcaagcgggagatggaggtgcctccccttcccctgttggcagccagctcctgagtgggccttgccttcctgctgggctttcagcagggatgctgagcgggtggtggggtgcactgccctgctcagcccccattgaagagcccagccccttcttgtttgggagaaatggtcgctgctgtacctcctcctcctcaactgccctctctcacccagaaccaggcaggtgcactttccccggtgcctggctggagtggttgggtatttgtattgtctcaggctgagcggggtgtcactgaggatgtcagaggatgctttaggcctgaaggacaggacatgctggcgctgctgctggtggtggggatgttggggatttggggaaaatgagttataacacgagaagggtcagagagggacgaagtgtgtttgttgaatggtccctgaggaaaacaggcattgggacctagcctcggagtcaagagtgctgggctgtttccacatgtgtgaaatgagggtgatgtccctgtcctgcccatgatgtgacgtggggctcttgtgaggatccagggactgtcagcacttccttgtgagcacggcaagcgtcctccaggggtcaggaggcttgctgtgggacctgcagcgaatcactttgctccctgagcttcactgacttcatctgtgccatgcaggcactgcctgccctctagaaagtgcttggtaaacattgttaaaggccttccacggaagctgggatctgtcagcacacccccccctctggtgtgaagtcttgggtggctgggcctctgcccgcctctcccacctcggccctgtggtcccctgaccctcgctgccctcacccgc

SEQ ID NO: 30026 - DNA, 966 bp, Artificial sequence
  DNA replication origin
caactcttctgccttgtttcgagggagttggttggagtgtccagaggctcctgaccaactctccaaggcttaccctgggcctgccttaggcaccaagcctcctgtttagcgtgcagatgggagaattcctgtggctgctggggcccaccagtgtggactcctccacccctagccctgtgcctgcagagcacctgggccacagtcacttgggaaggttgaagggagcacgctggctctgctcttgactgtgggcggaagccttggcccctgggtcactgcagaggggcatgctaaattctttgggggcagcctctgggtggagcccagggaagcatgtgagggggcgcaccctgtctggtggatgtgcagaacattcttttaaagagcctaagcgcagggtgctcctgagggagcaccagccaccaccagtttggtggttctccagtgcacagggagagggttgccgctgggtgggaagggacaggaagctccggtgggctggatctggccaggggcagctcctcttcctcaccacctgtggagctttttcatgctgctccaggtgtaactgggtccttcctggcacctgtgaggtgtaccggcgtggttctgggtgagagagggcaggtgagaaggaggttgctacctcccaggtgagctttgggattgctttaaaatatggggaatgggggttggcttgcactctagggtcccacatgtccttgtgactcagggagggccctgattgttcctctgcctataaagagtggagtccatgtctcaaggccaatgaaaagttaggtctgtgtcagccaaaggaatggaggcagggtctgtgttaggccctgggatccagagccttgtcttggggtaggggaaggggctggggacaactgaggctgtgcccgactgagaagggccctgtcactggaactcagcaggctgcttggccactgcggtctgtgg

SEQ ID NO: 30027 - DNA, 1470 bp, Artificial sequence
  DNA replication origin
ggcatcagccggggccacgctggaatgagccaggatgagaaagggcaaacttcggcgctccctcgaaagggaagagactaatgactcctatcttcacgcgccctgttggtggtccctggcttcagggtgctgcagaggggctggcgggaaagacctcccttttccagggtgctgccagggcctcggctctggaacggtgtgtgtgcaggacccggggactcctgtgccctccccgccccccagaatcccccggcagggttggttgtgttggagagtgcttcgccctcctttcctttctctctgcctattgttgcttcaatgatgagtcatgcaggaggtagtagtgtgttgtgtgcgcgcgcgccgccgtgtgccgccgccgcggcgggcgggggtgggggaaggggggagcggcagcgggcaaggggcgggggagctgcggggccggcggcctagtcggggcgaccggcctctcaaggtcaagagtcactggagatatgtgaggctcagatgcctgggttttgcagaagtgatgggcggggacatcgcccacactccccggctgttgccttgatggtccagagcagggtctggcagtggagagtgcccctggtgaccaagaatgtcctacgtttgggcacaggggtcaggggaagaccgtgcacaaggttcggagagattaagtcacctgctgccgccatcaacacgttgcagttcgagtacgcactgtgtttaggccgagttcagcggcctggtcacgacttctgtgtgccggtcagaggtctttgtagatgagtgggtgcggaaagctagatctactcaaaaactcatgtacgggtgtccggaaccgatcccagcagtttctcctccagaattcattttcttctccctcttgaggttctgtcctctgagctggggcaggacgaatggaaggaagggcatggcaggtgaacctgctgaccagaacgctttcccgggacctaggaccagctctggacagggatcctcttgtcctttctccctttcaaccgcaagcatgggtttctgacctagaccagccagtttgctcacatgaggaccccgcagatgtgtgtgcctgtgagagagaggggaaagggcagagctatcctggtgcccagacggaaggcctggcctggtcatttctagtgttcatagaggtggctcagatgcaactcttctgccttgtttcgagggagttggttggagtgtccagaggctcctgaccaactctccaaggcttaccctgggcctgccttaggcaccaagcctcctgtttagcgtgcagatgggagaattcctgtggctgctggggcccaccagtgtggactcctccacccctagccctgtgcctgcagagcacctgggccacagtcacttgggaaggttgaagggagcacgctggctctgctcttgactgtgggcggaagccttggcccctgggtcactgca

SEQ ID NO: 30028 - DNA, 877 bp, Artificial sequence
  DNA replication origin
agccctgtcgccccccggaggtgatccctccctcctgcctgcccgccagcctgacctgtgcccggctcgcgggccgcagcctcggccccggcgcgcccccggcagctctcggcgcgatgagcatagagacgctactggaggcggcccgcttcctggaatggcaagcgcagcaacaacagagagcacgtggtgagcggccgggctgggcccctggggcactggggaaggggaagcgagtgaccccggtccccgaacccacgcgaaaccgcggacagggccccctcccgggcggcctgcggagcctggcagcgcacggctccccgcgagagccgccgcctggggaggggtgatgtgggcagtgaaattaattaatgaattcattaacatgctgcgagggacctggctcctgcgggcgccaccccggctgcgtggcacccctgtgccccttctgtggtgggctgcttttgcgtgggccagcggagccctcggtggcactgaggatgtgtgagccggggggtggggtgaggaatggtgttgcgtgggggtggcaggctcgcgtgtgcgtgcgtgtgtgcacgggggatgtgtgatgtgagcctcgggaagagcagatgaacggacgtgtacacgggcgtgtgtatagcacacgagtgggcgtgtgtgtaacggagtgggggtggggactactctacgcggagcagctcttcggcttccctggccccgtggggagggtgcggggggcgctcccggcagatctacgcgccgcttggggcggaggcggcctttgcagaatgaaatgacatcgcgtgtcttatgatcctggccagccccgcctgaccccgcctcccagagctgggctgggctgcgcgtccggggt

SEQ ID NO: 30029 - DNA, 1179 bp, Artificial sequence
  DNA replication origin
acagtgtgttaagtggtcagggttgctattcctccctggcatttttctaattgggggccctcctccagaactggcttcagagtcgtccctggggtcagggaagagtgcccccgcttcgggagagaggagcaggtggaatacggaacgaccttaggcgagtccttggccgtcacggcctcagtttccttatgtgtgaagtgagaggatttaagggcagccggcctcaaagagctaactctccgattgcacccgagctcccctaaacactcgagcccggaagacgcgggcgggcgggcgggcgacggggggtccctccctctggggagcgcggttccagccggccgcagcggaccccgcccccgcgccccgcccaccgccggtcgccaggcgcggggagggccgggcttccgccctccacgttgttgttcccgatttgggccacgccccccggtctgggctgcgggcgcttcgtgttccccgccctggccccggccccagaggaaagggtggcccatggggtggcacagtccgtatctccacccacatcgaatacgcgtggacaaagactggagttcaggggaaggaaagataaaggcctggttttaaatggaaggtggtgaaaaggaatggagaggccagggcacgactgcgggattccccttacggcatcccaccctgggttcgcccagtggccccatccgcacccgcgaatgtgacctgcagacactggccctttaaaccgaaggctggcggcgcggggtgtccatgtggagctgctccatgccgtgttgtcctgcccgcccattggctcgcggcccggtgacgtcccctaataggatgcgaacgcactgcggggggaggaacggagacaaaacgcggagccggactgccgctccgctccctccgctggttctcttgacagtctccagtcgccggcagctccgcccaggggcggatcccgggggaattgcgacagcccggcgattgcgggatttaggtcgcgagtgggtggagcgtggagacccagggtcaggccagtctctgccattcccaaggtttccctgacccggaatatcctggttggaactctgttaaatcttgaattgttcaccctaccctccctccagcaggacagatttcgtcgtgaacgacccaaacgcaccgccccggcccaacttg

SEQ ID NO: 30030 - DNA, 1433 bp, Artificial sequence
  DNA replication origin
tcggcaattagcggagagctggaacaaagaggtaagtggcttgttagaattctgcagagaacagtttgtagaacatgcttccttatattcatcattagctgaaattatggaacaaaattctatcaacattaggacctttttgttgctaaaagaaatccagacaacaggaatgggctgagtgtgggcacttgaatcaccagtgaattagaatttttcagcattcagcaccaacagaaacgagtcagtaggcctgagataagtgaaaacagaagttgccatagtaacttgcacatttaccctaaaatggcgggagtgggggtggggaaataggtcaatgtttctgcttaactagctctattccttgtctaaagcagcatcctcctccttccttacccccaccaggagcaagagggggaaagtcagatggggttttcaaaaaacgagggtggggagagaggtctaggaagagggaagagaaccaagaggatggctaaataaaaacctcgtgagtaccctgggacgaccccctggggaaagcagttgccgatcaagggcagcagtgctaagaaactgttgctgggttactacaaatcaggaattgccgttttttcctgtagcggctgaagtgcgtctaacagaacacttgggagtgcattattagcagcttggggctggggtagtggtggggaggaaggaagactctggcaggggggagtctggggccctcagcattctctgatggttgagatgggagtgcattattagcggcttggggctggggtagtggtggggagggaggaagactctggtagggggggaatctggggccctcagcattctctgatggttgagaactatgaacggggctgaaggatgccccaaaacagaggagaggaggggagggaagcttagggggttcctttgcaaaataagctggttttgttaacacagaagcagtgccctttactacgtggacctgacaaggctactcatgcaggagggcccggaggactcggtctcggagctggtgtggagtgccagggtgctttatctgctcttccacctgcagcgccgacacatgtgggaggcgggtgaagcagaaagcacttgaaaacaggtgcagttccagtttgctgcagctgttagtgtctccacggggataactcagagcattactaatgattttaaccatgtggtgtgagggccctgatattctagaaaatgacagaaaggataattcttcggggtggtgaggggtgtcaaaaaaggagaagcatctttttaaccagagactatttcaaacacaaacctctagataacttactgcactgtccaggagtctacccttcatggaagggccattcaaatggcactggggagtgtaattgaacccagcagcacttctagctgcagagtaggacaggctcaacctc

SEQ ID NO: 30031 - DNA, 1284 bp, Artificial sequence
  DNA replication origin
cccccacctccctcccggacggggcggctggccaggtggagggctgaccccccacctccctcccggatggggcggctggccaggcggggggctgacccccccacctccctcccggacggggcggctggccgggcggggggctgatccccccacctccctcccggactgggcggctggccgggcggggggctgaccccccctcccccctcccggacggggcggctggccgggcagaggggctcctcacttcccagtaggggcggccgggcagaggcgcccctcacctcccggactgggcggctggccgggcggggggctgaccccccccacctccctcctggacggggcgactggccaggcagaggggctcctcacttcccagtaggggcggccgggcagaggagcccctcacctcccggacggggcggctggccgggcggggggctgaccccccccacctccctcccggacggggtggctgccgggcggagacgctcctcacttcccagacggggtggctgctggacggaggggctcctcacttctcagacggggcggttgccaggcagagggtttcctcacttctcagacggggcggccgggcagagacgctcctcacctcccagacagggttgcggccagcagaggcgctcctcacatcccagacagggcggcgggtcagaggtgctccccacatctcagacgatgggcggccgggcagagacgctcctcacttcctagatgggaaggcggcggggaagaggcgctcctcgcttcctagatgggacggcggccgggcagagacgctcctcactttccagactgggcagccaggcagagaggctcctcatatcccagacgatgggtggccaagcagagacgctcctcacttcccagacggggtggcggctgggcagaggctgcaatctcggcactttggggggccaaggcaggcggctgggaggtggaggctgtagcgagccgagatcacgccactgcactccagcctgggcaccactgagcactgagtgaacgagactccatccgcaatcccggcaccccgggaggccgaggctggcggatcactcacggctaggagctggagaccagcccggccaacacagcaaaaccccgtctccaccaaaaaaaaaacgagaaccagtgaggcgtagcaggctgaggcaggagaatcaggcagggaggctgcagtgagccgagatggcagcagcaccgtccagccttggctcggcatcagagggagaccgtggaaggagaccgtggagg

SEQ ID NO: 30032 - DNA, 949 bp, Artificial sequence
  DNA replication origin
cgcccggccagccgcccagtccgggagggaggtggggggatcagccccccgcccggccagccgccccgtccgggagggaggtgggggggtcagccccccgcctggccagccgccccatccgggagggaggtggggggtcagccctccacctggccagccgccccgtccgggagggaggtggggggggtcagccccccgcccggccagccgccccgtccgggagggaggtggggggatcagccccccgcctggccagccgccccgtccgggaggtgaggggcgcctctgcccggccgcccctactgggaagtgaggagcccctctgcccggccagccgccccgtccgggagggaggcgggggggtgggggtcggccagccgccctgtccgggagggaggtgggggggtcagccccccgcccggccggccgccccgtccgggaggtgaggggcgcctctgcccggccgcccctactgggaagtgaggagcccctctgcccggccacgaccccgtctgggaggtgtgcccagcggctcattggggatgggccatgatgacaatggcggttttgtggaatagaaaggcgggaagggtggggaaaaaattgagaaatcagatggttgccgggtctgtgtggatagaagtagacatgggagacttttcattttgttctgtactaagaaaaattcttctgccttgggatcctgttgatctgtgaccttatccccaaccctgtgctctctgaaacatgtgctgtgtccactcagggttaaatggattaagggcggtgcaagatgtgctttgttaaacagatgcttgaaggcagcatgctcgttaagagtcatcaccactccctaatcttaagtacccagggacacaaacactgcggaaggccgcagggtcctctgcctaggaaaaccagagacctttgttcacttgtttatctgctg

SEQ ID NO: 30033 - DNA, 1266 bp, Artificial sequence
  DNA replication origin
ttcccagacggggtggcggctgggcagaggctgcaatctcggcactttgcggggccaaggcaggcagctgggaggtggaggttgtagcgagccgcgattacgccactgcactccagcctgggcaccattgagcactgagtgaacgcaactccgtctgccatcccggcaccttgggaggccgaggctggcggatcactcgcggttaggagctggagaccagcccggccaacacagcgaaaccccgtctccaccaaaaaaatacgaaaaccagtcaggcgtggcggcgtgcgcctgcaatcgcaggcactcggcaggctgaggcaggagaatcaggcagggaggttgcagtgagccgagatggcagcagcacagttcagcttcggctcggcatcagagggagaccgtggcaagagggggagagggagagggagagggagaccgtggggagagggagagggagggggagggggagggagagggagaggatttgtcttaactggggagattagggaaggaaagatcttcctgaagaagaggtgcttgaactgtgagcccaagaatgactaagaatttgccgactgaagagagggaggaaaaaacgttacagataaaaagaataacctgcataggaggctgaggcaggagaatcgcttgaacccgggaggcagacgttgcagtgagccaagattgcgccactgcactccagcctggtgacagagggagactctgtctcaaaaaaaaaagaatagcctgcataaaggtcctgtggtcagggtagaaggacacaaagagcaagggcatgtgacttaaactgatggtgaaaagataggcaaggccaggtcatgtagtgccttgcatgtaggctgaagtgatgtttttttattttatcctaagagtaaggttttgagcaggtggacataggagaaggacatactgagatttgtgtttggaaatgatcactacgaggtggaaggagggatggtgagaacaagagtggatgcagggagaccaattaagaggctactgtaaaccaggtgcggtggtgcacacctgtagtctcagccatttgggagcccgaggtgggaggattgcttaagctcaggagttcaagtctggcctgggcaatgtagtctctaaggaaataaaagtaagtaaataaaaaggctgttctggccgggcgtggtggcttacaactataatcctagcactttgggaggctgaggtggcaggattgcttgaggccaggagttcaataccaacctggcc

SEQ ID NO: 30034 - DNA, 1228 bp, Artificial sequence
  DNA replication origin
ggggctgacccccccacctccctcccggacagggcggctgtccgggcagaggggctcctcacttcccagtaggggcggccgggcagaggcacccctcacctcccggatggggcggctggccgggctgggggctgacccccccacctccctcccggacggggtggctggctgggtggggggctgacccccccacctccctcctggatggggtggctggccgggcagaggggctcctctcttcccagtagaggcggccgggcagaggcgcccctcacctcccggtcggggcggctggccgggcggggggctgaccccctcacctccttcccggacggggcggctggccgggcagaggggctcctcacttcgcagtaggggcggccgggcagaggtgcccctcacctcctggacggggcggctggccaggcggggggctgacccccacctccctcccggacggggtggctgccgggtggagacgatcctcacttcccagacggggtggctgccgggcggaggggctcctcacttctccgacggggcggttgccaggcagagggtctcctcacttctcagacggggcggccgggcagagatgctcctcacatcccagacggggcggcagggcagaggcgctccccacatctcagatgatgggcggccgggcagagacgctcctcacttcctagatgggatggcggccgggcagagacgctcctcactttccagactgggcagccaggcagagaggctcctcacatcccagatgatgggcggccaggcagagacgctcctcacttcccagacggggtggcggctgggcagaggctgcaatctcggcactttgcggggccaaggcaggcagctgggaggtggaggttgtagcgagccgcgattacgccactgcactccagcctgggcaccattgagcactgagtgaacgcaactccgtctgccatcccggcaccttgggaggccgaggctggcggatcactcgcggttaggagctggagaccagcccggccaacacagcgaaaccccgtctccaccaaaaaaatacgaaaaccagtcaggcgtggcggcgtgcgcctgcaatcgcaggcactcggcaggctgaggcaggagaatcaggcagggaggttgcagtgagccgagatggcagcagcacagttcagcttcggctcggcatcagagggagaccgtggcaagagggggagagggagaggga

SEQ ID NO: 30035 - DNA, 907 bp, Artificial sequence
  DNA replication origin
aggaggtgaggggcacctctgcccggccgcccctactgcgaagtgaggagcccctctgcccggccagccgccccgtccgggaaggaggtgagggggtcagccccccgcccggccagccgccccgaccgggaggtgaggggcgcctctgcccggccgcctctactgggaagagaggagcccctctgcccggccagccaccccatccaggagggaggtgggggggtcagccccccacccagccagccaccccgtccgggagggaggtgggggggtcagcccccagcccggccagccgccccatccgggaggtgaggggtgcctctgcccggccgcccctactgggaagtgaggagcccctctgcccggacagccgccctgtccgggagggaggtgggggggtcagccccccgcccggccagccgccccatccgggaggtgaggggcgcctctgcccggccgcccctactgggaagtgaggagcccctctgcccggccaccaccccgtctgggtggtgtacccaacagctcattgagaatgggccatgatgacaatggcggttttgtggaatagaaaagggggaaaggtggggaaaagattgagaaatcggatggttgccgtggctgtgtagaaagaggtagacatgggagacttttcattttgttctgtactaagaaaaattcttctgccttgggatcctgttgatctgtgaccttacccccaaccctgtgctctctgaaatatgtgctgtgtccactcagggttgaatggatgaagggtggtgcaagatatgctttgttaaacagatgcttgaaggcagcatgctccttaagagtcatcaccactccctaatctcaagtacccagggacacaaacactgcggaaggccgcagggttctctgcctagga

SEQ ID NO: 30036 - DNA, 841 bp, Artificial sequence
  DNA replication origin
gctcctccgctcgctcactcgctctcccggccgccggactccgccgccgccccgccgctccagctccgtctgtcacaggagctgccccaacgccctgacgtcaccgcgccgccgccgccgccgccgccgccgccccagacccgccaggaagagggaggggcgggcgccgggagcggaggaggggctgcggcgcatgcgccgggctgggccgggccggggccgcgctgccttctagcgggcgggcggctgagcggtgccacccggccggcgggcgagtctgcgtgcgaggtgctgcttctcacgctccgcacgcttctgttaaccttgggagaggctcttttttcccagcccctcgtctgacttgcggccccttctgaactctggctctgctcacctcgctgccctgcttttgcgctcatgcggccgaccgcggcgtcccgttggcaccgtgtgtggcgggccccgggaggcgcgagaggcagcggggcccggccacctaccgcccctttctgcctccggcctccgagatgatttcccagtttgggggggaatgagggaggggagtaggctggctggcttgggaggaggagctgttgaggttaaaaggcagatggaatgctgtcattgtcttgatttgtattatagattcttaattgggaggactcgcttttggatatgattcagctattcttctccttagtcacacacagacatcagagtctctccaggtctcgaaacggatgcccaaagaaaggcctggaactgtatccctataagggatgtctgtgtgtgtttgctaaattatggattgaaatattgatgacaagagtcgtcttgggga

SEQ ID NO: 30037 - DNA, 1967 bp, Artificial sequence
  DNA replication origin
cagcagccccccaactccgctttcctccccctgcgctggagggaggccaccgagggcagcgaggggagccccgaggccgggtcaggtgcggggtccttaccttctccgtgttcagggaccttccgccttcaggagggaagcgcttgttcacacacattccccactgaatagagcgcagagcctgagcttatcccacaggaaagccgggaggcgggtggagcccccaggactcctctgagagccacctccatccccacccttatcctcagccaaaaagacctggagaatctgaaagccgaggtggcgcggcggcaccagctccaggaggccagcagaaacagggatagagccgaggagcccatggctaccgagcccgcgccagcgggggccccaggagacctgggctcccagcccccggctgccaaggacccttctccgagcgtgcagggatagagagggagccagacggacagccagccagcggccccgtcaccagggagcccgactgcgggagaagggggcgagcctgcgggcggaagaggaagcaaggccctcttcctccacgtctcaccccaccccacccccgtgtcctcctgggagcctggcctgcctgccccgcagaaggtgtttttgcgctggttcaatgaatagatgatgcagaggccccattggagacacgtgaatggcgtgtgcggccatcagttcccggctggggggcaggtgttgcttcggcccccgccgtccggccggcgtgtgcgagtgcgcccctggctgtgagtgttgaccgttcctctcccctgtacatagcccgagccagtcctgagtgggtgactcctgagtgggtgacgcgcagacgggatttctcaggtcatttgtatggtcgacatgatggctgctgctttggctgccaccacccccgggcccagcctgtctgaaagttcagggtttaggccgaaaaacccggtggggaggggtggggagccggagctctgtggcggggctggagggctggggtgcactttagtttggggcgggacgggagccgccgttgtgactggcgtggtctggctgctgctcccgaacggaggggtcggggttggcttgctgggccctcagagcccagtgggtggctctgactcggctccctactccctgcacccagctgggcgcagccttggggcctgcggtctgaatgtatccctcccctcagttttaacctgagctgccgaacgcacagtgggccgggggcgaggctgggggaagcggggcccaattacggatcccgggagttacaggtgccgacgtgatgtcgcttctctggtgcccagctcccttcctggtctgagactagctctgggggtggcgggggcccccacacgctgctcccgctccaccctgcccgtgctgctgctctgtgcctgctgtcagagccctggtgggggaggatgtggccaccctgagacccggaggagacgggcgtctgcctgggtttgcggagagccgcttatgggtgtggtccgtccagacaccttgtttcaagggggatgggcgtgagcgggcaagcagagcatccccaccgctgagcaagaactttttcttgtttttaaaccatcacgtcctcatttcacattggaataaagtgagtttttgaaacctgcggccccaggctcacctgtgtgttctgtaacccggtctgggtggatggtgagggctgacaggaatgtgactgggagaggaatagatacaaacgaggtcaagttcgaggtcacgcttacattgtcacttgagtgggaggtaagggggtggaatcacaggcactcagctggaattcaccgagctgccagtccgtcaccaggttcgcgggagtgtcgtgcaggtgaatgtcacctgtcaccaggtgcagaagaaactgtgaaggccaggtggggaggggtgctgggctgtggggccaggccctgtgcatgctg

SEQ ID NO: 30038 - DNA, 1271 bp, Artificial sequence
  DNA replication origin
ggggcccccgctggcgcgggctcggtagccatgggctcctcggctctatccctgtttctgctggcctcctggagctggtgccgccgcgccacctcggctttcagattctccaggtctttttggctgaggataagggtggggatggaggtggctctcagaggagtcctgggggctccacccgcctcccggctttcctgtgggataagctcaggctctgcgctctattcagtggggaatgtgtgtgaacaagcgcttccctcctgaaggcggaaggtccctgaacacggagaaggtaaggaccccgcacctgacccggcctcggggctcccctcgctgccctcggtggcctccctccagcgcagggggaggaaagcggagttggggggctgctgccacgccttgctgaccaaatccactccccacaggaggccacactgcttgtggccaccccggggagcccggggcctgctcctcagcccccccccgccgcaggatgggaagcgtggggagggaatgaagccgcttcttagggactggtgggaaaacgccaagatactttgtgtgaagcagaaacaccaaggtcttcactcgcggaatgcgaggatgctggggaagataagcggggcgggccgggcgcgatggctcacgcctggaatcccagcactctgagaggccgaggcgggcggatcgcaaggttaagagttcgagaccagcctggtcaacgtggtgaaaccccatctctactacaaacacaaaaatgagccgggcgaggtggcggacacctgtaatcccagctactggggaggctgaggcaggagaatcgctgaacccgggaggcggaggctgcagtgagccgggatggcgccgccgcactccagcccgggtgacagggcgagactccgactcacaaaaaacccccaaccgggagacactcgagtggggcggaggcctcacctgagaggaatgaagaggatgccgttaatgacgttcagctgctccaagacgctggccatgctgggggccgtgaactgcggggcggggaaaccagcggtgagcggggctcccgcgctcgccgggccggaggggccgctccgccccggactcaccttgaggggcgggatgttggcgctggagccgttgcggtagatctcgttcatggtgcgctgcagggccacggcctgctgggtcaggcacttgaggtactcggagctttccttggtcttctcatggtcctcgcccagctgcggggaggcgggaagggatcaggcccc

SEQ ID NO: 30039 - DNA, 3886 bp, Artificial sequence
  DNA replication origin
ggggctgcccatcctcctcctcctcccgcaggctctgtgtctggttccaggatgctgggtgctcccccaacaccgtggcctccaagcctcaggacacggggctgggggtcaagtagtgcccccaagcgggcacctctgcttctcccacatggttagagggggcctgtaccaccaccgggctcttggttcttggcctgcgctcctgccagaggctgggcacattctgacatcctgactgggagctggagccttcggggtccttctccagggcctcccaggatagctgtgctcccccagaaggactcagttgggtggaggcagaggagctgggtgggggcctgagctgctgcagcccgcaggtgaaggactgcatggagcacgcggtcctgcccgtggacggggcaacgctggcagaggtgatgcgccagcggggcatcaacatgcgctacctgggcaaggtgctggagctggtgctgcggagcccggcccgccaccagctggaccacgtctttgtgagtgctgcccggggtggggcggaacgggagctgtgggactgggatggaggccgggggcctgaccaagacctcccttctgaatccttccagaaaatcggcattggagaactcatcacccgctcggccaagcacatcttcaagacgtacttacaggtgccacccgtccgctctgcggctggccatggcctcccagggtggtgtggggcgtcgggaaagagcctgaggtggggctgagggccctcatgactcggatccaacctgcctcgcagggagtcgagctctccggcctctcagccgccatcagccacttcctgaactgcttcctgagctcctacccaaaccccgtggcccacctgcccgccgacgagctggtctccaagaagcggaataagaggaggaaaaaccggcccccgggggctgcagataacacagcctgggctgtcatgaccccccaggagctctggaagaacatctgccaggaggccaagaactactttgacttcgacctcgagtggtgcgtgcggggcaggggcggtggggtgggtgggattgggcagatgaggcggccaccacctgctcccagatggcgtctaaggcctgtggtcataggccagggagtcagagagaagagggagcagctgtggagatcactgggtgctggagggtgagggcagccgggaggctcccgggggccgggtggggcagtgttgggggcccgggctggacagcgttggggagctgggtggggcggtgttgggggggcccggcggtgcttgggctgctcaggccccctgctccctcctcagtgagaccgtggaccaggctgtggagacctacggcctgcagaagataacgctcctgcgggagatctcgctgaaaacagggatccaggtgggcatggctcacagcatccccgctgtgtccccgctgtgtccccgctgcgtccctgctgcaggctcccactcctggccagggccacaggggaagtggctttttcacggtagccgtctgtgcgcaagcgttggtgggttgggaggtgccaacccgctgaacctgggcctgaggcttcctgtggtgggggggctgccccccaggtcctgctgaaggagtacagcttcgacagtcgccacaagcccgcgttcaccgaggaggacgtgctcaacatcttccccgtggtcaagcacgtcaaccccaaggcctcggatgccttccatttcttccagagcgggcaggccaaagtgcagcagggtgtgtggccaggtggggctgggtggaggtgggggttccccatggcccgtcctgaccttgccacccctgggggtgccctgcaggcttcctgaaggagggctgtgagctcatcaatgaggccctgaacctgtttaacaacgtctacggagccatgcacgtggagacctgcgcctgcctgcgcctcctcgcccgcctccactacatcatgggcgactacgcagaggtaccctctgggctgtggcagcaaaggcctggcctcgtgttgggggatggggagtgagggggcccctgacggaggagtgggtggagtccagggagaccccaggaagtcgctggttctgcccaggccacccctggctccacccctctgtaactgtgtcccgagcgggagagctcaggagcaccctgtgctgcggtgaggtcagttctgggaggcgatggcaggggacccccccacagggcgtcagcaaggacgcctcctgagactccgtgagtgggcaggaagcatgccaccgagctcccacgtcctctgtgcccagtgcaggctgtggggttctgggtgccctgcctggccggggctggtggaggctgtggtggggttctgggtgccctgcctggccagggctgtttcagggttagcatgtcttaggatccctactccctgcaaagggactgttttttcttctgtttataaatgggtgggttgtttgtttgtttgtttgtttctgagacagggtcttgctttgtcacccaggctggagtgtagtggcgtgatatcgactccctgcagcctcaacctcctgggctcaagcgattctcccacctcagcctcccgagtagctgggattacaggcgtgagccagcacacccagctaatttttgtatttttagtagagatggggtttcatcatgttggccaggatggtctcaaactcctgacctcaagggacccacccctgctcaggctttttttttttttttgtaacatttttagtagttttaggtttgtatttgggtgtttgtggagattttgttgggtgtaagacatgggtgtgtggagctctctgtggagcgtgacctgcccttcaaggtgtggcagcagctgctgctgatccccctcccccctgctgcactgtgctgggcgcagccggaggggacaggagcctgcagagcggcaccgtgggctgctgggccggggccaggcgggctctgggtgcagtgggggttcccacgccgcggcaaccaccactgtctctccccaggccctgagtaaccagcagaaggcggtgctgatgagcgagcgggtgatgggcaccgagcaccccaacaccatccaggaatacgtgagtcgcgagtgccgcccgcgccgggggatgcgaggggctgggtccgcggccaccctgacctgtctccgccccgcccgcagatgcacctggccctgtactgcttcgccagcagccagctgtccaccgccctgagcctgctgtaccgcgcccgctacctcatgctgctggtgttcggggaagaccaccccgagatggcgctgctggacgtgagtgctggggcgggggggcggcagggacccagctccatcccaggggaccgggagctgaccagggccccccaccgcctgcccccagaacaacatcgggctggtgctgcacggggtgatggagtacgacctgtcgctgcgcttcctggagaacgcgctggccgtcagcaccaagtaccacgggcccaaggccctcaaggtggccctcaggtgaggggccgcccgtccaaacgccaaggccggcggaggcctgcggggcagccggcgggggcggggaagagacccagtgctcctgtcttcctccacccgagaaaatttctctcgacctccccctcttccctgagccctggacttgctgttcccctcggtggcttccagggagggatctacgggagaccccgggcccccgagtcaggcccccacacccagcccacttatgcccttccctcgccccgcgccgcgcctcccggcagccaccaccttgtcgcccgagtctacgagagcaaagctgagttccggtcggccctgcagcacgagaaggagggttacaccatctacaagacgcaggtgc

SEQ ID NO: 30040 - DNA, 1654 bp, Artificial sequence
  DNA replication origin
gtgctgggattacaggcgtgagccaccacgcccggccgcctttttcttcctgtcttgggagatcttggtttttctgcgttgactcatgcacaccggccaggaggtgccctatgcctgcggggtgtggagccccagctgccgggagccgtgggccagcagagctcctctccccgatgtccagctcctgctctgccctgtttcctctgctccaggtacctcctctttatgaagctggccgccttgcagctgatgcagcagaacgccagccagctggagaccccctcctccctggaaaatggtggtccttcctccttggagtccaagtctgaggatcctccaggacaggaggcgggaagtgaggaggagggtagcagcgccagcggcctggccaaggtgaaggagctggcagagaccatcgccgcagacgacggcacaggtggggctgctgcagatggccgggagagagcccgggctggccctgccagggtggcttatgacccccacctgggagaggctggcagacatctctgcaaggagctagggggcgaggcttggcgcagcccagctccaccggtggcagaggggacccgtgtctcatggagccatgtctccacagcagaccctcggagccgggaggtgatccgcaacgcgtgcaaggcggtcggctccatcagcagcaccgccttcgacattcgcttcaatcctgacatcttctcaccaggcaggtggtgggggccggccagcgcaggagccctccagggccagagcttcgctggggggcctgggcccttggggctggtgggtttgtcccccatctgagcgcttcccccgccagcgccaggcggcatttgtcttgccactgcctggctcagcctctctgctctccctcctccaggggttcgtttccctgagtcctgccaggatgaagttcgggaccagaagcagctgctgaaggacgcggctgccttcctgctctcctgccagatccctggcttggtgagggaggggctgcggggctgggtggggcttgtgtggagggtgctggtccctcatctgtctccgacttggaggcccatgaacacaggctcgcaggagtgactttttcagctttccctgagtgggcatccccgtttgacagatggggagcctgacccccagaggtcaagggcacaggccctgctgagcccaccgtgtgggctggcagctggtaatccagtcttctgagccctggatggtggcatggctgggggacggggccagagctcagtgggggctgcccatcctcctcctcctcccgcaggctctgtgtctggttccaggatgctgggtgctcccccaacaccgtggcctccaagcctcaggacacggggctgggggtcaagtagtgcccccaagcgggcacctctgcttctcccacatggttagagggggcctgtaccaccaccgggctcttggttcttggcctgcgctcctgccagaggctgggcacattctgacatcctgactgggagctggagccttcggggtccttctccagggcctcccaggatagctgtgctcccccagaaggactcagttgggtggaggcagaggagctgggtgggggcctgagctgctgcagcccgcaggtgaaggactgcatggagcacgcggt

SEQ ID NO: 30041 - DNA, 1497 bp, Artificial sequence
  DNA replication origin
ccccaagggcccaggccccccagcgaagctctggccctggagggctcctgcgctggccggcccccaccacctgcctggtgagaagatgtcaggattgaagcgaatgtcgaaggcggtgctgctgatggagccgaccgccttgcacgcgttgcggatcacctcccggctccgagggtctgctgtggagacatggctccatgagacacgggtcccctctgccaccggtggagctgggctgcgccaagcctcgccccctagctccttgcagagatgtctgccagcctctcccaggtgggggtcataagccaccctggcagggccagcccgggctctctcccggccatctgcagcagccccacctgtgccgtcgtctgcggcgatggtctctgccagctccttcaccttggccaggccgctggcgctgctaccctcctcctcacttcccgcctcctgtcctggaggatcctcagacttggactccaaggaggaaggaccaccattttccagggaggagggggtctccagctggctggcgttctgctgcatcagctgcaaggcggccagcttcataaagaggaggtacctggagcagaggaaacagggcagagcaggagctggacatcggggagaggagctctgctggcccacggctcccggcagctggggctccacaccccgcaggcatagggcacctcctggccggtgtgcatgagtcaacgcagaaaaaccaagatctcccaagacaggaagaaaaaggcggccgggcgtggtggctcacgcctgtaatcccagcactttgaggacgaggcaggcagatcacttgaggttgggagttcgagaccagcctgaccaccatggagaaaccccgtctctactaaaaatacaaaaaattagctgggcgtggtggtgcacgcctgtaataccagctattcgggaggctcagacaggagaatcacttgaacccgggaggcagaggttgcggtgagccgggatcgtgccattgcactccagcctaggcgacaagagtgaaactccgtctcagaaaaaaaaaaaaaaaggcagctgcgttctggagggtatgggaaaagaggagctccccatccaggtcagggctctcaacagtgacaggaagccactggcatttgagagttactcatgctgtgggacctctgacatggccatttccccatttcctaagcactaaacaccagcggcggggacccccggtgccccacctgcccgccccagcacggggacagtcacagccacccagacttccaagtgctccttaagagaacagtgtccgccacagccacattacccgcctggctgctcgcgagtctgcagcccgggtttctgcgctcgggagcctgacagcagggcaggtggggacgggtctccaatgactgtggctagacggagcccttcttcactctccagcgcttctcccttcaaggacccaaccccggatccacccagggcgcccgcactccctgc

SEQ ID NO: 30042 - DNA, 1244 bp, Artificial sequence
  DNA replication origin
aggtcctcatctcctagatgggtgcccaggcaggcccgtgtctgctggagggttactgagaggcgatccttggctcctcagcggaacagggggttctcctttgttccactggtgcctgggtaggaatgcaaggttttgtcacctgctccccaccctggagcatgtggattgggtgctgtcttcaaatattggatgtagctagaggtttgcagtaagtactttatttgttgccttttttgttgagcctgggcaagatagaaggtggtgggtagagctgctggtgaggacgccaccctgggtgcagccgaatgtctctgggaatgaaagggggagggagtgtgattctgccattaagggtcatttgggcaggctgtggaaaaggtttatttctcctaggccttgaagggtgagtcagtgtttgctgtacagaatgggatgtcaggggcagcacagacacagaagcacagcggtgggagggcggtgggagggctgtgggcggtaccaggcttgcatggtgtggtgtccttagacctcagcagggagcaggcaggagctgaggctgacttcaggtgggtgcctgagagcgctggcctgagaagcttggtcttgtaagcagtgggcttcctaggagggttgcaggtggcactgctgaaatagaggaaatgcctgccctagggcagtggctgcagaggccgggtcccgtgggtgggttgggagatttagggtgggtgactagatagagcaggtgccagtttgaggaggaagatgagttctgtccctgcaagacgaggcttcagtgatgcctcagggacagccacatgttgatgcctgggaggcagcggtctccttggtccaaaaggctggagagaggacaggattggccgtgtgagccacggggcaggagtgtatgggagggggtggggtcagaaacaggagaggctgggcctaggcactcccctgcagcccccctgcagcccaggaccacagctcaggagggatggaagaggatggagctggagagggaggggcaagggcactgtgtggggtcagagaagaggagaggaagaggggaactgctgctgggaagctaggtgtgttagggccggaggagaccctcgggcttggcttgaagggtggctttggtgaccctggggagagtggtttgggacatgggttcaggtgcaagccataccacagtgggccagggaacagtggctgggaggggcggctgggtgtggaagtgg

SEQ ID NO: 30043 - DNA, 1536 bp, Artificial sequence
  DNA replication origin
tgctgtttttaaggcaaaggtcgttagtgtggagtcaagctcccagcgatcccccatgggggctgtatggtggtgactgtggcagtggctgcagcttgtctcgggtggggcctgctttccctttctcctgagccccttctcttccttctgttccctccaccgtgtctcagactccagccttggggctggaatccccttcccaggccctcagtcgtcatcttcctcaggccctctttgctctgggtggcagtggaggtgcagagctactcctgtcccccagtccctccctcctccgtcgactgtcctcagttgggacttgtggtcttaacgcctcatcatctcccttcctagcttcagtgagtgcgccagggctgacttgggaatcaggatggggacagcgttcagccctctgaccctgttcccatcatagcggagttgccttggggtgagggacaggtgctggggcagtactgctgattgtctagacaaggccaaggtttgggcagaagagcagatgctcatcgccccaacctaccaggctttgtgctgatgtggctctgaatcagtgggggcaggctggatgagaggaggttggctgatttcccctctagcagagacccgaagagtcgaagtgacttgcccaaggtcacacagcgatttagctgttaagggaagtgtttggattccagctcatggccagcaagccaaggctgccgtggcctggcccagaggaagctgggacaggcgtgttggtttggatcccgtgctgagaactagggggctgacgagcgtctgttggaggatttctgtgagggagtcagtgaagccccttcctaactctgctgggggtgggggggctctgtcgggggtaaactgagtcagggaagggcacagctatttgttttggggaaactgggagcatactcgtgggcaggacatgggctcctacgtccctgggaaggtagtacagctagctaggacttacgttacagccagcccggatctattgaaagaaggaaggagccttaatgaagaccccccagctggggcccacctgagcatcagaaccaaggcttctgacctctgagatccagctctggaaggctcttcagcccccttaggaaggagctgatctaggccattgagggtcgggggcaagggttggttaccttcctgggaatacagcggcttttaggggttaagagaacaggcaggtttttcaggtccacagtggtgcgtcaggttccttctgcccaggggagggctccctggagttgaggcccagagggggaggaggaggaggctggcagctggggaaggagtctaggggcttatgggagctccgcaacaggatcttggatgggatgtggggagagcagcctgaggaactctgaactgtcctcaggccctgaacgcctgcctctggcctgggtgggacaggaaggaggcaaacaggtgcctggtctgtaggttcttccataggccgcctgcccgccccattgcctttccctgaagccctgggctcccgggacgggt

SEQ ID NO: 30044 - DNA, 1105 bp, Artificial sequence
  DNA replication origin
ggccagggccagcgggccgctgggcggggggcgccggaccagggcgggcgggttcgggactccgcggggatcgccgccttccctccgcgtcgggcccggttgtatctcgctggggccttcaccgggtcgcccccgcgctgaaggtcaccttcacagtcgcccccggctgcggcccgggtttcgcacgtgcggtcccgtggagggcagcctcggctggcaccctcggcgggcacacgcgcgcctcatcgcggggacacgtgcgcgcacacgcggtttcggggtgcgccgccgccgcagaccgaaagaatcggcggccccaccccctctgcgcccgagcatgggagctctctgagctggggtcgctccgacgtttgcgggacagcccccttcggcacctgctccgcggcggcctcccaggcatcccctgtgcgcagggctgcagccctgggagtgaagctccgctcgaggcttcccaggcttggtttgtgggaagagcacgaggtgcggggtgtgcgttgtgaggggcgtccctggttcatgccctgaggccaggctataaccgcaggtcttcaggctgtggcggagactctcaggtgtgttggcctgctcggccgacctggtgtagggggcgtctgcctttgcatggggcagagccaaactccttggcagggggaagtgtttgtgccagaacttgatcattaacctgccttattgcgaaaagtgggtcagaccagagttgctgtttttaaggcaaaggtcgttagtgtggagtcaagctcccagcgatcccccatgggggctgtatggtggtgactgtggcagtggctgcagcttgtctcgggtggggcctgctttccctttctcctgagccccttctcttccttctgttccctccaccgtgtctcagactccagccttggggctggaatccccttcccaggccctcagtcgtcatcttcctcaggccctctttgctctgggtggcagtggaggtgcagagctactcctgtcccccagtccctccctcctccgtcgactgtcctcagttgggacttgtggtcttaacgcctcatcatctcccttcctagcttcagtgagtgcgcca

SEQ ID NO: 30045 - DNA, 1526 bp, Artificial sequence
  DNA replication origin
ggcggcgatccccgcggagtcccgaacccgcccgccctggtccggcgccccccgcccagcggcccgctggccctggccccgctcaccggccgcgcccggccgccccttgcccccggcctgcgagccgtgttcccgggcgctgtcggccggggcggccgccggcaactcgtccgtcttgataaccatggtggcgggagcgggcgtccgcctcggctgtccgcgccgcccgccgcgccactaacccaagtgccctgcgcgccgcggctgctgagggaaggacggagtcaccggcccacgtggtgcgcgccgtggcctttgaccccgccgccgtttccctgccccaccctcgcgcccggcccagcccacggcggcccgcgagggacaaaacgcgccgcgcctggttccccgcccacggacgcggtgactttccagaacgtcttaaaggcaacgcactctgactcaaggcccagggaggctgggcgccctcgcggggcggggcctcggggagactccctgctgctcgctgcccgtcgggcgggcactgtgaccttgggtggagactggtctggttctgccatggctaatcctcccctctccaaggatcccctgttttctcttgcagatttgctaaatgaccgcgcagtctgtcatctgcggtgttcgcgtgaccctcagcgccctccccacccggcaggccctttcccgccgaatgggtgcggctggattattgagggagtggagggtcgcttagggcacgggcacgagaggcgagggcgagacgtggctaatggggatcaagagtcagaatggacccgccaaactttgccccgagccagaacgggctccctacccgcgtcctcgacccatgggtcctcacctccaggctggtgtcctcattttacagtggaggaggccgagaccaaggtcacacagagagcaaggggtagagccgggtctgactccatccacagccaggacgctttaactcgtatttttcacttggcaggggcttggcggggacggaacggtgaggtcagagaatgctgcagaggggacattgggaccaggtcttgcagtgagttgaagtgctccaggcagagagcgccggtgggtctttcctggccaggccgcagggggcctttgggaagcacccgaggcctataaccttcggagcgtttgtcaagctctaatgagaactggaaagcttcagcttcccgaggtgggctgggagggccttaggtagggcctcgcacaaattgcgaaggaaagccgaccttgttctggagagcacgtggtgaggaaagccagcgacttgatgtgagcatttaaacgggaggaaggaagatgagaactggtaagattcttctcggccgggcggtgcagcggctcacgcctgtaatcctagcactttgggaggccgaagccaggcggatgacttgagttcaggattcggaagtttgagaccaacctgggcaacatttcaaaacccccgtctctacaaaaaatattgtttaaaaaaagccagg

SEQ ID NO: 30046 - DNA, 1738 bp, Artificial sequence
  DNA replication origin
tctccagggccctgaggctgaggagagttgggcccctgtggccaagagcgggccatgcactccagctcccagtctcgttctgctgcacagagggttctgtgcaggcgggtggaggggtttccattatttccaggagggcgaggaggggaatttctgtgaaaactggaaccctgtatctgctacaggtgctcccccagcttgccttatttcctttcccaggcacctccagcacctcagctgagagtcagtgagtcagctgccccagcacccagaacctttcatctaggggatctccaagcacctcacaaacaattgtcattatctgtggttgctggaagagggatgggagttgggtggagctgatggggtcacttcgggagaagcaggcaggccactggaagatccctgggaccagagtgcggtgggggcccctagctggacaccctggatgcccaggagggaagggggaagggggctattgctatagagctggggggaggccaggcggacggagctatggcttttagtgggtgggtgggcagatagagtacttcaccatctctgcagaagaatcgacctaacaaagtcaccctgttcaccccaaaagtgtggtcgtgggagatgagggtctgtgcacgctcctctggaaagagactttgcccttcttcccacagtcctctgggcacctccgagagaggagtgaggccctcacacacaagacaggttctgaaagggagggggacagaataggggtgcagtgagttacacacacttgaggggggacagagatggtacaggcgcaaccacaggactagtagagagtagaggtgggggcaggcagagcaaggaccccaggccaccttcttggcccaagttggactggagagcactgtcccaagggtgccccaacctcagccatctgcatcccaggagctggacaccccagaccaggcgtggttattgctcagtggtcttgggcagtcccgagtggcgtcagctgggagagccgcacattgcttggccctgagtgcgctcgctcactggtttctacttcttgccaatttcctgctccaacaaatggagagaaagggggtgtgatctgggactcccccttcttcatggggctgtgatgggagaagagctcgtcacccctagagcttgactctgctcacctcccagacccctgcgtgacagaatgtgtggcctcagccagggtcaggacctgtcaggaaaggggtgtctgtgagggaggcaaaggcctctccctgccccacgtcctcccctcgaagcccctggaagacctcacaggcacttaggacttgatgcaggacccacacaggagggatggcacgggctggaggggtttgtgtttccttctaggctgggctgggggtgggggaataagctgcgctgaaactgtccttcctgcctttggtggtggacggggagcttgggagaaggggcgttaggaggtggggctttcccctttccacgtcgccattccccaggctagacagcagggaactgagcagcccgccactgccagattctgataggtttaggggcatccgtggagggggccaggatggggactaacctgtgctcccaccatccccccagcaaacacaaacccaaactcctatcagtagctgccacttccaagaagccaggcccttcttctttttttcgtttttgagacggagttttgctcttgttgcccaggctggagtgcagtggc

SEQ ID NO: 30047 - DNA, 1012 bp, Artificial sequence
  DNA replication origin
gcagcccgcgcccagccagcccagcgcgcccggggacccggagtaggcgccaggctggccggggtgacgcgggacggacggggagggccggccagggacgcagctcggtccccgcaggcaggtcccgggtcggagggcagccgcccctcctccaggaagcggggcgaggcggccccggctccccccaaatccccgaaccgccagccttttgtacttcccgacgtttccaaagcttcgagccctctcctcgcgcgagagttcctccgcggggccgagcgggggcaccttctctaccgagaggactcgccgtcccgatcctggcctggtcccacctgcctgtgagacaggaggggcgggggccacgcccttccccgggaaagccgacaatccttggtggggtggggagggctgggctcgcctacggaaagggacgcagagtggcattggcgccccaggccctctagctccccaccccccgcctcccccacccccgcgccgacgcccttcccgccaagccttcttcctccccaggagaggcccaggctaggggctggtccttctacccccaccctgaccctgccgataggtccttgcaggtgagcacggaacactttagaagacacgtcctcccagagcccctggtgggaaaagtgcgcctgatggaagcctaacttccatgggccctgggagaggattacagaaccgcctggttggccggacttggtctagagccgtctccagctcagctcttcccgagtcgccaccccgctgggtatgcagggactgggagctctgctggggaagggaggtgacaggcctgctgctggccaggcttctggaaggcaggagctgtcttccttctcaggaggcagccccaggcgttttcctggtcctgtttattggtgctaatgttgctcggcttcctaatcagctggctgcacccagagacaagaagaagagagccttggctgggcgcggtggctcactcctgtaatcccagcactttgggagg

SEQ ID NO: 30048 - DNA, 1586 bp, Artificial sequence
  DNA replication origin
gcgggctgcgggcgctgggccgcagcggcctgcgtgcatagaggaagagcgcggggtcgggcatggggtcggcgtcgtcgagggcgccggccccgcggtcccaggcggcccagtcccggccggggcccttggcggcggcctcgtgggcagcaggcgggcggcgggctcgcagtgcgcggcggcgtggcctgggctcggcggtggcgccggggcccgggcgcggggcctgcagtctctggcgcgccgcgtgcagctggcaggagaggtaggcggccgcctcggtgtgcttctgcagctcggtgcccagcacggtggcgcggtggctgcggcggcgcagctcctccaggaagcggcgctcctcggtgcgcaggctgcagcgcagcgcggacaccagcgcctcgcgctgcgccacctcccgccgcagctccgcgttggccgcagcacgcgcctccagctgcgactccagcgcgcggcacttgctctccagctcccgggacgccgcctctggaacggggcagaggccagaggtgacggtctccccctggcttggaacagaacctgcacggctcagagctccgtgtaacaaaacccccaggccgggcgcggggcctcatttctgcaatcccagcactttgggaggccgagatgggcagatggacttgaggtcaggagttcgagaccagcctggccaacatggtgaaacccagtctctactaaaaatacaaaaattagccgggcgtggtggtggtggtggtgggcgcctgtaatcccagctactcgggaggctgagacaggggactcgcttgaaccggggaggcggaggttgcagtgagccgagatcacgccactgctctccagcctaggtgacacaacgagattccgtctcaaaaagcaaaaacaaaaaaacaaaacaaagccccactcctccccacgtccccacctgcacgtcctaccgcgctccccctccttccccacgcgtcggctcagtggccttccttgttccgccctcgtacctactctaccctctgcttggtctctaattcttcaggtttcagcttaagtgcaaaccccttcctggccctttattcattccacagagaatttgtggagccctgactttgtgcattgtgttaggtattggagatagggcgcataataaaacggtctctgtgaagcttattgcatagtgggagagacatagtaaataatcacaaatacgtgtgaggttgcaaatgtgacatgtggaaagtcaatgctgtgactgtaactggagaatgtgacctcatcagggaagtcttcccagcagaagagacttgagctaagatctgaaggataaacaggagttaagtagtgaagacaggagagaaggatgctgcagatggagggaacagcttgtgtaaaagtccagagagcaagggactgaaagagctgccagtgtgcacaggaagggagtcagtgtccttgtttcctccatagggcattttatcacgtctttttttttttttttttttttttttgagatagagtcttgctctgtcgccaggctggagtgcaagtggtgcaatctcggctcactgcaaccttag

SEQ ID NO: 30049 - DNA, 1664 bp, Artificial sequence
  DNA replication origin
ccccctttctctctcccgccccccgcacccctccggctcgttcgccagttccggtcacgttgctgggtgtttacgcctcgagcccgcccccgaccccccttcggcgcccccgagccccccggagccccggcccgactgccccgcagcctcccagcagctgatggcgccgcagccggggcgggcgctgcagatccccgggcgcagctagcgtggggggaagagcgccgcccccacccagcccggcccggacccagggccccgccggccggtgactcccaggtcccgaaggtgaggaggccggtcggtgggcgtggggggtgtgggcgccggagcggccccaggggggagcagcgcggccaagctccagctcccccgggagggctggcgcggggctgggcaccgcagcgcgcgggaggcggacaggactcgcggcgggctgctggcagaagttgtcctccaccgcccagacccgggccctgcctggcactgccgggcgtccagagcggcccgaggtcgagccccgccacctcccgccacgcacacctttatttctgctgcctttgccctcctctctgctacctcgcttccccgtcctccttagtctccacatcccccccccaacccctgccttccctgggagtcatattggaggcataatcagggcagaacctgaagcctgaagggggtggggggctccagtttccccatacaccccattcccgtgtgactggatcctcagctttgctgaggtggagggtcctgagcgcttcagtgcagggggcagccagagttgaggggttcggcggggaggggctccggagtggagaggaccacaaggtccctggggagtgtggctccaccactggccaagcggccccaccttgcagacagagtcctagacatttgtcaaaggctgaatccttgttccaaactccagtccccaggaaagccaaggatgtggggttgagggaccagcatacttattttttaatatgtgtatttacttgccctggtgattcccagtaagactcaatccattctccctgtttcagcagcattcattgtgggcctgttccttgcaagagattcccagagacaaagccttgccctcaggaagcgtatggcttagtacagaagccaggtgcattcaggcacatgcacacacacacacacacacacacacacacacacaaacacgatgaagacttatggctttgcacggaagccaggtgcgtgcaggcatgcgtgcacacacacacacacacagaacaaagagtgataatatggcagactgtggtgctagctgccacccagattccaacaaattgcctggggaacagagaggcgggagagagtcgttccatcttggtgggggatcagggatggcttcatggtaaaagtcacatcagagcaaggccctgaaggatgggtcaggcttcaagaggcagagatagggtggatatagtaagtgaggggatggcctggctactgggctactggaagagtttgtcatcagagcagcaagagatagaatccaaaagagaagaagatcagcctgcagatgtggactgctaaatgcaggctgatcttctcccctttgggattctcttatgagaagccataaacgccaggacgagcacccagtggggtgcttctagttgcca

SEQ ID NO: 30050 - DNA, 1866 bp, Artificial sequence
  DNA replication origin
ctgtttttggagatacaaaacatacctttcatcattcttaccgatatctcatgaaatggagggaatatggatggttcatcagaactcacactgctgctggagatactgatatgcaggtccaaggagcacagtccaggaatactgccctctaggaaggacagcaagagacaggaagaggggtgaggctggcctttctgttcctctcccaaggatttcctcagacaggatgaagaggggccacccacagtgcagctagtagctagagttcctgcagggtgggatttgagaggcctttgaacaaaattcaaaccccgcagcctgtcaagccacctaagacagtcattcctgcaactctctgtttgtttgtttgtttgtttgtttgttttgagatggagtcccactctatcacccaggctggagtgcagtggtgtgatcttggctgaccgcaacctctgccgcccaggttcaagcggttctcctgcttcagcctcctgagtagctgggattacaggcacctgccaccacgcccgactaatttttgtatttttagtaaagacagggttttatcatcttggtcaggctggtcttgaattcctaacctcatgatccacccacctcagcctccgaaaatgctgggattagagccgtgagccactgagcctggcccctgcaactctttaggattagaattttccaggagcagctaaagctttttagttgttgacacctgagtccagttaacctttggaaagtggggaggacagggaggaaagggacccatagagaggcagggtgccccttgaggcctccccagggcctctgtggcaagtaggtgccgggtctcccagctctgaaggtacagggcttctctgaaaatttggtccaggaggaaaggccagggattatttggctagccatggagtggggaaagccaggcaccaacccattagcctgaatccactcagcccagtcctccaggcagggacaggaatgacttacccagagcaatctctgagccacctgccactcacacaatgctacctcatcccttgtcatgagcacagaggcctaacaagcactcagcagtactgttctgagcactttacaggaaggaattcatttaatcctcacaacaacccgaagatcttatgagctacatagatcatcattatcctcatttacagatgagaccaagcccccggcaggaggaagatattagggcagccacacttttgaggcacacagtgggactcctgaagcctcccacgtttggtgaaaacggatcaacagcaatgcctcgcacgtgttctgaactttggagtttttttgtttatttgtttttgacatagagtctcgctctgtcacacaggctggagtgcggtggcacgatcttggccactgcaacctctgcctcccaggttcaagcgattctcctgcctcagccttccgagtagctgggattagaggcgcccgccactcccggctaatttttgtagttttagtagagattgggatacatacaccatgttggccaggctggtctcgaactcctgacttcaggtgatccgcccgcctcggcctcccaaactgctggcctcacaggcgtgagccactgcgcccggcctgaactttggagtttatcaagaatcttcccttggctcttgggaccctcatagaacttaaagcataataataataataaaagaattttagaaatagggcatcttatcaactgcggcccagagaggtgatgtgactcacccaaggccacacagctagtgagaggtctggggcaggtttgctgctgcctagacacgggacggattcccagcccactggtcagatcgcgcttcgccccaagccttg

SEQ ID NO: 30051 - DNA, 894 bp, Artificial sequence
  DNA replication origin
acagggtccccgtcgcccatctctttggagagccgcagagacccggcgcggggacgcggggtggtggggaccggagggggtggtggggaccaggcagccggcgcccctccgcccacccgggccccgcagcctcagcccgggacgaaactttgggcccgcgccccgctgcttcccgcgccggccgggcctcggggttcgctcccgcattaggccccgcgccgcccggcgcccactcaccagcgcaccagctgccagcgcttctcccccggcgcccggcggcccgccatgcctcgcccggccgctccctgccctccgcgggccgcacggtggaggaggctcggctgccgcaggcgggtgtccggggcgcgctcgcggggagggcgcggggagggcgcggggagggcgcggggagggcgcggcgctcagaccccgcccctggaggcggctggagccgggtcagcgccggccccgcagaacgggcgggacagcggcctctccccgtccgggtctctccccgccgcgccgaggagccgggtttctggggagcactgggcggagtctggttccccgagtcctactgacgcgcggagagaccaggcggcccattgcctcgttctgtgccttactcccttaggaaacccgttctacccaggaagtgatgcctaaagaagtaaactactcggccgggcgcggtggctcacgcctgtaatcccagcgctttgggaggcggaggtgggcggatcacgaggtcaagacgatcgagaccaacctggccaacatggtgaaaccccgtctctactaaaaatagaaaacttagcggggcgtggtggcgcctgcctgtaatcccagctactcgggaggctgaggcaggagaatcgcttgaaccggggaggc

SEQ ID NO: 30052 - DNA, 1555 bp, Artificial sequence
  DNA replication origin
gctccccagaaacccggctcctcggcgcggcggggagagacccggacggggagaggccgctgtcccgcccgttctgcggggccggcgctgacccggctccagccgcctccaggggcggggtctgagcgccgcgccctccccgcgccctccccgcgccctccccgcgccctccccgcgagcgcgccccggacacccgcctgcggcagccgagcctcctccaccgtgcggcccgcggagggcagggagcggccgggcgaggcatggcgggccgccgggcgccgggggagaagcgctggcagctggtgcgctggtgagtgggcgccgggcggcgcggggcctaatgcgggagcgaaccccgaggcccggccggcgcgggaagcagcggggcgcgggcccaaagtttcgtcccgggctgaggctgcggggcccgggtgggcggaggggcgccggctgcctggtccccaccaccccctccggtccccaccaccccgcgtccccgcgccgggtctctgcggctctccaaagagatgggcgacggggaccctgtgcgagccgtcaggctttgggggaaccccgtccccctcccgcgggggcgccctttccctgcacttcacctttcacgctcgcacggggcttccgccttccccttcgcccccttcaggtttcccatttgtgcctccctccgttccttctgccacccggggcagggctctggacttgggccccgagaaggcaccacccacagcccccaacccctgcgtggaaaggggtgctttagccccgaaacacaggagcccctgggggtgtgcactctggggacagggcgcagagaagggggcctaggagaccagggcaggggaggggtccccgtgtagcggggcagtcgccctttccccctccgcagtcctggcccgctgggaagtcagagcctgcggtgtcaggttaccggactgcaagctcagagggtttcagacgcagcgctgtcgagtcacctgatctgggcccccgaacccacgtcccagggttccaggtgtcccaatgttcaggacggcttcagccaggggcctgacctctgcttggcggcacttggagcttagggcagcctgcacagccctccccggacctcggaggactccaagattcaaaagagaatgtcggcctgggactcctccccatcccaaatcatcccacacacagcagggtcagagagcacctctgaaggtacattctgtagcctgcatacaatgaacaataatgtcatcaataacagcaacgtgggcttccccagcacctcccgtggctctggagtagtcaggattcaggcacacactgagaggaaggtattagcacctccattttactaaagatgaggaagccgagggtcagagagggaaaaggattcaaggtcacccaacaagcgcatggtagaggcaaggtttgaaccaggtcttgctcaggagcttaacttttcctctgttttgcatatttcctggatggttccacccagcgtggccacacatccaagttcacattgtccgaaaatcccacagtgtca

SEQ ID NO: 30053 - DNA, 1438 bp, Artificial sequence
  DNA replication origin
gtttcaccatgttgaccaggttggccttgaactcctgaccttaaatgatccacccgcctcagcctcccaaagcgctaggattacaggtgtgaggcaccgcgcccggccagccaccctgcccagcctccctgctatcctttctttctcccacaactatccattgtgatcctgctctgggtcaggccctcaaggaagaccagggtactgcctccatgggccacacattctagtgggagagacagacgataaacatgtaaacgcagagacaagagaatttcccaatatgaccagcgtgctgaagaaactcacacagggcatcgagatcatgagcagccagtgggtgtgtggggactctggaagaggtggaagtcctctccaagaaagtgacatgtgagctgagtcctgaagggcacaggggcgaccacataaagaagctgctggtgagaggtgttaagtgggtggtggggagggggcacggggcatggggtggaagagtccttctgcagggggagcagcaagtgcaaggctgttctagaagcagaaggccattgtagctagagcagagtcatgatccacagggtcaggaggccatgacccacagacagaagcgaaaacttctgtgcaattaaaggaacggctttctagcacttagagctgcctgaggatggagtgggctgccccgagggagagaacttcccatcactaagccatagtcaaaggccgctgtccacggaggttactgaggatgagactcaagcatcccaaaggttggctagaggacccttcgttccttctacgccttcacgttcaggagcatccttggtttggcggaagctggggggatgtctatggagtgcatgaatgaaagttccaggccgagcgcggtggctcatgcctgtcatctcagcactttgggaggccgaggcgggtggatcacctaaggccaggagtttgagaccagcctggccaacatggcgaaaccccgtctctactaaaaatacaaaaagtagccgggtatggtggcgggtgcctgtaatcccagctactcggcaggctgaggcacaagaatcgcttgaacccgggaggcggaggttgcagtgagccgagatcgcgccactgcactccagcctgggggacagagcaagactctgtctcataaaagtccagcctccagatcccaggcagcggggagtttcaggggtctgagcagccctggagactcgcagcatagcgttctgtaccccgtcccgggtcccgcgcaacgcagagctagagggagccccagagtatcttcctcagtagatcaggagcccccaggcctcaccgcacctcggttccccattgcccccattgcccccattgcatcttccaggaacccctggcgggcaggctgctccttctctccccgggtcctctgggtgcacctgccccgccccgc

SEQ ID NO: 30054 - DNA, 2777 bp, Artificial sequence
  DNA replication origin
ggaggagccgccttgggcagcccccagggagctcaggacccgctgtaccccctgccaccgcctcccggtgcccgcccctccgccccctctccgcggctgcgccaggcgatccgcaggcagcggcacagggaccagggcgcgccccgggtggcggaggcgcggcgagggcgggagcacgaggaccccggaccctggatcggcgcgggctccggctgcgcgtgcgcggcggcggcggcgaggggcgccaggtgtgcgggcggtggcggctgcggagggcgcggctttgtgcgctggggccggccggggtgcgcgcgtgcgcggcaggactgctgcgagggaccccgccgccccggaggaggaggaggaggaggaggaggaggaggagggggctgggccgagggagggggcgaccgcggggactgaggtgcccttcgctccgggtccagaggcagccgcgcgccaggcggcgcagaaggtcagtggccccggggctgggattccgcagccagcctggatcgggacgtgagtcctggtgtgactgacggggaatcggagcgtgtgtggagtgtgaacgcgtgtgtttgcagacagacatcggcacgtatggacggcgcgagccggtactgcgttccggaggagccatccggcgtcacaggctgtgctggggaggtggggtgaccgtcctcagaaacccccgcgggcggggcgctgcacacacgtccacctatagggtgtgtgtgcgtgcgtgaggtgtgcagcccctgtcaggatctggcgagagaagctgaccgggatggaggtcagaggtagggtgtttacaggtggtggtagaaggaaaacagccaggaaccccaggaggaccctggagctaggctgggcttcctgaaaccccccatcccatcctcgctccagcctgtgcctattgcaggaagaggagctagggaggtgggctgccggctgagaggccttgagggatctttgggagcggggcccgatttcagcctgatcctcatttccagaggcctggatgggtgtgggggtgccggccctgagtggggggtccagggcaggcgtgtgttcaggagacctcaggggtccgtgtagactgtcctctggctttgccagcaccaggtgctgtgtgtctggacctgggagctggctgagggatacccttgcttcctctcatttgttttctatagctccccctacatgcttgttaacaaacctgaagggcacttgtatgccagtggggtttgctgggatgtgccctgttgaggggctgtcatcagagaagcctccatggggaatgagagagttgtcctgagccaggtgccagggctcttgggttctttgcctgcgttgtgaccctggggccatccctcaagccctatacgcctcagtttcccatggcgctttgccctcccccttcttcctgttgcagggtggggagtaaacagcttgcacagctgccaggaggctgggaggctgggaggcggggaggctgggaggctgggaggcggggaggctgggaggctgggaggcggggaggctgggaggctgggaggcggggagtgactcagggtctgtgaggtcttgggcagcgatttttcaggcgaaagtcccagcacatcttctcgacttgggcaggagttgggggaggctctgccctcagctccaagctgtggtgctgggttttctgagtcctggggtggggtggggtgggcatctgttggatttggctgctcaggcttcaagaagctgcctctggtccctccttcttcccagatatcaagtagttggagagggatggggctggggggcctggtagctgggtgggatgcgggggcgggagctgaagtgctacagcagcctctcttggttcctgtgtttgatgttactgggcagagacagatgctaagcttgggtagggtcggggctggtctaagtgggactgctcagctcagcatgttgaggcaatttggtgggaggtggcctcagctccagagaagaggaccctgctgctggaggcacgcttgcagctctcctcaccctctttcccatgaccctgtctgatcaactctggctgagccaccatggctcagaatgacttgagccttgagggaaagggaccctggcatggatgggggtggtggcagggtcacatagtggctaagcatgaaggccctgctgtcactcagacctgggcgtaagtcccagctccatcacctactgctgtggccgcacctgcattcccctcaatgggagcccgagagaaaggcttgcaggctgtggcttatttgggaagcaatctcaggaaacaagggcgaggacatggggtttgaaggagagggaggggaagcaacaatttgattattcccaccactctcctgggcggtgttctgaggagccttacagacagaactgctctgttggggagagaaacagggaagcacttacccattagccccatcccctgccagacaagggtggctctgtggacattcgctcccgtgtggacttccagattgcacatgtgtggggctcaagtggttccctgtgggtactccacacggcagcttccaagaaggcccagcgtggcctgacatgaagcactgtcccattgcacctgtaagatgctgcttggagcctgtggggacctggtcattgcagaagtgtttggagtgagaggtggggccaagagggctggaagcagcacactgaggtgcctaacactgcgtgaccttggccaaattacctgacttctctgagcctcggtt

SEQ ID NO: 30055 - DNA, 910 bp, Artificial sequence
  DNA replication origin
ggctggaagcagcacactgaggtgcctaacactgcgtgaccttggccaaattacctgacttctctgagcctcggtttccttagctgggtgttttaagtgttaataaggcatttattgaatttttgaacatggtgatggccccatagcaagggcttcacccggggtatttctgtgtggccaggaagaccacatgcccagggtggctcagatagtcattcactcaagtggaggtgggtccgcataagaggacctctaaagacccctcccggtcataggacctggggctcaggggccagactgctgacctggtcagttcctctagggctgtggcccagtttcccagacctcctgaatgcttccatttcacagcctatgaattggagtcagcgatgtcctgctcctgggctggccgctcagatatacctcttcctgggctctgcctcaggaggacacagaggccagcactgggcagaggagggcgaggggagaggacagctcagaagcaggtgcttgaaggaggagtggagggagggtggatgctggcatttctggcattgggagctggcatacggtcatgggcatgggtctgggccatagtcagtgggggaggacaaggcagggggctgggggggggcaggaaaggaaggtgagcgggttggcagaaggtggccaagaagcatggaagagacagggacagggagtgggttgggcagccttggcgtatggggattcacagcgtctggggtggtggtaaccaaatgggagggggatgaggtggcaggaaggaagggagggcattgggtgaggtctagctgggccttcctagggcgtaaactggggcagtgttcgtagttcgtggtacagcatccacaagcctcctcgttccttttttttgagatggagtttcgct

SEQ ID NO: 30056 - DNA, 823 bp, Artificial sequence
  DNA replication origin
cacctcccagctctgcagcctcacccacaggaagctcgggttgggggcaggcgaagagggaggtgccacgctgggctccccgccctgcaccggcactgaccccgctgtaccacggccctcttgcggacagccccggggacgtcgttgggacatcgctgggaccccgggctctgcagccacaaccatgtttggccggaagcgcagtgtctcctttgggggcttcggatggtgggtgacaggtgggagggtgggggaatgatgggagagaacttagaagtgaagtcttgttaagtgcattggcggccgtgggaacagaggggctcgggctgtgcctgagagctgggtctgctgacgccctggcaggtcgagatgcaggatcctggtggggacatcagagaccgtaagccttccccactgtccctgggcacaatctgctggcgaatcctggaggtctgcgccggctgcccgtggggaggtggatagcatgagtgtgactgcagttgaatgtgtgtgtctctgtgtccgcaggttcccatgtatgtgtgtgcgtgtctgggattatgtgtaagtgtgtgtgtgcgcgtttgagcctgtgtgtgcaggcgtgtgtgtgtggctgtgactgccagtccgtgtgaccgtgtgtgaggtgtgtgcctgtgcatgtgggcagctgcctgtctgcacttctggccttctgtgtctgtgtgtgcttgtgtctgcgtgtttgtgtgtgtgatgctcctgtctgtgctgttgttgtggccttgtggcaggggagtctgtacctgctggacctctgggctgcctgctgtcttggggg

SEQ ID NO: 30057 - DNA, 856 bp, Artificial sequence
  DNA replication origin
ttgaaggaggcggcgctggaaggttgaaaaggaatccctaggaagagaaggttgcagggggcattttttttcttttttctttctttctttctgtttttttttttttttgagacggagtcttgctctgtcgccccggctggagtgcagtggtgccatctcggctcactgcaacttcctcctcccaggttcaagcgattctgctgcctcagcttcccgagtagctgggattacaggcacccaccaccacgcccagcaaatttttttttttttttttttttgtatttttagtagacacagggtttcaccgtgttagccaggatggtctcaatctcctaacctcgtgatctccccgcctcggcctccccaagtgctgggattacaggcgtgagccaccatgcctggcctgcagggggcatttcacactgaggaaacagtaagggcaaaggctgcgggtgggtggggaagtgtgtagagctgtttgagaagcggtgagccaggctctcgaaatggatggagggacatggcaggaaacagccagaggcgagggtggggatccgctcggggaggctctgagtgtgttgccggcgagatgacgggtgccctggaagagcgggatgggggaaccgcctgtctccttggtgacttgggaaggcggccttgggagctttggggatggattgcggaagggaggagatgcttgctgtgctcctgaggaggggtggggcctgaatgtcctcttggctggggttggaggggagggccaggctagggtcctaagaaggtgaatcctgagcccaggcatctagcccacgtgcagcatgaaaggaggatttccggccgggcgcggtggctcacg

SEQ ID NO: 30058 - DNA, 1938 bp, Artificial sequence
  DNA replication origin
gcgggcggggaccagaaggagcgggcgaggggaggcagggccggggccggggagggcgcctgggagccgggcaggggggtcccgggagcgctgtccgcctcctcctgcgcttcgcccgctccctgtgccccgcgtcctccaccatccgggcggccgaggccggggcgcgggaggcggggccggggcgggtcccggcgcgggcggcgcgtctgagcgggagccgggagccgccggcccgggccgcgccccgagcgagcctcggaaatgcccgcgccgggggagcggacggcggctgccccgcgggccccgaggagacgctgaaggtcgccgggagggaggggagagcgcgcggtcacctgacccccggggcgcacctaggcggggcggggcccatgcgaggcggaggccgggggccggggcgcgggctcaggggccgggtgcggagcgcgcggagccggggctgcggggacgcgggcgggcgaggtcgggcaccgcgggcggcctcgccatgtcccagcccgcggggaggaggcattgccgaaaggcggggatccgcgccgccgtggtgctcatcggactcctgcacaaatcccggaggcagaataaagagaaaaggtaaacccctgcagcgccggccgcttccctccgctctcctgctgcatgccagttttctttggggtggacttttccgatgggtgtttggttccgtgttggttagaaaaaagcctcctctccaggtaccgtcgtgcgaaccgagttcggagcttcgccccggaccctggctggtgcgaggagcctgggcaggaccttggcggaatcggagggccgctgggagggcgcatcggggtggatccctgacggagggaccccaagtccgtcgcccccagaccctttgcagaccgcgaccccgttccccaagcctgcagccgcggatgccattgatccagcccaggcggctccatgcgccggtgttgccatttgcttcctgcaacttggctgagccctcgaggtgcctgcctggccgagatccgcttgctctgcgctcggtgccggcaggcgaggagcaagtttggaggttgttcgctccccacccaccctctcgccccaccgccatagggtgactttgcctcttcgcctttctggcgtttgttctttcgtttgctcctggatattgaaaatagttttctttagctatttcagagacattttggacgacctgtgtggtgggaggtgtggggtttggagtaggcaaaggaggttctgaggaagctttctaggctgcaaccgcagctgcaggtctgacatccaccagaccccaaggagctaccaggcaggtcgttggcacaaagcctccctgttctgctagggtgcatggcagagcctccagcaatggggggaggggagtgcggaagctgactgcccacagagatgttgccgggatcaggatttggggtagcttccagtgaccctgctggatcctagtttccagaggagttttggaatggttaataccgcaccctataagacacgggcagtggaaccagagacacctgggggtgaccagcagcccctggatatgcccacaggtatgaacgtacctggggtggtggtaggcagggaatacgggggactttgagaagctggcatggattgcccttgtggtgggttgtcccccattcctctcgtccccccttcctataatgtgtgtaacaagatgttgcccgctgcacagaatgaatttcccgtgaaaatgacataaggtggttcagcatgaaataacattgagtcacctagtgagaaagttcttcccttttcagttctctgcgaatccttgtgatttctttgaggggaagtttcaggtggatgctagtctgcctttaacacattttaaacacttgctaatcttccttttgtaattaagagagagcagacctccgg

SEQ ID NO: 30059 - DNA, 1080 bp, Artificial sequence
  DNA replication origin
tggattattgaggaacctttcagccagcctccctgcggccatgtttttccccttacagtccgtcctccgtaaggcagccagagtgatcctgtgaaactgtgggacacatcacatctctgctctgctcacaaatctccctgcctggccgggtgtggtggctcacacctgtaatcccagcactttgggaggccaaagcgcgtggatcacctgaggtcaggagttcaagaccagcctggccaacatggtgaaaccccatctctactaaaaaaacacaaaaaattaactgggtatggtggcgggcacctgtaatcccagctattcaggaggctgaggcatgaggattgcttgaacctgggaggtggaggttgcagtgaactgagattgcgccactgtacttcagcctgggtgacagagaattaaatgaatgcctgaaatttggttttagtgaatgaatgcttgaaatttggttctcatggtgagggtgacaggaagccatttcaaggccttagatagggggctcatatgatcaggttgacattttggaaggtccctgtagctcctgggggagacagtttgggagtgggaccagagtgggatcctggagattggctgggaaggtgtcagtggcttggagatgatggtggagggggattggggtgcattgactgagctgagagacgtgtaggaggcagagtgaaaggcttgttgttagagctgtgcttaatacactttcatggacacacgcgttacctggcatcctctggaaatgcagatgcgtaaaggtgggtctgggctgggtcctggagtctgcttttgggtgacattatgttgccggccggggacacacttagagtagcaaggggttgggtgtcaggcataagggaaggggagtcaggaacacattgtgcctttaattgcaagagaacctaggaggaggagcaggttgggggaaacgatgaggtcatttagggacacattgggttcgaggtgcctgtgagacccccccggggatgtggcatctggagctcagcccaggctggcggtggaaaatgaggagtcgtccttgggttggtgggtgca

SEQ ID NO: 30060 - DNA, 979 bp, Artificial sequence
  DNA replication origin
aggggaggcccgggccagactcgggctgcagcttcagaagacactcctgctgccctccaggtgcattagatgaggacaggacctgaagtcctaaactgcaccagggctaggaaaaagggcaggaggcgggaggaacaggaccctacgggcagaccacctgggagaacctctgcagcccctccacagccctgtggttgggggcacctggggccccctcgtgcacatatctcagagcgatggaccaatctacccacatgggcaaatcctcaccctgggaaaataagcctttaccgcacaagcagcttttagaactgatgcgtgctttatggtttacacccaagccagcagagattccgagttctatgtgagcctggggtcacagagtcagaaaatacgagagctggacctcaaccctgagatctctgactcccattccggtgctccttcccactgccatgggaaagccagctccacctggcccaagtaccacagcagggagcgaggaggggacagtggccaaacgtcttcttgtgtgttttgagttcttggggaccaagggtagtgtctcagcgtgggaggcgacgtctgtgtgattcacaagcatctgagaaaatgatccgggcaaaatgcagaaaaccatcctgcaggcacggcacacccacctgaaagacccgagtgccaaacatggactgtggggtcatggggtgaaacaagagatacagaatcaagtgccatgaggtcacagggaggagaggtctggttctccttgggagaccagctacgggatcgcacaggaggcaacggctgatctaggcctagagaagaggccagcagtgacctacgggagaagcggggaaggggagggcacagaagcaggacgcagaggaacgtgaccagcatgacggagagaccaccagtgtcgcaatgcccaggagacacatcacaccattcgagggcacagcaggctggcaaaagggga

SEQ ID NO: 30061 - DNA, 876 bp, Artificial sequence
  DNA replication origin
ttgtttctataggggatcaagcttgaagagcagaagccgggaccccagaagaacaaggtgggctgggtgggtgagggggtggccagacggccctggtgaggggctagggcgagaggaaggcaggaggggctgccgggatgctggggtcttctgtctcacacctgtctaactctgactcgcaccacgggccgcttcacgactgccttgttagaccagtgcacggtgggcagcagaggggtcctggcttgatgccttaggacagcttcagagcaggctgggggtggaggcctcggtgggacctcaggcttggccgtttggcccggctcttccctaccctgtgcagtgtgtaagggtgtcaggctctgtgccccgggttccagtgggcagtcagctctcagcttcccaacccaggggtgccgcttatcacttggaggtcagtccgcctgcctggaaaggggtgctgggggagactaggggtcattttccggaatgagcgttctaggatgagaagctggtatcacgaggggtgagaagttcagcaccttcggacactgcatcatcagctggcagggtttatgtttgggttctgtcagtttggagaagaacatgggggatgttagattccagagctgattctgagctgttcttccatcgaatgttcctccctcaaagcccccccacaacatatcccccttgcaagacctggaaacagtggtcagactttacgggcactgccgggactaacggtggcatcatctggtttgtcttgcaggacgactatatcccataccccagcatcgacgaggtaggtgccctcccctcactcccacctgccctgcagcctgctctgggtcccgtccctggggaaatgatggc

SEQ ID NO: 30062 - DNA, 788 bp, Artificial sequence
  DNA replication origin
cataccccagcatcgacgaggtaggtgccctcccctcactcccacctgccctgcagcctgctctgggtcccgtccctggggaaatgatggcgatggcctgtgcccagccccccaggggagagaaccttgggcctgggacctctcttcctgtctttgcctttgtaacctcagcttctccatgtgttaagttgggggtgctcatctaggcctttcagccctggggctacagggttggcgaatgaagctggaggtgttgtggggcttggaggaggggttcatgtcactgcctttggcctcaagtaccagtgggtaccaggccccactcctgggagcagcgcagaggggacaccgccaccggccccctccctcccctgcggtcccaggggagcgcacgaccctccctctgccttcaggttgtggagaagggaggcccgtaccctcaggtcatcctgccacagtttgggggctattggatcgaggacccggagaacgtgggcaccccaacatcgctggggagcagcatctgtgaggaggaggaagaggacaacctcagccccaacacatttggctacaagctcgagtgcaagggtgaagccagggcctaccggaggcacttcctggggaaggtgaggctgggggagaggagctgctgggggttgggggcagaggctggggacgctgggagagaggaggtaccaggcggtaggggatggggagaggttgagggaggctgtgggaggctgtgggagaggagctgccaggggtgggggtgaggctgggagaggctg

SEQ ID NO: 30063 - DNA, 942 bp, Artificial sequence
  DNA replication origin
accctcaggtcatcctgccacagtttgggggctattggatcgaggacccggagaacgtgggcaccccaacatcgctggggagcagcatctgtgaggaggaggaagaggacaacctcagccccaacacatttggctacaagctcgagtgcaagggtgaagccagggcctaccggaggcacttcctggggaaggtgaggctgggggagaggagctgctgggggttgggggcagaggctggggacgctgggagagaggaggtaccaggcggtaggggatggggagaggttgagggaggctgtgggaggctgtgggagaggagctgccaggggtgggggtgaggctgggagaggctgtgggagaggagctgccggggatgggggtgaggctgggggaggctgtgggagaggagctgcggggggtgggggtgaggctgggggaggcttgggggacagaggagctggcgggggtggggggaggggctgggggccctgggggagaggagctggcgggggtgggggtagggcagagtgccccccttttccttggcctcttacctccttcctagtctgtccttttgttgctgcctgctgctgtcttagttggagaggtctgagggcctctgtcctgggataggggacggggcaggggagccatgtaacaatcagggaggcccagtgccatgagtccttgtggggaccaccccccgcaaatgtttcgggaggcgatggaatgggtagtgtttggggtgaaggacggtggctggagttttgactgttcgaggaaaaatgtgttctcacacctcaagaagtctctgtttccatctaaatcacgcaaatctctccgtcctcattcaggcagatcctctgagtgcttgtactgcatagtgtctgcgagcctctgattgcttaaaagtgacaaagttaaatttaaaagaatagattc

SEQ ID NO: 30064 - DNA, 1041 bp, Artificial sequence
  DNA replication origin
cttggcctcttacctccttcctagtctgtccttttgttgctgcctgctgctgtcttagttggagaggtctgagggcctctgtcctgggataggggacggggcaggggagccatgtaacaatcagggaggcccagtgccatgagtccttgtggggaccaccccccgcaaatgtttcgggaggcgatggaatgggtagtgtttggggtgaaggacggtggctggagttttgactgttcgaggaaaaatgtgttctcacacctcaagaagtctctgtttccatctaaatcacgcaaatctctccgtcctcattcaggcagatcctctgagtgcttgtactgcatagtgtctgcgagcctctgattgcttaaaagtgacaaagttaaatttaaaagaatagattctgcccttcagatttaccaggttcttgatgtactgagggcagattccggaaatctgtagcctgaggccgctttgcagagtctcacgtgacgggaggctgcctcagagcccctgggtcttgttagcatgcagattccagggcctcagtctgatccagcaggtctggggagctgtgtttttcgcccgtgttccccgagccagggagtgacccactggctcaggacacctcccagctcccctgggtggaggtgccagggttcctccttgctgtcttgccccagatagtgtgaactggtgagggccgccccatgggaatgagaatgtggactcggtatcttgtggttaagaacttgcccttcagagtcaagacagctgtgcgtttgaaccctggatctgtcccttactcatcgtgtcatcctgggcagtgacttaaccccccgaccattggttttcccatctgtgaaatggggatgatgttctctcccggatacagctgtggtcaggactgaaggagatagtgggtattaagcccctggcacggtgcctggcgcctcctgaggatccggccgtcggtacctgttaatgtcgttgtcattgtcatcagtagcatccttctcttccttgttgctgtggggcttctcc

SEQ ID NO: 30065 - DNA, 937 bp, Artificial sequence
  DNA replication origin
ggggataagtgagacagtttctatccctggagagtacacagggtagtcggggggtggggcagggggtcattactaaatagatagttatagtacagtgtgccagcactaggctgggatggaggtcagcacagctcagatagtgactgtttctgcctgtaggggacagagggtgtgttcagggaaggcttcctggaggaggtggctcatgcacagctgaatcttgatatcagatgaaccttctgccaggaggaaagagtggggaagggagggctgatctggcatggtagacagcatgagcaaaggtcaggaagaaccagagcctgacgtcaggagggagctcctgagggtttgctgtggctgaaggacccacgggggctggaatggtggagactcagccggagatgttggttggatcagatccagaagggctttgagctcgggacggtgggctgctggtaaagcgcttaggcaggagagtgaggggctcgatgtgtatgccagagggattgctctgacagtggtgtcattgagaacgatggtgacaaggacaggttgcagggcaagaggtgcaggaaggcggccagttagaagctatttacaggaatgcaggagagatgacaaaggcttatactgtatggaaggaaatggtttagggtcaaggttgggaagacttggtggactcctggctgtaagtgttgtgggacgtgggattgattgtagggtgactcttgggcctttggcctgggctctttgatgacatggtggccaagttgtgcctgcgaaggccgggttgctgaaagggccagtcctcatctgtgtgaatagcggcccctggcatccatgtgcatggctctggacgaacatctggatggagaggagcagtggggagttgggtgcgtggatgtggagctggggcagagggccgggctgggattca

SEQ ID NO: 30066 - DNA, 857 bp, Artificial sequence
  DNA replication origin
taggaagtgaggaacgtctctgcctggtcgcccgtcgtctgggatgtgaggagcccctctgcctggctgcccagtctggaaagtgaggagcgtctccgccaggccgccatcccatctaggaagtgaggagcgtctctgcccggccgcccatcgtctgggatgtggggagcgcctctgccccgccgccccgtctgggatgtgaggagcgtctctgcctggccgcccctactgggaagtgaggagcccctctgcccggccagccgccccgtccaggagggaggtggggggggggtcagcctcccgccaggccagctgccccgtccgggagggaggtgggggggcagcccgccctgccagctgccccgtccgggaggtgaggggcgcctctgcccggccgcccctactgggaagtgaggagcccctctgcccggccaccaccccgtctgggaggtgtacccaacagctcattgagaacgggccatgatgacaatggcggttttgtggaatagaaaagggggaaaggtggggaaaagattgagaaatcggatggttgctgtgtctgtgtggaaagaagtagacatgggagacttttcattttgttctatactaagaaaaattcttctgccttgggatcctgttgatctatgaccttacccccaaccctgtgctctctgaaacatgtgctgtgtccactcagggttaaatggattaagggcggtgcaagatgtgctttgttaaacagatgcttgaaggcagcatgctcgttaagagtcatcaccactccctaatctcaagtacccagggacacaaacactctgcctaggaaaaccagagatctttgttcacttgtttatctg

SEQ ID NO: 30067 - DNA, 1489 bp, Artificial sequence
  DNA replication origin
agaacttctacaaaccctgaagatacagaagggacctctcactacagggtatttaacaggatcgtggggtttaacccggccagattaatgtgtacagaaaaaatgaaagatgtggtgctgtgttttactgatgagaagaatctatctttgattctctgggaatttccatcctgggaactaagttggtaccatctctttttaaaatgtgtgattacagagcccaaatcagtcagatatcacaaatgctgccactgaggagatgaggcatgtgggctttgcctgctcttttcatttctctgcatcttaatttcttcagctgtaaaataggagtactgacttaaccctgctgatggcacaaagcagtgataaagttgaaatcttttatgaaaattccttctttacgtgactccactatgtaatacagttgacccttgaacaacacagggattaaaggcaccaacccctgtgcagtcaaaaatacacaaatacgtctccctcctctccctcctctccctcctctccctctcgtctcccctttccacggtctccctctcatgccgagccgaagctggactgtactgctgccatctcggctcactgcaacctccctgcctgattctcctgcctcagcctgcggagtgcctgggattgcaggcgcgcgccgccacgcctgactggttttcgtatttttttggtggagacgggtttcgctgtgttggtcgggctggtctccagctcctaactgcgagtgatccgccggcctcggcctcccgaggtgcggagattgcagacggagtctggttcactcagtgctcaatggcgcccaggctggagtgcagtggcgtgatctcggctcgctacaacctccacctcccagccgcctgccttggcctcccaaagtgcccagagtgcagcctctgcccggccgccaccctgtctgggaagtgaggagcgtctctgcctggccgcccatcgtctgggatgtgaggagcccctctgcctggctgcccagtctggaaagtgaggagcgtctctgcccggccgccgtcccatctaggaagtgaggagcgcctcttcccggccgcccatcgtctgggatgtggggagcacctctgcctggctgcccagtctggaaagtgaggagcgtctccgcccggccgccatcccatctaggaaatgaggagcgcctcttcccggccgcccatcacatctaggaagtgaggagagtctctgcctggccgcccatcgtctaggatgtgaggagcccctctgccccgccgccccgtctgggatgtgaggagcgcctctacccggccgccaccccgtctaggaagtgaggaacgtctctgcctggtcgcccgtcgtctgggatgtgaggagcccctctgcctggctgcccagtctggaaagtgaggagcgtctccgccaggccgccatcccatctaggaagtgaggagcgtctctgcccggccgcccatcgtctgggatg

SEQ ID NO: 30068 - DNA, 925 bp, Artificial sequence
  DNA replication origin
gtccgggaggtgaggggcgcctctgcccggcctcccctactgggaagtgaggagcccctctgcccggccagccaccccgtccgggagggaggtgggggaatcagccccccgcccggccagccgccccgtccgggagggaggtggtggggtcagccccccgcccggccagccgccccatccgggagggaggtggggggatcagccccccgcccagccagccaccccgtccgggagggaggtgggggggtcagccccctgcccagccagccaccccgtccgggagggaggtgggggggtcagccccccgcccggccagccgcctcgtccgggagatgaggggcacttctgcccggccgcccctactgggaagtgaggagcccctctgcccggccagccgccccgtccgggagggaggtgaggaggtcagcccctcgcctggccagccgccccacccgggaggtgaggggcgcctctgcccggccgcccctactgggaagtgaggagcccctctgcctggccaccaccccgtctgggaggtgtacccaacagctcattgagaacgggccatgatgacaatggtggttttgtggaatagaaaggggggaaaggtggggaaaagattgagaaatcggatggttgccgtgtctgtgtagaaagaggtagacatgggagacttttcattttgctctgtactaagaaaaattcttatcctgttgatctgtgaccctacccccaaccctgtgctctctgaaacatgtgctgtgtccactcagggttaaatggattaagggcagtgcaagatgtgctttgttaaacagatgcttgaaggcagcatgctcgttaagagtcatcaccactccctaatctcaagtacccagggacacaaacactgcggaaggccgcagggtcctctgcctaggaaaac

SEQ ID NO: 30069 - DNA, 1252 bp, Artificial sequence
  DNA replication origin
cggatggggcggctggccgggcggggggctgaccccaccacctccctcccggacggggcggctggccgggcggggggctgattcccccacctccctcccggacggggtggctggccgggcagaggggctcctcacttcccagtaggggaggccgggcagaggcgcccctcacctcccggacggggcggctggccgggcgggggtgctgacccccccacctccctcccggacggggcagctggccgggcagagggactcctcacttcccagtaggggcggccgggcagaggcgcccctcacctcctggccggggcggctggccgggcggggggctgacctccccaccacctcccgcccggacggggcggctggccgggaggggagctgacccccccacctccctcccggacggggcggctggccgggcgggggctgacccccacctccctcccggacggggtggctgccaggcggagacgctcctcacttcccagacggggtggctgccgggcagaggggctcctcacttctcatacggggcggctgccgggcggaggggctcctcacttctcagacggggcagttgccaggcggagggtctcctctcttctcagacggggcggccaggcagagacgctcctcacctcccagacagggtcgcggccgggtagaggtgctcctcacatcccagacggggcagcggggcagaggcgctccccacatctcagacgatgggcggccgggcagagatgctcctcacttcctagatgggatggcggccgggaagaggcactcctcacttcctagatgggatggcggccgggcagagacactcctcactttccagactgggcagccaggcagaggggctcctcacgtcccagacgatgggcggccagacagagacgctcctcacttcccagacggggtggcggctgggcagaggctgcaatctcggcactttgggaggccaaggcaggcggctgggaggtggaggttgtagcgagctgagatcacgccactgcactccagcctgggcaccattgagcactgagtgaacgagactccgtctgcaatcccggcacctcgggaggccgaggctggcggatcactcgcggttaggagctggagaccagcccggccatcacagcgaaaccccgtctccaccaaaaaaatacgaaaaccagtcaggcgtggcggcgcgcgcctgcaatcgcaggcactcggcaggctgaggcaggagaatcaggca

SEQ ID NO: 30070 - DNA, 1235 bp, Artificial sequence
  DNA replication origin
accccgtctccaccaaaaaaatacgaaaaccagtcaggcgtggcggcgcgcgcctgcaatcgcaggcactcggcaggctgaggcaggagaatcaggcagggaggttgcagtgagccgagatggcagcagtacagtccagcttcggctcggcatcagagggagaccatggaaagagggagagggagagggaggagaaggagaaggagagggagagggagagggagagggagagggagagggagagggagagggagagggagagggctctttaggattttttgatgtaggcatataatgctatgaactttcctcttagcactacttttgctacatcccagaagctttcataggttgtgtcactcttattcagttgaaataatttttttaatttccatcatgattttactcaaataacatgcagaagcagcttatataatttccatgcgtgtgtgtagttttgagggttccttttggagttaatttccaattttattccactgtggtctaagagagtacttgatatagtttccattttcttaaacttattgagacttgttttgtggcctatcatgtggtcgatcttggagaatgttctatgtgctgatgaaaagaatgtatattctgcagttgttaggtagaatgttctgtaaatatccgttaagtccagttgctctaggttatagtttaagtccattgtttctttgttgactgtcttgatgacctgtctagtgctgtcagtagagtactgaagtcccctactattactgtattgccatctatctcatttcttagttctagtagtaattgttttatacatttgggagctccagtgttcggtacatatatagttagaattgtgatattttcctgttggactaatcctttttatcattatataatgtctctctttgtcttttttaactgctgttgctttaaagtctgttctgtctaatataaaaatagctactcctgcttgcttttggtttccatttgcatggaatatttttttccacccctttaccttaagtttccatgagtccttatgcgttaggtgagcctcttgaagacagaagatacttttttggtggatttttattcattcttccattctgcatcttttaactggggcacttaggccatttacattcaatgttaatactgagatgtgaggtagtgttctgttcatcatgctcattgttccctgaattccttgggtttcttttttattgtgttat

SEQ ID NO: 30071 - DNA, 1262 bp, Artificial sequence
  DNA replication origin
gctcctcacttcccagtaggggcggccgggcagaggcgcccctcacctcctggacgaggcggctggccgggcggggggctgacccccccacctccctcccggacggggtggctgccgggcggagacgctcctcacttcccagacggggtggctgccgggtggaggggctgaccccccacctccctcccggacggggcggctggccgggctgggggctgacccccccacctccctcccggacggagcggctggccgggcagaggggctcctcacttcccagtaggggcggctgggcagaggcgcccctcacctcccagaccgggcggctggccgggtggggggctgacccccccccacccccctcccagacggggtggctgccgggcggagacgctcctcacttcccagacggggtggctgccgggcggaggggctcctcacttctcagacggggcggctgccgggcggaggggctcctcacttctcagacggggcggttgccgggcggagggtctcctcccttctcagatggggcggctgggcagagacgctcctcacctcccagacggggtcgcggccgggcagaggcgctcctcacatcccagatggggcggcggggcaaaggtgctccccacatctcagacgatgggcggcccggcagagacgctcctcacttcctagatgggatggcggccgggaagaggcgcttctcacttcctagatgggacggcggccgggcagagacactcctcactttccagactgggcagccaggcagaggggctcctcacatcccagacgatgggcggccaggcagagacgctcctcacttcccagacggggtggcggccgggcagaggctgcactctgggcactttgggaggccaaggcaggcggctgggaggtggaggttgtagcgagccgagatcacgccactgcactccagcctgggcaccattgagcactgagtgaaccagacaccgtctgcaatcccggcacctccggaggccgaggctggcggatcactcgcggttaggagctggagaccagcccggccaacacagcgaaacccgtctccaccaaaaaaatacgaaaaccagtcaggcgtggcggcgcgcgcctgcaatcgcaggcactcggcagggtgaggcaggagaatcaggcagggaggttgcagtgagccgagatggcagcagtacagtccagcttcggcttggcatgagagggagaccgtggaaacagagggagagggagaccgtggg

SEQ ID NO: 30072 - DNA, 935 bp, Artificial sequence
  DNA replication origin
ctccgcccggcagccgccccgtctgagaagtgaggagcccctccgcccggcagccaccccgtctgggaagtgaggagcgtctccgcccggcagccaccccgtctgggaggggggtgggggggggtcagccccccacccggccagccgcccggtctgggaggtgaggggcgcctctgcccagccgcccctactgggaagtgaggagcccctctgcccggccagccgctccgtccgggagggaggtgggggggtcagcccccagcccggccagccgccccgtccgggagggaggtggggggtcagcccctccacccggcagccaccccgtctgggaagtgaggagcgtctccgcccggcagccaccccgtccgggagggaggtgggggggtcagccccccgcccggccagccgcctcgtccaggaggtgaggggcgcctctgcccggccgcccctactgggaagtgaggagcccctctgcccggccaccaccccgtctgggaggtgtgcccaacagctcattgagaacgggccatgatgacaatggcggttttgtggaatagaaagcggggaaaggtggggaaaagattgagaaatcggatggttgccgtgtcagtgtagaaagaagtagacatgggagacttttcattttgttctgtactaagaaaaattcttctgccttgggatcctgttgatctgtgaccttaccccccaaccctgtgctctctcaaacatgtgctgtgtccactcagggttaaatggattaagggcagtgcaagatgtgctttgttaaacagatgcttgaaggcagcatgctcgttaagagtcatcaccactccctaatctcaagtacccagggacacaaacactgcggaaggccgcagggtcctctgcctaggaaaaccagagacctttgttcacttgtttatctgctgacc

SEQ ID NO: 30073 - DNA, 1275 bp, Artificial sequence
  DNA replication origin
ctcccgcgcgtccccgcccgctccgcagggcagacggcgctgaacatcgccatcgagcggcggcagggggacatcgcagccctgctcatcgccgccggcgccgacgtcaacgcgcacgccaagggggccttcttcaaccccaagtaccaacacgaaggcttctacttcggtgggtgccgcccccgcccggtgcggagtctgggaggagggaggagggagacgggagaggaagggagggaaggggaaggagggaagaagggaggaggggggaagaaagagggaaggaggaaggaagtgaggagggagagggaggaagggagggggaaacaggaaggagagaggagggagagggaggagggaggaaggaagcaggaaggatgagggaggaaggaagggaggagggagaggaaggaagggaggagggagaaaggaagagggaagcaggaaggagggaggaagggaggagggaggagggagagggaggaggagtaaggagggggagggagggaggagggaggcaggagacagaagggagaaggaggagggagagggaggaagggaggaggaaggagggcggagggagagaaaggaaggaaggagggaggaagggaggggccaccccgctttgagctccacccacactgtccctgccttaagaagctctggtgccccagaggggcaggaggggaggaggctgggcatgtccatctgagcaggacaccagggtggaccagagaaggaggggctgggaggaggtgttgggggaggagtccatgttccggtggtgtcacctggtggtcttagaagcattgtcctgggtagctctctgagggaacagagacctgggagggaggctgaggaggcagccccattttacaggcgaggagatggctctgtgaagggaaaggacttgccccagggtagcagggcattgacttaggtgtcctggcctccagctctgacctctgtgccagggcccagtgcatctcaggactgcagacagggagtcgagagtgagagggcagaactcccctgcctcacaagtcacagagtccagaagcaattggggttaggatgctctaggaaaaaaaaaaaaaattgaaatgcataatttagatatagtgaaagtcacccgtgttagaggacagttctgttcattttcacagtgcgtcgagttggttcaccaccactgcagtcagaacagggaacaaatggctccgtcacacacaaaaatttctctgtgtaactttgttgcagaggagacccctcctgcca

SEQ ID NO: 30074 - DNA, 969 bp, Artificial sequence
  DNA replication origin
agtttgggacatggagagaaaaatgcccacgtctgctcacagtctggtgaaaggggagtcgaggagagagtgggaagtgaccacagagaggtgaactagccccgtggggcctgaagagtggcaggttattctgatcctgtaggcagtctcaggggacttcctggaggaggtggtgctagagaggatgtggagaggaaggaaaaagtgcatctgggcagagggacatgagagccatggctcagagtggggccactgaggtgaggagtctggtgtagctgaagtaccggccagtagaggagtctttggggaggcgagtcccactggagctgagtcctgggggtcagtcaaggaacttggataatcctcagggcagtggggagccatggagggattttttgtgggagggagggcatggtgagatgtgccttctggagaggtgactctgggggatctgcgtggatgacggattagaggagaggctgacagcagggagaccatgaggaggcctttgggaagcccaggtgataggtggtgatgtctgagcctgggtggtcacggataaagaggagggggcagcacagacaggtgccagtatcatggggtctgcaggaccagccacgggaggtaaaggagaaggaggagtcccggtgggagggcctggagggatggcggggccatctgacatggcgcatcagaggagaagatccaggtcaggaggaatgagccaaattcagttgtgaaatgttgggtgggaggtgcctgagagacacccaggtggaggctccatcttggaaggcaaaagggaaaactggtggagaaggagccagacaggtgtcgtgtggggtcatgggggcagcctgggtctgggtgggcttgtccaggaaagggcagagacatccctgagctaagctggcaaggaccacctccctggctctcctgccccttcccatccgctctcacttgtccagg

SEQ ID NO: 30075 - DNA, 956 bp, Artificial sequence
  DNA replication origin
aggctggagtgcagtggcgtgatctcggctcactacaacctccacctcccagccgcctgccttggcctcccaaagtgcaaagcttgcagcctctgcctggccgcccatcgtctgggatgtgaggagcccctctgcctggctgccccgtctggaaagtgaggactgtctccgcccggccgcccatcgtctgagatgtggggagcgcctctgccccgccgccccatctgggatgtgaggagcgcctctgcccggccacgaccccgtctgggaggtgaggagcgtctctgcccagccgccccgtctgagaagtgaggagcccctccacccggcagctgcccctactgggaagtgaggagcgtctccgcccggcagccaccccgtccaggaaggaggtgggggtcacccaccgccaggccagccgccccgtccgggaggtgaggggcgcctctgcctggccgcccctactgggaagtgaggagcccctctgcccggccaccaccccgtctgggaggtgtgcccaacagctcattgagaacgggccatgatgacaatggcggttttgtggaatagaaaagggggaaaggtggggaaaagattgagaaatcggatggttgccgtgtctgcgtagaaagaagtagacatgggagacttcattttgttctgtactaagaaaaattcttctgccttgggatcctgttgatctgtgaccttacccccaaccctgtgctctctgaaacatgtgctgtgtccactcagggttaaatggattaagggcggtgcaagatgtgctttgttaaacagatgcttgaaggcagcatgctcgttaagagtcatcaccactccctaatctcaagtacccagagacacaaacactgcggaaggccgcagggtcctctgcctaggaaaaccagagacctttgttcacttgtttatctgctgaccttccctccactatc

SEQ ID NO: 30076 - DNA, 1031 bp, Artificial sequence
  DNA replication origin
agtggacacagcacatgtttcagagagcacagggttgggggtaaggtcacagatcaacaggatcccaaggcagaagaatttttcttagtacagaacaaaatgaagtctcccatgtctacttctttctacgcagacacggcaaccatccgatttctcaatcttttccccacctttcccccttttctattccacaaaaccgccattgtcatcatggcccgttctcaatgagctgttgggcacacctcccagacggggtggtggccgggcagaggggctcctcacttcccagtaggggcggccaggcagaggcgcccctcacctcccggacggggcggctggcctggcggtgggtgacccccacctccttcctggacggggtggctgccgggcggagacgctcctcacttcccagtaggggcagctgccgggtggaggggctcctcacttctcagacggggcggctgggcagagacgctcctcacctcccagacggggtcgtggccgggcagaggcgctcctcacatcccagatggggcggcggggcagaggcgctccccacatctcagacgatgggcggccgggcggagacagtcctcactttccagacggggcagccaggcagaggggctcctcacatcccagacgatgggcggccaggcagaggctgcaagctttgcactttgggaggccaaggcaggcggctgggaggtggaggttgtagtgagccgagatcacgccactgcactccagcctgggcaccattgagcactgagtgaaccagacaccgtctgcaatcccggcacctcgggaggccgaggctggcggatcactcgcggttaggagctggagaccagcccggccaacacagcgaaacccgtctccaccaaaaaaatacgaaaaccagtcaggcgtggcggcgcgcgcctgcaatcgcaggcactgggcaggctgaggcaggagaatcaggcagggaggttgcagtgagccgagatggcagcagtacagtccagcttcggctcggcatgagaggg

SEQ ID NO: 30077 - DNA, 1151 bp, Artificial sequence
  DNA replication origin
cttcccaagtagctgggattacaggcacgtgccaccatgtctggctaattttttgtatttttttaatagatatggggtttcgccatgttggccaggctggtctcgaactcctgacctcaggtgatccgcccacctcggcctcccaaagtgctgggattacaggtgtgagcctccacacctggctgttttctttgattttattctttttttttttttctgtgagacagagtttcactcttgttgcccaggctggagtgcagtggtgtgatcttggctcactgcaacttctgcctcccgggttcaagcgattcttctgcttcagtctcccaagtagcttggattacaggtgagcactaccacgcccggctaatttttgtatttttaatagagacggggtttcaccatgttggccaggctggtctcgaactcttgacctcaggtgatctgcccgccttggcctcccaaagtgctgggattacaggtgtgagccgctgcgctcggccttctttgattttatattattaggagcaaaagtaaatgaagcccaggaaaacacctttgggaacaaactcttcctttgatggaaaatgcagaggcccttcctctctgtgccgtgcttgctcctcttacctgcccgggtggtttgggggtgttggtgtttcctccctggagaagatgggggaggctgtcccactcccagctctggcagaatcaagctgttgcagcagtgccttcttcatccttccttacgatcaatcacagtctccagaagatcagctcaattgctgtgcaggttaaaactacagaaccacatcccaaaggtacctggtaagaatgtttgaaagatcttccatttctaggaaccccagtcctgcttctccgcaatggcacatgcttccactccatccatactggcatcctcaaataaacagatatgtatacatatatatcgtgtcaagtgtaaagtttgtggcaggaaatgggctggcatagctaattggctctgtgtaggctgcttgtggatgcgtgtgtatacacatgggggtgtgtgtgtgggtgtgtgcatgcatgcatgtttgtgtgtgtgtgtgtgtacgtgtgtgtacattcctatggttgcattcctgctataatgcagaagggaatagttg

SEQ ID NO: 30078 - DNA, 1384 bp, Artificial sequence
  DNA replication origin
atacaccgtggaatactatgcagccataacaaaatgatgagttcatgtcctttgtagggacatgggtgaagctggaaaccatcattctcagcaaactattgcaaggacaaaaaacgaaacaccacatgttctcactcataggtgggaattgaacaatgagaacactcagacacaggaagggggacatcacacaccggggcctgttgtggggttgggggagtggggagggacagcattagaagatatacctaatgtaaatgacgagttaatgggtgcagcacaccaacatggcacatgtatacatatgtaacaaacctgcacgttgtgcacatgtaccctagaacttaaagtataataaaaaaaaaaattagccgggtatagtggcaggcgcctgtagtcccaggtactcaggaggctgaggtgggaggatcacttgaacccagaaggcggaggttgcagtgagccaagatcgtgccactgcactccagcctgggcaacacagcaagactccatctcaaaaataaaataaaataaataaaaactgcaattcccaagagaagtgaaattcacaaggggagccctgtgatctccctaactttctgcctagggacatttccccaactacaacgcggtgagctgcagtctaagaagagcatggaattgcctttgagttaaagaagaagaaatcaaaagctgggcagcggaagcagctagaatctgtggatcagagcacaggggaagaggaggaaggattcatgggggtggaagcccagaagtctttggggcagatgagttccccacaggtccttgctaagagctgagctgtgctagctcatggtgtgactgcatgagggtgatcagagagtggctcagagtatttaaagggtgttaagaaggtctctgggcctctgaggcccccagtactactcaacctttaacgtctctgtcccactttcataaagatagaaaacagaataggggccaaggggttaggggccaggggccaagtggtcagggaggaggggccaaggggtcagggaggaggggccaaggggtcagggaggaggggccaagcggtcagggaggaggggccaagcggtcagggaggaggggccaagcggtcaggaaggaggggtcatggagttgttttaagggcacagagtttccgtgtgggatgattaaaatgttctggaaaaaggcccggcatggtggctcacacctgtcatcccagcactttgggatgacctgaggtcaggagaccaacctggccaacatggtgaaaacccgtttctactataaaaatacaaaaatgagccgggcgtggtggcaggcacctgtaatcccagctactcgggagactgaggcaggagaatcgcttgaaccc

SEQ ID NO: 30079 - DNA, 1480 bp, Artificial sequence
  DNA replication origin
gccaacacccaggacgttgtacgcactcaacacatattcacagccattactgttgtcatcattgtggccatgagtactgtgcccgttgccataggaagcgcattggttgaagttcctgtaggagtttagaagtgagcacttctggagttgggcgtggtagctcatgtctgtaatcccagcatattgggagactgaggtgggggatcacgtgaactcaggagtttgagaccagtctggcaagatggcgagactctgttgctaccaaaaaaaaaaaaaaatccgagcgtggtggtgcacacctgtagtcccagttacttgggagggtgaggcaggaggatcctttgagtccaggaggtggaggctgcagtgagctatgattgtgagtcccttgcattgggtgacaatgcaagataccacctctttaaaaaaaaaaggtgagaaatgagctctttatgctggggcctttgggagaaggtgggatttgagcatccctagggctcacctcgcacttgaagatgggttaagtggggtactgggatggaggagggtgggggaaagggtggagtcagcacgtttagtgtggctgggaaggggtgtgcccaggtgacagaaggtgggtttcggtgggagaggagactgggtctgtgggctcagggtgcgggggtggggcgttgctcagcagtggggacccctgagaggcaagggggcctgatcaggatgagcttccaggactgttgatctggaggtgaggggttgtgggaggttggaccagggaaaggaggcacttctggtcattcaggtgagaagaaggggctcccaggtagaggagggatggacggaagccacagaaacagcccagggagggccgagaaggagaggctggaggtcacaaagggcaccgggtttggtggccagaaggaagttgatgcctttccaggcagggactgctgcagggagcgggaggggagtgaatgtggagggaacaggagcccattgtgggttatgctggggggagggggcttgtgggcttcacctgcagattcagggaggcagggatggagctcagggaagagggctgggtggactctggatgaagcagccgctgacttggacacatcagagaggtccttgggaggggccaggcgaaggtctccaaggacagtggtggagctggagaagataaggctgcggacggggtccttggacccccaggtgtggggaacggcaagaagaggagagcagccagggagtcccggcaggagtggccagggcaggaggagggccgggacttcccctgcaggcctctgagcaggcactgtgccctgtagactccggtgatactgttagcaccaagggctctgttaacaaagaggacaggacacatttagtgatgtgtgctgtgttcactggaaatggtgctgtcttttgttttgtttcgttttgttttttttaaatggagtctcgctctgtagcccgggct

SEQ ID NO: 30080 - DNA, 964 bp, Artificial sequence
  DNA replication origin
agtagccgggcgcggtggctcacacctgtagtcccagctactcgggaggctgaagcaggagaatcacttgaatccagttggcggaggttgcagtgagcccagatcacgccactgtactccagcctgggcaacagagcgagacttggtaagaaagagaaagaaaggaaagaatgaaggaaggaaggaaggaaggaaggaaggaaggaaggaaggaaggaaggaagggaaggaagggaaggagtctcgctctgtcacccaggctggagtgcaacggagcgatctcgactcactgcaagctccgcctcccgggttcgcgccattctcctgcctcagcctcccgagtagctgggactacaggcgcccgccaccacgccccgctaattttttgtatttttagtacagacggggtttcaccgtgttagccaggatggtctcgatctcctgacctcgtgatccgcccgcctcggcctcccaaagcgctgggattacaggcgtgagccaccgcgcccggctgaccaaaggtttcttggtccgcattctgcttctgtggaatgagccaggagccagttaggcctgatttgacatctgatttccggaggaaaacccagactctgccctgggcaacaaactgaatcctgaacttgaggtcacagggcaggtgtgaggagcggagagcagcaagagtgaaagggaggcctgtggtcattccatacacacaagagatcagttcctccaaggtcaggggacagagagcacagggatccagcgccaagcgcaaggcccccagaagaagccagagagtcggggagggggcgggggggaatcggtcccagcaggtgggaaggattctgggaccagacctaagggatcatgagcacagctgctgcaggcagacgggcccctggagaagctggggacaagctggaatagagacttcattgcgggaagggctgtcagggaggcc

SEQ ID NO: 30081 - DNA, 1042 bp, Artificial sequence
  DNA replication origin
tcctgctaccaccacggatgccacctaatccctgccctcttgaagagctacttccctcctcccttcctcccctgcccaagatctccctgcccctcaagtcctggctccagaggggagtcaggaggcccccggaagaaagcgtctccctcccggctctctgcttgccatcacccaggaggccgacgtggccagggtgactgcaggacagcttgtgtctttgcaagtcaaggtgggacagcttcgtcccaaagaccgagactacaggacttgacgccgcaatcctccagggtcggatggacccagcgcagaggagattcacgatggactgccctccctcccccgcccattctccactaaactaaggagccccttttccctgttttcctgctttcccagggaggggctgagctgggcaagggatgaaacgcccagcacgggaatccgacccaggctctccgagccttcgcactgggacaactttctggaaagggtaggcagacagaagggtagaggggacgttggaggctgcgctatcggcagccttgctggaacgccctgctcctaggggccccgagagagcctgcacatacggcccagggggttaccttttccgcctccaattcatgatcacctgagggtagaaggagatggaccaggccacaaagtagatccagccaatcacctggtttatgatgctaatggcgctgctgcggatcacaagaaagcgtatcctcgggctggaaaggagtttggggaccgggatgagctgaggctgggcttctgaaggagactcccacgtgcccagcacggcccccttcttgtcacgtgaggcccgcacaccctgaggccagcctacccggtctgattggagtgatttccatgtagataaacagtaagttgtccaacattttgagatgtcacttgaaaagaggagtttgtcactccaggaggcaccacaacctgttaggaagactgaggttcaatccgatgccacgtacagttaccgaggaccccgctggcatctagctctatgcaacacgct

SEQ ID NO: 30082 - DNA, 1056 bp, Artificial sequence
  DNA replication origin
tttggtgggtgggagaagctgggtggtgaggggcagccgggccaccacgccatgtgggcagagatgtagggcaggcaaggccgtaccttgatgtagggcacccagaggaggccgatgttgaatacactgtaggccacgaagcccgtcaggttcagagccacgaagtcgaagctcagaccaatgacactgcagggggtggagggacaagacagggcagggggtgaagactggcaggggtggagggacagggcagagggtgaggactggcgggggtggaggggcagggcagagggtgaggactggcgggggtggaggggcagggcagggtggggggtaaggactggcgaggggtggtggggcagggcagggggtgaggactggcaggggtggaggggcagggcaggggtgaggaccccagggggtgaggactggtggggggtggaggggcagggcagtgggtaaggactggcgggggtggaggggcatggcagggggtgagggctggcgggggtggaagggcatggcagggccaggggcgaggactggcgaggggtggaggggcagggcagggggtgagggctggcgggggtggaagggcatggcagggccaggggtgaggactggcaccactgtggggaatgggagggacagggctcccaggccacggggaaggaggactcggcccttctcaagcagggtactgtccttaggtccctcctgctaccaccacggatgccacctaatccctgccctcttgaagagctacttccctcctcccttcctcccctgcccaagatctccctgcccctcaagtcctggctccagaggggagtcaggaggcccccggaagaaagcgtctccctcccggctctctgcttgccatcacccaggaggccgacgtggccagggtgactgcaggacagcttgtgtctttgcaagtcaaggtgggacagcttcgtcccaaagaccgagactacaggacttgacgccgcaatcctccagggtcggatggacccagcgcagaggagattcacgatggactgccctccctccccc

SEQ ID NO: 30083 - DNA, 967 bp, Artificial sequence
  DNA replication origin
gcatcgaacccggggctcctgcgaaccggcggcaagggctcgggtccccgctttgccggagcgggccgcagttcccccagccacgaaacagggatggccgggacccgagagcctcccgagaccctggacagagcccagactgcgtgcgcagggcggggagggccacggggaaaggcctggctgcaggagcctggaaaagcgcccccttcccgggcctccgtgtccccagacggggagctgctgggggcgggcgccgatcccgacgtccatgagtcgcagcctctggaatgaggaaatgcttcctccgctgcagcctgcgccgccgcccggagggagatctgggggtggggctctcccgagcctgccgtggcagcccctgcccccttcctgtccagccttgctcctccaacccactcgccgcctggtccagggtggacgctcgtatagctgcgatgagcgtttcctcttcgaacttttcctgggtctccagcccttaaggcaaaaaagtccaggcctccctcctggcacttgagtcctgagtagaccctccgggggctagcctaggcccctggccgccctctggcttgttttaggtgctgggtgctattagactaggcagagggaggaaggaaggctgggacgttagactcagacgccggtgtcacagagggacacaaccctatgacagaggtggggagtcccagagagaagtgctcagccagaaaagaccacctcaggaaagactcaggtctcctgcctacctcccgacagcgttcagagaatgagaagaaatgcctgcccggtgggcagtaggtcaagcgaaagtccccgccctggagccatagggactgggtgtgttatctcagttgggtgtgctggagaagctccagcaatcaggtgggtggaggcagagaagccactgataaaggcgacaagtgaggctgagcttagagcactggctcaggcc

SEQ ID NO: 30084 - DNA, 2471 bp, Artificial sequence
  DNA replication origin
ttggatggggtccgggtggtgcggggtcggggagtgcctggcctgtgggatcgggggagctccagtccagcttgagctccaccatggaccagctctgtggtgtcggacaagggtgccccttgctgagcccagtttcctcatctgttaaatggggacagtgatgccacctttaggggctgttgcaggatggaaggggcaaagtgccctaaatgaacagtgctctcagaggtctaggattctgaatcaggaacccctgttttgcagggtgctttcttctgcgacctggtactcatctacctcatcaaaaagagagagttttaccgtgacaagaagtacgaggaagtgaggtcagttccgcttccaggccggcggcccgagggcagccctgtggagcacccccgtggcttcgagcctttgccctgatgtgatattgatggctggggtgggaggcaggggctggagggcccggggaggagaagtgttctgagtacatgctctacagaaccggattcggcctcggcagcagtgggaggagagggcgctgtgggccacagggcgggagacggagttcacaggctccgcctgattctggacaagtcccaggcctccccgggcctcggtttctctatctgggagatgagagagttggtttaccaatcgagtggtgtctgcagcacttctgttttgggattcttggacttggtggtcctggtgcgccggggctgagggaagctggagtagtaaaggaaagaaaagcggatattttcttccatgcagaggctgtttccggagtttcctgggccctgggttcggtggggtgtgcgtgttcacagcggcagagcacagcgtgggtggggaaccctgatgactgtgggagggcgggaaggggaaggggctgtggcttcggcctttggggaaggccttctggagaagcagggatcagaatgggaattgggacagacaccttagtactccctcagcacccccacagcctgggacagtgggtgcagggtctgcctgggtcattcgccttactgcactccagctatggcctgaaccccagccctgggttatagccgtgcgccctgaccctggccacaggctgaaccccaaccacagtcctgactgtgctgctgaaggaagcagggtagaggaagccgggtggaggacgctgggtggaggatgcagggtggaggacgctgggtggaggacgcagggtggaggatgcagggtggaggatgcagggtggaggacactgggtggaggatgcagggtggaggacgctgggtggaggacgcagggtggaggatgcagggtggaggatgcagggtggaggacgctgggtggaggatgcagggtggaggacactgggtggaggactcagggtggaggatgcagggtggaggacgctgggtggaggatgcagggtggaggatgcagggtggaggatgcagggtggaggacactgggtggaggatgcagggtggaggacgctgggtggaggacgcagggtggaggatgcagggtggaggatgcagggtggaggacccaggatggaggaagcagggtggtggcctgcagggtggaggacccaggatggaggaagcagggtggtggcctgcagggtggaggacccaggatggaggaagcagggtagaggaagccgggtggaggaagcagggtggaggacgccgggtggaggacgctgggtggaggacgcagggtggaggatgcagggtggaggacactgggtggaggatgcagggtggaggacactgggtggaggactcagggtggaggatgcagggtggaggatgcagggtggaggacgctgggtggaggatgcagggtggaggatgcagggtggaggacgcagggtggaggacactgggtggaggacgcagggtggaggatgcagggtggaggatgcagggtggaggacactgggtggaggatgcagggtggaggacactgggtggaggatgcagggtggaggacgctgggtggaggacgcagggtggaggatgcagggtggaggatgcagggtggaggacgcagggtggaggatgcagggtggaggacaccggatggaggactcagggtggaggatgcagggtggaggatgcagggtggaggacgctgggtggaggacgtaggatggaggaagccaggtggaggatgcagggtggaggatgtagggtggagggagctgggtggaggactcagggtggaggacgccacgtggaggaagcagggtggaggactcagggtggagagagcagggtggaggatgcagggtggagggagccgcatggaggaagcagggtggaggacaccggctggaggaagcagggtggcggcctgcagggcgagggattcttcaaggcccactccgcccgtctaggaggggaggcaccctgcagggccgtcccaggtgaacagcttgtatcttgtccaggggcctagaagac

SEQ ID NO: 30085 - DNA, 1070 bp, Artificial sequence
  DNA replication origin
tttccctgcagctgcttctcccagagtcgggtccccacgtgttagggccatgggaagggggcagggatgccagggggctgggtggcagctgtcgccccaggagcctccctgggccttggcctggcagctgacccaggcgccggcaggttatttataatcacagggtgtcactgcctactcagagctggagaaactcatcagcccggcatgttcctgagctcccttccggtcaacttgccccacccgcggccagcctctctggtgtccagctgggggtcctgcccagaggcctctatctctgcacccagctcggccatccccttcccccatcctcatgccacctggcaggagctggcgccacaaagccaaagaggcaacttgtggaggctgctctgccaggcgccttcagagccctgaccccggggtgggtcgggggtgagcaggtggaggggagaagcagcgctggacaatggggatgcgcctcattccactcgttcagtaaatgcggtggagttcctcctgcttcctcctgggagggcagccctgacgcctggctctccctcggaggtccagcagtccgcgttctctgagctgcatccccaggcccctggccgcctcccacctgagcggcctcgtaggcgctgtgctgttgctcagccaggcctgcccgtcctcctccactcccttagcatccactcagcccccagatctgggctttccagtaactccctctcccttcctccctggccttcccacagtgtaattattgggcttatttgggggatcatttgcctgatgtcgctgtcagtccgggaatgccctgagggtggggccccagcagcacttaactgcttagggaatagatgtgaaatgaacgcatgaatgaataaatggagttgcttttgcttgaacaatagaaatttaattctcgcagtcctggatgtggaaatctgagacgagggtggtagcatggttcggggtctcagggggggctctctccttggcttgcagatggccaccctctcgctgtgtcctcacatggcagggaaagcaggacatatttaactaag

SEQ ID NO: 30086 - DNA, 1160 bp, Artificial sequence
  DNA replication origin
cagagcgaggctccgtctcaaaaataaatgaataaataaatttaaaataaaataaaaaggagcccttccccctttcacttcctctcctccgcgatcgctgctttcagctgggcaacagcacagggcggtcctgcgcatccggggggctgcgctcccagaccggtggctggggagtaggttgcaggggtgtcactgtgtcaggggaggaggaggaggaggaggaagaagaggtagcggcaaggtcgcggtctgaggttccggtgctcgccgccgcccagctcccagccgaggctttctcaaccgcgtcaataaaaggccgccccgacccgcccccgcgccccgcagccctgccggacaccccgggctgcagctgagcgggcgcagacgggccgaggcgggcgccgggcgcgcagggaccgagggaccgagtgctccccatgagcgcacgtgggccgggcggtccgcaagcccggctgagagcgcgccatggggcaggcgggctgcaaggggctctgcctgtcgctgttcgactacaagaccgagaagtatgtcatcgccaagaacaagaaggtgggcctgctgtaccggctgctgcaggcctccatcctggcgtacctggtcgtgtaagttctccgcggacttttgggaaggcgggggaggggcagggcgggtgccagccgccgcgtccttctccagggtcctggaattcgcaggcgtgcacgcggttttcccggtagctgggggtctgtgagcctgcttgctgtgggggtcctctttgggtccttgggtgtaggagtagggtgtagagagggggctctccactcccccactggcgctagaggtgatgagaggtgggcaggggccttctggtttcctcgatttatcaggctttccctgcagctgcttctcccagagtcgggtccccacgtgttagggccatgggaagggggcagggatgccagggggctgggtggcagctgtcgccccaggagcctccctgggccttggcctggcagctgacccaggcgccggcaggttatttataatcacagggtgtcactgcctactcagagctggagaaactcatcagcccggcatgttcctgagctcccttccggtcaacttgccccacccgcggccagcctctctggtgtccagct

SEQ ID NO: 30087 - DNA, 1481 bp, Artificial sequence
  DNA replication origin
cttgaaagaaagaaaagaaaagaaaagaacacctaggtcgggtgcggtggctcacgcctgtaatcccagcactttgggaggctgaggcgggcgatcacctgaggtcaggagttcgagaccagcctggccaacatggtgaaaccccctctctactaaaaatacaaaaattagctgggcgtggtcgccggcgcctgtaatcccagctactcgggaggctgaggcaggagaatcacttgaacccgggaggcggaggttgcagtgagtagagatcgtgccactgcactccagcccgggtgacagagcaagactccatctaaaaaaaaaaaaaaaaaaaagaaaagaacacctgagctaaatttaagaagaaaccacctacgtcaggacctagaggaagagcagtgtcaagcaaaggaacagcaagtacaaagtcttgtggccagaataatgctgtactggcgagctagaagaataggacagaataacccgattataaaaggggcagtgggagagaaaggcgagtactaggagatgaagttgaagaattaagcagagaccagatcaagtactgccttgctctggccatgaaaaaagtatggattttagtctaagtgtgctcaagcatcagttttgtttgtttgttatttttaataagcaggggaatggcacaatctaatgtctgctcttagaagacggatagctgttacgtgggaattatttgtaaagaatgtgggaaaagcagaggcaagaaaggcaggccgaaggttattgcaacagccctggcaagaaagggtagcttgaattacaacggcagtggaaatggagagaagtgaatgggtttaggatatattttggccctgaaatggcagggcttgctgctggaatagacgtggggatgtaggaaagaggagtcacaggtaatccctcgagttccttgtactgtaactggagtatatctccctcctgagggtagctaaggaacgggttgggacagagggttggttttttgcaccaaaagatctattttggacatggacatgttatgcaaagatgctattatctcttctaggggcgatgcccgtgagcaactggataatcaaatctggagcatttcagtctcaaacacctcctcagagtgatcccaggagatctctgcagccacggtgacattttctttatctgaagcgatgacacagctcactgaatgccattcttccacatgctggaaaagcgaggtctagtgaacacaattcctttccgtgcggaaagtctgaaatctttttaacacttcggacacagagcatcgtaaggtcccagaatagagggtgtgagcaatttcagcgctcacctcggcccaagcgaagctccagcgggagcaattgagacccagggacgaagctagggagggcctggcagcccccggcactggccggcaggggtaacccaggaaaaacagtctcctggcctctcgttacccgcttcag

SEQ ID NO: 30088 - DNA, 1327 bp, Artificial sequence
  DNA replication origin
ggcgggtgccggccatggcggcttcgctcccgggacctgggagccggcttttccgcacatatggggctgcggacggcaggagacagcggcggccgggccgggaagccgcgcagtggttcccgccgcaggaccggaggcgtttcttcaacagcagcggcagcagcgacgccagcatcggcgacccctcgcagtccgacgatcctgacgatcccgacgaccccgacttccccggcagcccggtgaggcggcggcggaggcgtcccggcggccgagtgcccaaggaccggcccagcctgaccgtgaccccaaagcgctggaagctgcgagctcgcccaagcctaaccgtgaccccaagacgcctggggctgcgagctcggcccccgcagaagtgcagcacaccctgcggcccgctccgacttccgcccttccccagccgcgactccggccgcctcagcccggacctcagcgtgtgcggccagcccagggacggcgacgagctgggcatcagtgcctccctgttcagctctctggcctcgccctgccccgggtccccaacgccaagggacagtgtcatctcgatcggcacctccgcctgtctggttgcagcctcagccgtcccgagcggcctccacctcccagaagtctccctggaccgagcatctctcccctgctcccaggaggaagcgacaggaggagccaaggacaccaggatggtccaccaaacccgcgccagcctcaggtcagttctctttggccttatgaactcaggaacccctgaggattctgagtttcgggcagatgggaagaatatgagagagtcctgctgtaaaaggaaactggtggtgggaaatggaccagagggtccaggtctgtcaagcacaggcaagaggagggccacaggccaggactcttgtcaagagagagggcttcaagaggccgtccggagagagcatcaggaggccagtgttcccaagggccgcattgtgccaaggggaatagacaggctggagagaactagatcaagccggaagagcaaacatcaggaggcaacggaaacctctctcctccattcccaccgctttaaaaagggccaaaagctgggaaaagattcgttccccacccaggacctgactcctttacagaatgtctgcttttggaccaaaaccagggcttccttcagtttccacaagaagaaaattgtgactgatgtgtcagaggtctgcagcatctataccactgccacttctctctctggatccctcctatcagaatgttcaaaccggcctgtcatgaacagaacaagtggtgctccgtcctcttggcactc

SEQ ID NO: 30089 - DNA, 1391 bp, Artificial sequence
  DNA replication origin
agagttaaataacctgcccaaaggctgagagggctgagagctgaggttcaaacccagacgggcagactccagagcctgtgcccacaaccacggtgctggctccctccctcagtgcctaatgtctgcatggagctatttagagcagggcaaatgggtgaggctgggcctgggaccccagaaagcaggacagaaccctaccggaacacaaccgcctggcccagagtgcccacggtgatgtcggcaaggccgtcgccactaatatcaaagccaccagccatggacatgccgaagtactggagtcctggggccaccgtggaggctctgatccgctgtggaggcagaaacacaaggcgtggggcgagggaagggagggaaacggggcggggagtcctttcatgatctatcccgatcagcatcgcaggcaccatccagccccagggagccccgagtctagaaccaggaaagagggagcaagctttcccagaggaagtggcatttggatggagcctcgaagggcaggtgggacttgacaggggagagtaagggaaagagtgaggcatggggaaagagcagggccttctgagaagcagccagggccagggacggggtggaccacaggggattggggtacaaggaggcttgatgtggggcttggggatggggggtgtcaacaaaggttctgttgttttgaagtgacataatcaggataacactttagaaatggcactgaagacatggggtggaagatggagaggaggaggaagctgggtgggctgggagtgggatggcaaggcctgagctgggaccgcaggggtggggatagagagaaggggctggagttgggagacagctagaatcatgaggacgtgggaactgacaggctgtgcaggctgtgagcgtgctgaggactgtctgaggtttccggtgtggggtgtggagggggatgaggtctcagaggagcatcagttctaggggaagcaggtgctctcagatgggccgtgtgggagtgagatgcctgggggccatccaggtggaggtgctcatgaggagctggaggtgggtggaagtgcctgttaatacatgcagtgtgagaggctggcaagggagccctggggaatgagagataaggcgcggaggtgctgggtgggagacaggagcgagggacagaaagagaggaagcagggacccgaggcaggtgggtggaaggagggggtataggccagggaaggagacaggtaccgccacaacctcccctgaacctgaaggggccgaggtgaagccctggtctggaacctccccccaacctgaaggggctgaggtgaggccctggtctggaagctccccctagcctgggggacttctttctttcactgggcattcccaacccccga

SEQ ID NO: 30090 - DNA, 1314 bp, Artificial sequence
  DNA replication origin
gagacccgcggccaccgtggcccggccttgggtccctcccactcatctgggccccatccccgtccccttcagcggcaggtgctgctcggcgccgtcggggcctttgactggtccggaggggcgttgctctacgacacacgcagccgccggggccgcttcctgaaccagacagcggcggcggcggcagacgcggaggctgcgcagtacagctacctgggtgagggcggggccacctgatgagggcggggccacctgatgagggcggggcctggaggctccctgggcgagggtggggcctgagggctacgtgggcgagggcggggcctacctgggcgagggtggggcctgggggctacctgggtgagggcggggcctggaggctacctgggcgagggtggggcctgggggctacctgggtgagggcggggcatggaggccacgtgggcgagggtggggcctgggggctacctgggagagggcggggcctggaagttacgtgaggagggtggggcctggagaccacctgggtgagggcggggcctagaggccacctgggcgagggcggggccgagatggggacaccgaggctgcgcattaggctgcacttgaggtttccggatgggggcgggacctggtcagtcacatgggccgaggggcgggtcctggttagggaccgtgaggctgagtactacagcctcctgggtaggtacaaggcctgtcaggtacacaccaggcacagcagccacccaggggagggcggggcctctccattaataatagtggtgcagtagctcacgcctgtaatcccaggaggccgatgcgggcggatcatctgaggtctggagaccagcccggccaacatggcaaaaccctgtctctactaaaaatacaaaaattagctaggcgtggtggcggatgcctgtagtcccacgtactcggaaggctgaggcacaagaatcgcttgaacccgggagggggaggttgcaatgagccaagactgtgccactgcactccagcgtgggcgacagactgagactctgtctcaaaaataaataaataaataaataaaaataataatagtggtgggcgtcctctcacccctcttctccgtcctcctagggtgtgtgtgggagcgtgggtagtgaatgtgtgcgaacgagtatttcgagcaaagctgcatacgtgacagacagcgtgtgcatcatatctgtgtgatggggatgtgtgtgactggcaaagtgagagtgctcgctgatgccgatttttaacatagtgagaaagacagtctctcctattttgcccccctccccaggc

SEQ ID NO: 30091 - DNA, 1267 bp, Artificial sequence
  DNA replication origin
aaaataggatctacttcatagagttgttctaagggttcgagcgcttggaagtgtctggcccatagtgatcactcaggaaagttggcttttagtacagctttagcctcaaggcgtagctacattgtaacccttgactaccccggtctcctccaagctccgtagttcccgcaggccccgcccccgtccccgctcagtcccgccttctcctccccaggtcccgcccgcgcagccggcccggttttctcccgccaccagggggcggcggcgctaagggcggccttctgggccgaagccggcgacgctctaggtagctgcggcggctcctctgtggccagtggcagcggcgctctagccggcggccgtgaggggcgggctctcagtggtgcggccggcaggcagcgatggcggccgtacggggcctgcgggtgtcggtgaaggcggaggccccggcggggccggccctggggctcccgtcccctgaggcggagtccggtgttgaccgtggcgagccggagcccatggaggtggaggagggcgagctggaaatcgtgcctgtgcggcgctcgctcaaggaactgatcccggtacgggcgggggtcggggggtaaggaagaggtcgcggggctagtgtctagcgccggagggggccggaaggggcggtggccggagccccagccggggaagtcaagggagcgggagaggagggagccagcgtcctgggaacgggaacgccgggctggaggagggacgcggagcgggagaaaggacgccggggcgccggaaatgggtgttgagggggctggggggtggtggcggagagctgggagggagttgaggacccccctccgctgccccctctgagccgcgctgtgcaaggaggtgagtgaggaggggctggaaggatgagataaagggggagccctgggcgggaacagaaccaggggcagcccagaaggagctgttgggtggcgccagcaaccaggtctccttgtgggtcttgccccggaggaatttgtatctgggaaacatggcactcgctctttgtcttgagagggctgcacttgtcagcagcagaaactcactgtttctgtcgtgacttcggggtcatcttgccccccccgcagctccagtgacacctacaccgtggccccagcatctgactcttaatgaaagcaaactagcagacgaccaatagacatccttggtccctcctttaccgcgctggggatggtgagaggtgttttgcttgtgacttggtggctgtata

SEQ ID NO: 30092 - DNA, 867 bp, Artificial sequence
  DNA replication origin
agcctggccaagagggtgaaaccctgcctctactaaaaatacaaaaattagccaggcatggtggtggcgcctataatcccagctacttgggaggctgaggcaggataattgcttgaactcgggaggcagaggttgcagtgagccgagatcgcgccattgcactccagtctgggggacagagcaagactccgtcttgggggtggggggaagaaagtgagggagatggagagagggagaatggagaaggtgagggaagatggtccttgcaagaagttagctatggccggacgcggtggctcacacctgtaatcccagcactttgggaggctgaggcgagtggatcgtctgtggtcaggagttcaagaccagcctggccaacatgatgaaaccctgtctctactaaaaatacaaaaaaattagccaggcatggtggcgggcacctgtaatcccagctactcgggaggctgaggcaggagaattgcttgaacccaggaggtggaggttgcagtgagctgagatccagcctgggcaacagagagagactccacctcaaaacaaacaaacaaaaacaagaatttagctaggcagtggatggggcacatagatacagtgcccccaccagggtcagctgcctcatgacctcttcttcaaccacggaagcttttcctgaatgactgatgggcgtgcgcatgttgcaaggacactcatgaaccgaggagtgtgaggcgtgcaggtcgcgggcacccagcttcagactgcactaaagaacatccctgcttcaatcagcagggcatcagctcaggcaagtgcaccaggttaccagccctcagggagcatctgatttctcctgaggagctcacattacct

SEQ ID NO: 30093 - DNA, 840 bp, Artificial sequence
  DNA replication origin
ggtgcctgtcaccatgcccggctaatttttttgtatttttagtagagatggggtttcaccatgttggccaggctggtctcgaactcctgacctcgtgatccgcctgccttggcctcccaaagtgctgggattacaggtgtgagccaccgacagcaggggttgacatgaatagccctggtttagaatttggtaaagggaggtggtggctctggggttctgtgttactaaatctagtatgggcaaaagtctcatttccttttgatatgtccatctgtctgtcatccatccatccatccttcaatatttgtcccgggccttctgtaaccaggctctgagttagacactaagccaaaccatcaccgtcgctgctctcatggttctcgcattctgctgcaggagacagacacgaatcaagttgccatgcatgtgcttggatgattttgaagcgacgggcgctttacaggaaaggcctgtggtgagtggctctctgagagtagtcaggaaggcttcccagaggaaggaaggttccagctgtgatctgaggttcagacagaactcactagaccaagggaaggagggggaagaaagctctgagcagggagcctggcttgtgcaagggcctgtgggaggagggagaatggtgctttccaagaaccgaagtgttgatgctgggagtgaggagagagtcgtgagagatgaagctggagagcggacggggctgcagcatgtgtaccgaaaagacagatcactcaggccaggcgccgtggctcatgcttgtcacccaggcacggtggctcatgcttgtaatccggatgtggtggctcatacttgtcatcccag

SEQ ID NO: 30094 - DNA, 1158 bp, Artificial sequence
  DNA replication origin
cagcacatgtttcagagagcacagggttgggggtaaggtcacagatcaacaggatcccaaggcagaagaatttttcttagtacagaacaaaatgaaaagtctcccatgtctacttctttctacacagacacggcaaccatccgatttctcaatcttttccccacctttcccccctttctattccacaaaaccgccattgtcatcatggcccgttctcaatgagccgctgggcacacctcccagacggggtggctgccgggcagaggggctcctcacttcccagtaggggcggccgggcagaggcgcccctcacctcccggacggggcggctggccgggcggggggctgactcccccacctccctcccggacggggcggctgccgggcggagacgctcctcacttcccagacggggtggcagccgggcggaggggctcctcacttctcagacagggcggccgggcagagacgctcctcacctcccagacagggtcgcggccgggccgaggcgctcctcacatcccagatggggcggcggggcagaggtgctccccacatctcagacgatgggcggccgggcagagacgctcctcacttcctaggtgggatggcggccgggaagaggcgctcctcacttcctagatgggatggcggccgggcagagacgctcctcactttccagactgggcagccaggcaaaggggctcctcacatcccagacgatgggcggccaggcggagacgctcctcacttcccagacggggtagcggccgggcagaggctgcaatctcggcactttgggaggccaaggcaggcggctgggaggtggaggttgtagccagccgagatcacgccactgcactccagcctgcgcgccattgagcactgagtgaaccagactctgtctgcaatctcggcacctcgggaggccgaggctggtggatcactcgcggttaggagctggagaccagcccggccaacacagcgaaacccgtctccaccaaaaaaatacgaaaaccagtcaggcgtggcggcgcgcgcctgcaatcgcaggcactcggcagggtgaggcaggagaatcaggcagggaggttgcagtgagccgagatggcagcagtacagtccagcttcggctcggcatgagagggagaccgtgga

SEQ ID NO: 30095 - DNA, 1093 bp, Artificial sequence
  DNA replication origin
cctggctgcccagtctggaaagtgaggagcgtctctgcccggccgccatcccatctaggaagtgaggagcgcctcttcccggccgccatcccacctaggaagtgaggagcgtctctgcccggccgcccatcgtctgagatgtggggagcacctctgccccgccgccccatctgggatgtgaggagcgcctcggcccggccgcgaccctgtctgggaggtgaggagcgtctctgcccggccgccctgtctgagaagtgaggagcccctccgcccggctgccaccccgtctgggaagtgaggagcgtctccgcccggcagccgccccgtccgggagggaggtgggggagtcagccccccgcccggccagccgccccgtccgggaggtgaggggcgcctctgcccggccgcccctactgggaagtgaggagcccctctgcccggcagccaccccgtctgggaggtgtgcccagcggctcattgagaacgggccatgatgacaatggcggttttgtggaatagaaaggggggaaaggtggggaaaagattgagaaatcggatggttgccgtgtctgtgtagaaagaagtagacatgggagacttttcattttgttctgtactaagaaaaattcttctgccttgggatcctgttgatctgtgaccttacccccaaccctgtgctctctgaaacatgtgctgtgtccagtcagggttaaatggattaagggcggtgcaagatgtgctttgttaaacagatgcttgaaggcagcatgctcgttaagagtcatcaccactccctaatctcaagtacccagggacacaaacactctgcctaggaaaaccagagacctttattcacttgtttgtctgctgaccttccctcctattgtcctatgaccctgccaaatccccctctgcgagaaacacccgagaatgatcaataaaaaaaagaaagtcacctggagagctgaaaaggttacatactatgtgattccaacaatatgatattctggaaaaggcaaatctatggagacagtaaaaagatcagtcgttatcaaagggagaaaggagggggagagatgaatgggtaaaggac

SEQ ID NO: 30096 - DNA, 933 bp, Artificial sequence
  DNA replication origin
gtgagccaccacacccggcctaaaataattttttaaatataaaatatatattttaaaaaatcctgacacccagacggcatccttgaccatttgaaccagaatctctgaaggtcgacccaggcatgaggattttttaaaagctccccaggagattctagaactaccccttcgaactgaatggggctggggtggagggagcagacagactgcagtggggagccctttctcagctttggggtgggtttccgagggaggtagatggatattggcacagattgccttaaaggagcgggagcgcctgagggcatggagaatctcgtccttgtgaaagctccagtgccttaggcacggtccctcttggactctggtggggaccgagtgagaagtttggccggtgccctcctgtgctgtaattctgtatcaatctggtgaccatttcaatgaacccacctctggatttttccagctgctgaacaggccttggagggcggggtcaagcttgacaagcaggggcagggattgaggggaggcagtgtcccgccggaatggctgggcctgaagaggaatgggagcaaggtgagagggtgggacatgagtggggagggcatccagagaggctgacggggccttgagcaccaggctgagcaccgtggggaccatggcagggttctgagaggggcatggtcaggtgggtgctcagaaagatcactcgggcagccagggagggcatggaccagagggccaaggaccaaggctagaagaccagtgaggaggtgagagatggcgaggctgcatttgaggggctccagtggtggggaggaaatgagaacaagatgggcttattggtcttggtgtctggggagcttcagcctgaccaccagcacccctcctggagagggcatggtacagcccctcacgggagctttgtgggac

SEQ ID NO: 30097 - DNA, 1159 bp, Artificial sequence
  DNA replication origin
ggcctttttgtggggtggggcgggcggtggactccactgggcatgtgccagatccttcgtcgtgtctggtcctgtgggtctgagtcctggctgttctgtatctttcttctgctgagttcttagcctagcttagcgttgccacggggcttcaagagatgtgggaaggaagggatttatgtccagctgctggggagagtctgtcctggcatggggccggggcatggtggcagggtggatttacctgtgaggggccctagtctgataagagctcaggagggtgatgtgagcttggcctctgtctcatttcattcattagctacattcacttgcctgggggcataggggtgaaagacccagacccgagttcacggcctagtgggagggacaggaatctaggcaggcagataatacagcgtggtgcctgccaaggctggggagcctagaggctgtaggagtgccggggggctggggaagtctccctgaagaggctacttatgattcgggtcctgagggatgagtagacttccctgctcaggttttgagggatgggcgtggaagacgatgtgcctggcataggcgtgtactctgagtctggggagaagtggagtctggctgaagcctccagtgggcagaggagggccgtggttagtgaaagatgatgctggaaacactgtccgggccacagcatgagggctgggaatccctcccctgaggtctttgctgactgcatcctgccagctctgtgaggccctgagagctttaagcatggggaggggcgtgatgggatttgtgcctgagaaagctctgtctggcagctgtgtggtggctggattggagtgtgtcatcggagggtgagaggcagccagctggccagggaggaggctgtttctgcagcccaagtgacagatggtgaggcctggattaaggcagtggcagcaggatggggataggaaggaggtggggtggtcagcatggagtgacttgccggtctggggagaggagagcccctagacacctagggtcctggcgtgggttggggaccaggggagatgcccatctctaaaatcttagcttgggccaggcgcaggggctcatgcctgtaatcccagcactttgggaggccgaggtgggtagatcacctgaggtcaggggtttgaga

SEQ ID NO: 30098 - DNA, 1019 bp, Artificial sequence
  DNA replication origin
cgtcaagcatgacttggcaccagacgcctgggcctccctcaaggggactgagtcatcccgggtgggggcgggagctgcggagggcacccgttgccagggccatccagatactcgccaggatcataaacacagctccagtgaggcggcccaggcatgggaggaccaccttctgtgtctggcctgggtggccgccacctctgcggctttcccttctgttcggtcctctgctggtcacggctgtccatcccctcgcctggatgtagctggtcccctgcctcggcttggcactggggttcacagcggccttccagcgctcagaatgaggcctgaccagggcctgaccagctcccaggtggagctacttgaacccgcgtggatggcagcagggtctgcctgctctggggctcctttgagggatgcagctggatggggcatgtcctgtggaagaagccaggccaagtgggcgtctggagccgggggcccacattccttgggagtggccagacgcttggggggtggggcacagcctgggaggaaaaacctgggtgggggatatgtgccaggccatcttggagctgggggcagaggtggggttggaccttgcacatcaaggctctcttggacgcttctagacacagccacatcccagccccacagtgctgtggcacaaactactcctgtgtccacacctcattctgttccttccatcgccctgggagttggcaggacagtggccttctgcttgatgcacgtgttaggaaacagaggctccaagaggctcgatgacttgtccgaggcagcagatccccagtctggggggacaggattgcagtagtttttcccaatgagggagggcttgagtctggctgttcacggccgcaggactaagccagtgcccatgcccacaggaatccttcgctgtaccatgggcctggttcccggcctgtctgtccatctttctgtttgcccacatggccctagttatccaccgaattaagtttctacagagtatctactaa

SEQ ID NO: 30099 - DNA, 1282 bp, Artificial sequence
  DNA replication origin
tgttgcttcttgcccccacgagaaattaaactgtatgagagcagagacttggtctttttggttcactgctgtatctccccacacaggcttgcacagagtctggcagacagcaggtgctccgtgactatttgtgcttgcatcccaggcgtccatgtccctggctgctccctagcctgtgaccccccccccaaccttgcccccagtctgaggccacttctgctcctctatccatgacattccgagttcctggaaggccaggtctgggagaactataaccacatttgcatgttggaaatccctccagcagctggtgtggaggatggggtagggtggggtggaggtgttagcctggagtcagggaagacccacatagtgggaaacgaagcagtgggtagaatctggacttctaaggggtttgacttggtgagctcacccagcaggtagtggggagatcaaggagggctcagaagaggcgatgtctgagctgtcctccaggcagcagaggagagggaggtgtgttcctggcagaaggcacagcttgtactgaggcctggcagcagaacagagtatgcaatttgggaagctgtggtgtggctgcagtggagagtaagtgtggggttgtggggagcaagggtgggcaacagggaaaggacgagtgacaaggagggctcccggattgctgacctgggtcaggaaagaatggggagggtgtggtacccgtctcgcaatggagacagaggaggacgagcaggtttggggaagatgctgagttgaatctggggcctgttggatctgagctgctcgggaacatggacggggaggtggcagctagctggaaagagtggggctggaggcacagacctggtgtggaggatgaggaggggcagaggatgaggcctggagaccatcagcctccgtgggtgggccaggacgatgcgctgggggtagctgtgctgagtcaggcaacagcccgtattggtgcttgggggctccccagggatggtgggagcgggcgtcctcacagcaggagtcgtcaagcatgacttggcaccagacgcctgggcctccctcaaggggactgagtcatcccgggtgggggcgggagctgcggagggcacccgttgccagggccatccagatactcgccaggatcataaacacagctccagtgaggcggcccaggcatgggaggaccaccttctgtgtctggcctgggtggccgccacctctgcggctttcccttctgttcggtcctctgctggtcacggctgtccatcccctc

SEQ ID NO: 30100 - DNA, 1593 bp, Artificial sequence
  DNA replication origin
tccctctcctctgctgcctggaggacagctcagacatcgcctcttctgagccctccttgatctccccactacctgctgggtgagctcaccaagtcaaaccccttagaagtccagattctacccactgcttcgtttcccactatgtgggtcttccctgactccaggctaacacctccaccccaccctaccccatcctccacaccagctgctggagggatttccaacatgcaaatgtggttatagttctcccagacctggccttccaggaactcggaatgtcatggatagaggagcagaagtggcctcagactgggggcaaggttggggggggggtcacaggctagggagcagccagggacatggacgcctgggatgcaagcacaaatagtcacggagcacctgctgtctgccagactctgtgcaagcctgtgtggggagatacagcagtgaaccaaaaagaccaagtctctgctctcatacagtttaatttctcgtgggggcaagaagcaacaaacaagaaagccagtgattcagatatgatatgtcaagtggtacatataggaagaaaaatacagccgagtaagaaggatcaagagaaaggggctgggagatgctgctgatacagtgtagttgaggaaggccttttgggagcaggactggagcagacacctgaaggaaggaaggggcagtaggcagtgtagttatctggggaagagcatttcaggtgcagggaccagcaggtgcaaacgccatgaggggacagtgcttgctcagtatgaagaacagcagggaggctgacgtggctggagtggagtcttccccacataagaggcacctgatagcaagaggagttacatctggagagaaagccccctcactcattgtgctggcctcagggatggcttcctagaggaggtggcacctgagctctcttctgagcactgagcaggatttcaggatgaggcgaggatggaagtttgcactgtgcatataggagagtcatttcctggctgggactccgggcttggtttgggggtggggagagcttggtggacagagcccaggaggcccccaaagccagggggaggttgtgagcaggggagtgcctcggttaggtgaggtttaaaacgactcccatggctgctgtgaggactgacggtgggagaccgaggaagaggcgaagggtccccagagtgtgtgcgcctgggacgcagtggggggtcaatttgtatgtactggaggaaagagggcagggcttggggaggccagcgccacttccctgggatcctccagcgcgcacaggctgtgtgcccctcccacactcctgtgcccgccctgcggacaccaccaaggcccggtcctgtggcctgtgacacagccttctctgcacagccctgcaacgccaagacttgagcacaccccctcccctgacaggcacacgcccgtgtccgcgtgacccgccctcacacaccactccatcctgtcctgcaccccccacgcagacacaggcacactcccgcgtccacgtgacacacgcacacccgcctccaaacagcacacgcaggtccctgcgcacgtggacacccccccagc

SEQ ID NO: 30101 - DNA, 1798 bp, Artificial sequence
  DNA replication origin
attggcctccaccccaaccacttctcctaggtgcccttgccaaggtcactggcagtgtcctggttgccaagtcttaagcagacacttgggccccatatcctgcttggcctgacagcttctcacattgttgtccaagccttccttgtcgaaagatttccttccagcagctcctaggacacaccctttcctgacttcccagcctgtctggcgtgcaaggaaaagacaggtttcaattgcagctctgccacagttcactgtgtgtccttgggggaagtggcttaactctccaagcctcctctgtgagtcaaggataataacaacttctttttttttttttttttaaatagagacagagtttcactatgtggaccaggctgttctcaaactcctgggctcaaatgatacgctccacctcagccttccaaagggctgggattaccggcatgagctactgcacccggacaataatagcttttagtagggttgaggaaagacctgtaaacagcacctggcatacagtcgagctctgcccctcaatctatccaccctctcaatggtggagtccactagttgttccggatatctgttctcccggtagcaattcagtccttggttcttggttgggcatgtggctgcccagaatggaagctgcatttcccagctttctcttgcagctgggtctggtcatgttaagtaagctcaagcggtgtatgtgaaagtgccacgtggcaacttctgggaactttcctgaaaagagagctggtgcagaccctctgccctcttcttcatccttttctccactccactgcctggaatgcgttatgtgattgctggagctctagctggtatcctgaaccatgaggtcaaaagccacactcaagttgctggaattattcattcaacaacatccactgagcacctgtgccatgcgacaggctgtgtgctggacgaatcaggcacagtgcttgccatccaggagctcccagtcccaatgaggaaccagcaggtaaacagatgccaggtacaaggaagtacctgggtggggccactaacccatgctggaagtggggaggtcatggagaaggtttccaggcagaagtaggattgaattgaaccctgaaagacgagtaggcgttaaacaggcaggtggctgggagtaaggctatacagggcttgattagacctattctcacggtgagccatagaaaatgcctctcggtggacttgtgttcctgaaaacttgctctgggtgccagggagagaaaggctagtaggaggtgagactggatggggctggaggccagggaggaggctgctgcagcaatcagggacaagatggtggtagcctgagctaagggaggggaagtggggtggagaggagtgggccgattccagggatagttaagaggcagtatggcagggcctggagatggactggttggagcaggaaacagggaggcagcaggtgactcccaggctcctggctccacttcgagacagggacgcaggaggttagatttgggggaaggatatggggcaagtggtggtgccagaggattcacacgcggaggcgttaggggaagaggtggcggcagagtccccaggaacagccacagcgaaggtcacctcactgtcctgctgagttccctctactccctcggccctcgctaggccattcctgtcgccggctcaccgagcaagcacttcactctgtgctaagccacctctcggcctctctgcccccgccccgcagaagctacactcctgggcctgccattcaaggccttcctccccgggc

SEQ ID NO: 30102 - DNA, 1176 bp, Artificial sequence
  DNA replication origin
ttgtgatggggagtggggtgggtgctgagactgtgtgggccattctgggtcccttttcagccacccttctccctgatatgcgttctagagagtgggtggggtgggagggaacggagggaggaagggagggagggagggaaaaggaagggaagggaagggagggagagagggaggaggaaagggaagggaagggaggaaggagggaggaagggagggagggagaaggaagggaaggaagggagggaagggaagagagggaggggagggagggaggggagggagggagggaagggagggagggagggagggaaggagtaaaggaaagaaggaagggagggagggaggagaaaggaagggaaggggagggagggagggagggaaggaaaaaaggaaggagggagggaaggagggaggaaagaagaaggagggagggaaaaaagggagggaggaaggaagagggagggagggaggagagagggagggagggaaggaaggaagatcaggaagttcttcctctcacatcaccaccatgtcttcttcctcctcctcctcctcctcctcctcctcctcctcctcctcctccaaggagccacacttgctgacagagagattgacggatggactgacagacttgcttggacagattgatggactgacagagcacacacacgtgattcagttacagcctaggccctggccctggccctgagaaagtggactggcctggagcaccgtctcatttggggatcttatcatatccacagtgtaccccagggacctacatttattttcctgctgctgataactccacaagagcaagacagccagctgtcggggtcaatgtctctttcactggctctaaaatgcatctttctgatccaaaggctgtgatttctcacccttgggccctgccccagcgtcctcagggacagacacctgcctttgttctgggtgtttggggctgaggtgggcaggacagaggccagagctccaccctctggagtctggcagggttttcctcacaacaggcccatgaggcaggtcctagagcccacatctgacagatcaggagactgaggctgtggggattgagtccctggcccatggtcacacagtgagtagttcccatgtctgctggtggctgagaaggaggctccccaaagtctgagggcttgg

SEQ ID NO: 30103 - DNA, 676 bp, Artificial sequence
  DNA replication origin
ccaggcaagggctagggctccatttacggatgaggagcccgaggcccagaatgggcgggccatgccttccccaaggccctctgacgatctgagcatctagcttgcatcacgggggccaggcaggctgtgaggctcagatgggctgggggtcctgcggacaaggcggtcggctccaggcttcccagccacgctgcctccacccccgcccaggccggcctgagtccagctccgtccagcccacagcacggagccgacgggccaggatggggcggccaaggtaaacagaggtctccttacctcacagctggtcacccaggagggaattccggggcaagccctggcacgcttctaactggcaactaccaaaaccctcctggggaccctgcccctccagagaccaggactctgtgctccccagaccccacgctccagtcctcacagtggtgggagggaccccggtggggctgtgttaggagaaatggaggcacaaaatcacagcagggaggagaagggaagctggacatgcgcacaaaggcccccgagtgtccacagcggcttcacccagcacaggcctcagatatccatgaacagatgaaggataagcaagctgcagtacgtccacgcaaccgagaggaaccaaccactgatgcacgcaactgccacccgaagcctaaac

SEQ ID NO: 30104 - DNA, 1287 bp, Artificial sequence
  DNA replication origin
ggtggaggttgcagtgagctgagattgagctactgcactccagcctgggtgacagagcaaaactctgttcccccactctcccccaaaaagagagggtgagactaacaccaggaggtgggcgagcggcattgaacagatctggggagctggccccagaaagcacctccacctccacctccttgagatgttgacggtggtccctgtgaagtttggcttggaaaggtggtgcctggctgctggaggacagacacaggctgggtacctgcggctccatctgaggggtggggtggaggcaccccgaggaatgtgctcactggaagcccagacagccctgcccagcgctactgcagtccctggggcctcctaaagccagacggggcgggggtgagagagggaccctttgcgctcccaagccagctgggtggccttttagggaagtttttctgaagcctgatgcttgtggcttccccgtgatttatgtcatttacgagggatgtgtcctggggagaattctggatcctgggtcagccctgggggctgggggcggtcctctcaccccacctcctggctctgcccaggtgtggctgagcagttgtcaggggaggcgtgggggctgggctgtggtggttgtattggggacagatctgggaggttacaggcgggcttagactttactctgaggacagtgaggaaccatgaaatggggtgttgggactggatttcggcttttgcttgatgctaggggcagaagtatgatgggacggtaagactggggctgggggcagggcggcaggccttgaggccttgaggcctggttggggaaggcagtgggagagatgagctctcgcaatttgggtgaaatcaggcctgggtgtgtgtgatgggcaagagaagcaaggatgagcctggtgtctgaaccttacgataatgggtggtgattccccaaaatgaaaaccaggagagtatgtactggagggtttgggggtgctgatggaacagtggagtgaaggaggcgtgggggacgttgcggggatggatcctggatgcagcttggggggtccggtggggctggggtagactgaggtctggactaagggaggccttgggagcctggggctgtcctgggagaagtggaggatggaaggggctggaaggaagctgtctggatgtgtgcccttacacatacatcttaacgcgctcttgggtttttcttccagaagaaatgagccagaagtgagcgctgggaacagagtggagtctccggtgtgtacctcagactgatggtgc

SEQ ID NO: 30105 - DNA, 740 bp, Artificial sequence
  DNA replication origin
ctcggagaaccagtcgctgctgcggatgccgccctggatgaacccctggctgctggtggctgtggccatgtccatggccctgcacttcctcatcctgctcgtgccgcccctgcctgtgagtcaccccgcctgccccactgccctggtccctggacatcacaggccctgggctggtcactggacctctctggcccccctgcaatggaaactacctggaggagagggaggtgagaggtctggccagccaccacctccagctgtggccccaccttcaggagctcccagacctgggggacggaagagggggaaaccccttgctgaggggactgtgcccaggctggggtgggaggaaggacgagctttcccagggcagaatcctcccgcctcccaacaggatggatgggagttgacccagtgggcaagggcagaggtgggcccttgaggcagaggaagctgagcggacaaagattggggggtgcagctgaacagacaaagatcggggggtgcagctgagtggacaaagatcgggggtgcatccagggggttcttaggagcgctcatgaagagtccatcagagcccaggtggataaggccagcagatggctggggcacgggacagccagtccttcctttaaccaaacctcccttcccctccccgccagctcattttccaggtgaccccactgagcgggcgccagtgggtggtggtgctccagatatctctgcctgtcatcctgctg

SEQ ID NO: 30106 - DNA, 1296 bp, Artificial sequence
  DNA replication origin
gcactcctgctccagaacgtctgcctttcccacgctgtgcccttgcttctccctggcacggtgcagctctccccaccgccgccccgaccccgcacccctcccgggatccccagcccaccccacggcagtgttttgtgtgctggttgtgcccaggcgtgggccaagggcaggatgaggcttccctcctcccacccaccagcccctcgcctgacctgccgctctctctgacctgccacggtgcccccagaggaacttcctgaagtgctccgaagacaacccgctctttgccggcatcgactgtgaggtgttcgagtcacgcttccccaccaccatggccttgtccgtgctcgtgaccattgaaatgtgcaatgccctcaacaggtaggctgggcgcagggcctggagctggggccgaggagtgggggctgagggctgggggttccagtatcagtgtctgagggtcaggggtccaggtgggctgggcgcagggcctggagctggggccgaggagtgggggctgagggctgggggttccagtatcagtgtctgagggtcaggggtccaggattggggtctgtgggtcaagagggtccaagattggggtctgatgtttggggggttcaggattgggatcagaggttcaagggggtccaggattggggtccagaggtcaagagcatcccagactggggtctaggggtcaagagaggtccaggattggggtctggggtcaaggggttcaggttggggtctgatgtttggggggttcaggattgggatcagagggtcaagggtccaggattgggttccaggggtcaggggagtccaggactgaggtctgggagttagaggggtccagaacaaaggtctggggccaagcggggtccaggattagggtctgggggtcagtgggggtccaagattgggatccaaagatttggggatctggattggggcctaagggtcaaaggggcccagagaggattctgagagttcatggggaccggaattggggcccaggagacaaagaaggctgaaactggggtccaaagaaatcggccaagattaggtctgaggggcagagaaaggggtcccagcccgggacaggccctggcaggccgagcgggcaacagcaatgcaccgctagagaagtggtgaggctcctcccatgggggtgggtgcctggcagggcctccctgcaccccggcctaaggggagcaccctgtgccctggcagcgtctcggagaaccagtcgctgctgcggatgccgccctggatgaacccctggctgctggt

SEQ ID NO: 30107 - DNA, 2108 bp, Artificial sequence
  DNA replication origin
ggaccctgcgttctatttccctcctggtgggcacggacggccaggccggtttggccctcggtcgggcagggggcctgcaggaccccaccctggggtcgactggccgcccggggaggagggaggcgaccccgcccgcctaagcacgcccctgcgctccccagatgttcgtggtagccgaggccgatgcgggctcctgccttttgcacgagttcaccatctcgggtaccacgtatacccccgagggcgaagtgtgagtgcggggccaggggacgcgcgggcgggcggcctgggggcggggccacgcgtggcggcgccgaggtggccgtgggaggcccctgggggcgggccaggaggcggagcctctcccggggcggggccaggaggcggagcccttctgggggcggggccaagaggcggagccccctcctaggggcggggccaagaggcggacccctctcgggggcggagccgaggtcctcctggtgaccgccccggctccgcaggcggcagggggatcagcctgtgcgctgcggccagttcgacgggctggtggagctggcgaccatctgcgccctgtgcaacgactcggctctggactacaacgaggtgggcctcaccccctttcatgacctccctagtatccaggcgaccaggacagacccttttcccagcctcaaagctcccagggttggcagcccttgctccctggaagtgccacacccagggagcacggttacccctgcacacccctctctgccgcccctccctttccgcagacaggcttcagaaccctccccctggggctcttggtctgtgggggactgccatggaaggggctgaagggctggggaaacctgtggggggaagagatttggggaacaggaccaagaaaatgttgaaagcagaagacacagcccacaaaaggcccacgttcagttaaagcctcctgcgacttaggcattcacgtggccggggcagtggaatggggcatgcagcaggcgtctgcccaaagggaggtccttggccagacccagtccgaggccaagctgagggcagtagagcaccaacgaagagttttgagcaggagagtgacatagtcagatgtgcatttacagaagatcactgaggcttccgtgtggaggccagacagacagtagaggaccgaagccagggaggcctatgtggtcattcaggccagagagatgcgggctgagccctggctggagccttggggagaggggagaaggtatgggtcagagacatttaggagccaaaaatcctgggacttggtgactggttaggtgaaagagacagggaggaagccaggggggctcctggttcttgtgctgtctggggctgtcgccggagtggcaaatacagagagtgggagaggtggcctgaggggtccccggggaacaaggttcagcaggcagctggacatctgggcttggggctcagcaaagggccccagggagagcaggtgggagggtggaagcgggcccagacagcagaaaccggtgaaggaggctgacaggaagtggacagagatgcaggcggagggcagggacggtgtgtggcgatcaatgccagtgtggggggctgaatgtcagtgtcagacaccaccccgaccccagggcggccaggctgggaagggctcacgggccggtgcaaaggaggttacacggaactccagcaaaggcagctgcaggggcaaggagtgagtgaggctggggatgcgggctggaggctgcctgcccctcactccctatcccctgggtccttgccaggccaagggtgtgtatgagaaggtgggagaggccacggagacagctctgacttgcctggtggagaagatgaacgtgttcgacaccgacctgcaggctctgtcccgggtggagcgagctggcgcctgtaacacggtgagcagggctgggggctcaggcctccggctgcatggctggggcttctgggacatctggagaaggcagacaggacactgaagtttttgttttgtttcgttttgtttttttttttttttgagacggagtctcattctgtcgcccaggctttagtacaatggtgcaatcctggctcactgcaacctctgc

SEQ ID NO: 30108 - DNA, 1808 bp, Artificial sequence
  DNA replication origin
ggagaggctcaagttcagccttggcataggggccaagctgggcctggatccgggttccatcctgccccatcatgactctgtgcagtcgacacctgtcaccagataagccagctccggtaacctgggaagggccagggcaggaattattcattccctgcacttcatcccacatcctgggctcactgcccacacggccaagggattctggctgagacttcagcaggcccatggggcagaaggctcctcctgacccagcagatgggtgggtggggagatggtgaaggctatgtgttccccacccttcccaggtccccagtgcctctctgtcacccctgcttccacatctgcccactgggcttggaaacccaggctctgtattctgagaccctaaggccttctgggagcccatcaaaggctgctttaggggaggggtgctaccgagctttactgtcctgctaaaagccctcataggattttatttaaacagagtgtttcttgactaatagcgatttttttttttgaggcagagtctcattctgtttgttgtctaggctgaagtgcagtggcatgatctgagctcactgcaacctctgcctcccaggttcaagcgattctcctgcctcagcctcccaggtagctgggactacagacaggcatgcaccaccacacccagctaatttttgtattttagtagagacggggtttcaccatgttggccaggctggtctataactcctgacctcaagtgatccacccgccttggcctcccaaagtgcagggatttcagccctgagccaccgtgcccggccctaataaatttttttttttttttttttgagatggagtctcactctgttgccagactggagtgcagtggcacgatcttggctgcaacctccgccttctgggttcaggcgattctcttgcttcagccacccgagtagctaggactacaggcgcgtgccaccacacccagctagtttttgtagttttagtagagatggggtttcaccatgttagccaggatggtctcaatcaagcttgacctcgtgatccacccgcctcggcctcccaaagtgctgggattacaggcgtgagccactgggcccagctaataataaagagttttaaagtgcagtgtggggaagttgtaggggccttacgtgctggatgctgggctgtgcttgctgggtgactgcccccaggagtagggaggagagcgggaaggaagggacacttatgcatctactgggcgctgggctggccatttgcttgagaatgtgcggtgaggccatgtccacgaagcaagaactgtctccccagcagagctggctgaacagacaaagaaataggcatgctgggccaggtaagcctcctgttcctgaggtgcacaggtgggggctgagtgacccagcaggccctgtggcaggggctcactctctggggacatctctgggctagaggggtctgtgccccagagaggcgtgtgggtttcctcccttgaaggccaggaactcatttccttgaaggcaaaggagggggcggttcccatgttactagtggagaaactgaggctcagctacttggccagggatcgcacagtgagatgggcaaggacccaggctttctgcctagctcagggctccctcaagctggcaactgcccccagagcactgaagaatctgccataaatccctcagaagtccaggacattgggacaaaccggagccggacacatctggcagagcagacggtccctgcctcagcctggaccctgcgttctatttccctcctggtgggcacggacg

SEQ ID NO: 30109 - DNA, 2361 bp, Artificial sequence
  DNA replication origin
ggccccgcgccgccccgccccggggagggagtcccgggcgcagcatcctggcgcgggccggggccgccgccgccactgccgtcgggtaaggtcccagcacggacatggcctcgcgcggcgcccgcccgggcccgagtcccccgcgccccgctttgtagccccccggcggagaggcggcctcgacggtgcggacggcgcagacggccgggcgggcggcatggaggcggcgcatctgctcccggccgccgacgtgctgcgccacttctcggtgacagccgagggcggcctgagcccggcgcaggtgaccggcgcgcgggagcgctacggccccaacggtgagcgcgcgggccgggccgggccggggagcgggggccgcgcgcgccgcagtctcagtttcccctcctgcctccccacccggctctgggcgggcaggaagcgagggctccggaaacctcttcggatgctcctggggcacccggcggggctgcgcggccaccttcgccggcgccggggctgggggctgggggctgggagcgggttccagctggggagaccggacgcctggcaccctctgcgcggtcctcccggacttcccacctccactccggccccgtccaccctggaagcgttattccaccccatcctggaccgtattccaccccaacgccgcgccgctcccgctggcatcctgcaggtgcagcgcagacaccggcgggcgagggacggccggagactcaggctcggcctcccagctggccccagggtctcccctgagggctccagaaaacgcccaggaaggtgccgcttatcagctagcagccttggggcccccacccccaccccaggtcttcctctttctgcaacccgaagcggatgtggctggcggagtcggtgggggctttgaactgctgaggcgggagacccaccttcctggggtggcggagtcaaggcctcagggaactgccagggaggcctttcccatctctggggagggagggaggcttcactatcatttcatcctcacctccttcaaaggagtgtgggattcttgctcttgccaaaaggcacattgagtgccaccgggtactgtccagatgtggcctggcaccttggaggtcccatgagggtggaaaatacagaggtgccctccccacatcccttccaggcaggacctgccacccccttgctcatgcccgcagcatcgggcagagtgtgagggatcccaggagaaataccctcaccatctacagagggcagcctgggtctgcatcctttggggacttggagccttgcccttttggggttcccagccagccagaggggaaggtattctagccctgggatcctactactcagggctagcttgaaaattaggaagaagtgtcagaaaaggacttttgggttttgtattggtttatgaaaaccacctcttatataaatattatctttctggagcagaaatcctttttcaaaaaaattagttgctatatttagttgagctgtgggaggaactggggagataaatattatttaatatcccccattagtgacttggcagggaggttgtgctttgctgcaggagagctgggcagcatgggctgcctctgaccctggggtgggctgggggcgagggccggcgcaggcaggtctgcggtcccactgcctcttttgtgctgctatagcctccagcttgggaatcctgattcctgagggaaactggagacgcagcccttggcctgtccctggaatcacacaaatactgcttctgtacgaccctagccaggtctgtcttcattctgatatcatgtcttcattggtccagcggaggaggaactgactgggagggagggagccccagccttccccacctgttatttggttagatgagatccttggggtgccctggccagcgcacacctgtgtgaactgatggggaaggctgtgggcttggcgtggtgtgtaggtccacagagggtggatgtgtgttggggtgtgatgggaaaagttggggagggatattgctgggctcccctggatcctctgggcattgatagtattaataataaaagctgatgttcactgagcacttactatgtgccaggttctagtctcagcatttttcatctattatctcatttcttccccaaaacaactccataagggaaggactgttgtcatccccattttatacagcaggaaacggaggcacccagaggttaaaccacttgcccgaggtcacatagtaggtggtggagctggcactggttacctgctcctctctgggcctcagtttccccatctgtacaagacagtcacaagttctgcaggatgcagaaccctggtgtgggcgtctgtgctagg

SEQ ID NO: 30110 - DNA, 1688 bp, Artificial sequence
  DNA replication origin
tctacaaaaaaaaaaaaaaaaaaaaaaaaaaaaaaaaaaaaaaaaaaacctgggcgtggtggctcacgcctataatcccagctacttgggaggctgaggtgggaggatcgcctgagcccgggaggcagaggttgcagtgagccgcgatcatgccactgcactccagcctagatgacagagccagatcctgtctcaaaaaaataataatggggctgggcacggtggctcatgcctgtaataccagcactttgggaggctgaggtgggtggatcacctgaggtcaggagttcaagaccagcctggccaacatggcgaaaccctgtctctacaaaaaaaaaaaaaaaatacaaaaaatagctggatgtggtggcgggcgcctgtaatcccagctactcgggatgctaaggcaggagaatctcttggacctgagaggtggaggttgcagtgagttgagatgtcgcctcgccactgcactccgcctgggcgacagagtgacactacgactcaaagaaattaaaaaaaaaaaaaaggaaaataataataataataataataataataaaatcaataaataaaataccaggccggaggagccacaaccagaaaaccagcattcctctagctccacagcaccaggctgagacgcagctgatatcagggaatccatctggatcacccatcaaaagccccaaagcacctttcggtccagccagtcctcagggagtgtctttgctcagggaggcaccgagaggcggagaggaggaggggcccagtcctgtcccaggaggaagagcacagaatctgggggtgtgcatgatctggataggggtcagcagctccagaccaggctggaagttgaggctctcaggagcgggtgaggggctgtgttgttggggcagggcgcagctgcagctatctgggaaagcttcctggctgcagaggcacagaaggggtttggggtttgaacagccagctgtgcgggctcaatcctggcatctctgaccctgtgcagccttggtggatggcagagactgaggctctagaaggcagagcccagctcgtggtgggaggcagataagggctggggtgaggctgtctgggtctctcaagctggagggagcggcaatcaggctgttctcttagctcctccttttggcggggcgagtggtttctgccttcctgcgacttcctcctctgacccgctgccacttctcctggccctcctggggcgggtggagctcgggagcgctgaggcggaggctcatccatctctcccctccctgggccagggtcagtcccctgggagccctgggcagagacccccccaccccaccctctcgggcccctctggggagccccacctttgctccctggttacatttcctgctggggtgacggtgtgagtctagggtaacgagcctggttttctgaactttcttatgcaccggctctttgttaaaggttctggttatgtgaggaataacccctcgccggtgggcattggaaaagaataaagaaagcagaaacaccaaataaggagaacatccagcactttcctctagagaagacccgcttattcagaggctttcgggttccctctggagtcacttcgcagaattcgagctgggaagcaggacgccccgggcccaggagagcccagaggaggcgacgcgcagcccagagccggg

SEQ ID NO: 30111 - DNA, 1345 bp, Artificial sequence
  DNA replication origin
actttgggaggctgaggcagctggatgagtagagaaggactgaaaataaaaggaactgtgggttgccttatcttcaccatgcctggccaacacggtgaaaccccatctgtactaaaaatacaaaaattagtgagaccagcctggccaacatggtgaaaccccgtctctactaaaaatacaaaaattagctgggcatggtggcaggtgcctgtaatcccaactacttgggaggctgaggcaggagaatcacttgaaccccgaaggcagaggttgcagtgaaccaagattgtgccactgcactccagcctgggcgacagagcaagactcagtctcaaaaaaaaataaaaaataaaaataataaataaataaataataattccagggaagacctctgtttcctcatgcccacccgggccccctcaggtgaggcgggtagatatacttctgctagataggtggtatgttctgccaccttctgtctggtggaggaggtggcaaaagccgtgtctaggtgccaggcatggagttcttggttcctggcagctgggaggtggagaatgtggacctgccctttggacagcctgcctgtgaccatgtcgccctggccaccagctgtgtgtctgtccaggtacaaaaagagagcatggcggggagggacgtgagcccggggcaggcagctggagtgtgaaatgactgcatgtgattctgtgggagctgggggggcacccagaagttgtgacaggggcagccgagcaggcgggcatgctgacaggtgtgtgagcctgccaggtgagggccccggttgctggcaactgtttgtcctgccatggcggtttgaaggtagggtggggtgggctggagaaatggaacataggcctggctgccagagcaaacagtcaggccttctggccctaccttctagcaaataccaactcacagctgagggtgcggtggagcgggagaggctggggttaaggtccctagggccagcagagaagaagtcagacctcaagatgtgtgtgtagggtggagcaggggtttcccagcggcttgaacgcctagggctcccgatctctgggaaatagggctctagcggggagctgtgaggctctgtccccagtcaagtcctggctaacatttttcctggcaacttagggatacagttgggattttgtggactatagcagtgggggagaaaggaatagggtggaaatatctggggatatcagacttgagatataaaatgtcaggctgagcgggatgcagtggcttatacctgtaatcccaacattttgggaggccgaagtgggtcgatcgcttgagtccaggagtttcagaccagcct

SEQ ID NO: 30112 - DNA, 1165 bp, Artificial sequence
  DNA replication origin
cccgagggggccctgagggtgtctgaagcccagggagttccccaaagtcacctagcaagtcagggccaggtccaagggctgcacccacgccccccagctagagaccctctgctccctgctcccccagtcagacaggctgtcagagaaatagcaagaatttctttctgaactgtaattttggggaggctttggggacagtcctcatccctcaccttccagactctgaccttgacagaggtgcaaagcaaggagccatcaatatccaagtgaaggtagaggtagttccaaattttgctctgtgctatttagtgaaagtccttcatagtccccaggaaggtgtttgctcctggaagatgttggcatgagtgcatgggagggatgagcgcatgggagcgatgagcgcaagggagggatgagcgcatgggagggatgcgcgcatgggagggatgagcgcaagagagggatgagcgcaagggagggatgagcgcttgggagggatgagtgcatgggagggatgagcgcaagagagggatgagcgcaagggagggatgagcgcttgggagggatgagcgcaagagagggatgagcgcatgggagggatgagcgcttgggagggatgagcgcatgggagggatgagcgcaagggagggatgagcgcatgggagggatgagcgcatgggagggatgagcgcaagggagggatgagcgcaagagagggatgagcgcaagagagggatgagcgcatgggagggatgagcgcatgggagggatgagcgcatgggagggatgagcgcaagagagggatgagcacatgggagggatgagcacatgggagggatgagtgcatgggaggtgttagcacttgggagggatgagtgcttggaagggatgagcacatgggagggatgagcgcatgggaggtcttagcacttgggagggatgagcacatagaaaggatgagcgcatgaatgggatgagcacatgggaggtgttagcacataggaggcatcagaatcagagaagattcagtagataaagcttatgacacacagccagtactcccttaccaaggacctgtgatgaaggacacctttatttaaatggatgatgattcactttgagaatggaagtgtaaacagagaggccgggtgcggtggctcacgcc

SEQ ID NO: 30113 - DNA, 2275 bp, Artificial sequence
  DNA replication origin
ggagcagggctccttccccagagcctctggagaatgcagccatagagccgccttgttaccagaaaggggtcccaatccagaccccagagagggttcttgaatctcatgcaagaaagaatttgaggtgagtccacagagtaaagtgaaaacaagtttattcggaaagaaataaagaatggctactccaaaggcagagcagcctcgaggtgcccatttttatggttacttctttttatttatttgagacagtctcactctgttgcccaggctggagtgcagtagcgtgatcttggctcgctgcaacctccgcctcctgggttcaagtgattctgctgcctcagcctcccgagtagctgagattacaggcacgcaccaccatgcctggctaatttttgtatttttagtagagacagggtttcaccatgttggccaggctggtctcaaactcctgacctcgtgatccatctgcctcagcctcccaaagtgctggagttataggcatgagccaccgtgcctggcctatttcttgattatatgctaaatagaggtgtgttattcatgcttcccctttttagaccatatagggttacttcctgacattgacatgccatttgtaaactgtcacagcgctggtaggagtgtagcaatgaggacaaccagaggtcactcttgtggccatctgggttttggtgttttggccagcttctttactgcaacctgtttcatcagcagggcctctatgacgtgtatcttgtgccgacctcctatctcgtcctgtgactcagaatgtctaaccgtctggaaatgcagccagtaggtctcaaccttattttacccagcccctattcaaaatggagttgctctggttcagacacctctgacggcctcactgcaagaagggctgggacacagaagcgagcttacttggggtgggcagggggagggagcagggaggacttaatcatgactttcctcatgagctagtagaaagtcctacctttcttgagattaaactgtgtagagtcaccacctgcaaaaaattggattttgtcagcagggaaggaggggaggggtaggagatggcagctagggaagcgacagggccgtgttttatttatttttattttttgagacagagttttgctctcgttgcccaggctggagtgcaatggtgccatctcagctcaccgcaacctctgcctcccaggttcaagcgattctcctgcctcagccccctgagttgctgggattacaggcatgcgccaccaggcctggccaagtttgtatttttaggagagacggggtttctccatgttggtcaggctggtctcgaactcccgacctcaggtgatccacccacctcgacctccctaagtgttgggattacaggcgtgagccaccacacctggccagggccgtgttttgacttggcttccgtctgagtgcctgggctgctcactggtggttccgcatgaagccccggcgctaggtctgtggagggcatgtattgagcgggtgagcgcgcgctgagcgcctctgtgctgcagccgtggctgggggccggggctctccacccgcctcccgcgtggttcgaggctgacttcccaccgcttctgcctctcgataaatgaggctcagctggtggaaccctgtgtttctcttcagttctaaaagcttgggctcaacttgcttggctctctgtggccttcttcttagtccgctggtgctggcttagtcacactagccgggcagggctcagatggacgcgcctgcttttcagagtgaagccccagtgtgctccggacaaggtgaggcggggagggcatcaacatttgcaccaggtcctagagatcgcctcgggagcggcacaggcctgggagcacccagtcctgctgagtctcaggtttctctctgggctgagggatagtgagggctgaggctgggtccagaccctgcctggggctcccccgaaagcagtctggggctttgggggatgtgtcagactctgtcgggctggaacaaatgggcctcaaaggttggttaagtgcagcccctgccaagaaggcacgcttctgtaatttgccagacagtcctcagccccagaatgcctctgggaaggagacagagcagcgcgtggcaaagcagaggcggggaggaggaggaagcgggaggcccaggtaaacctcaggccacacttgggccagaggcagggtccaaaggccggcgggaaggcagccagtcccaggaaggcagcaggcgcactgcctggggccct

SEQ ID NO: 30114 - DNA, 1000 bp, Artificial sequence
  DNA replication origin
cagagaaggccccaccttcttcatccctcagacccgaggaggcctcccagtaaggagtttcccaagaggggactcacaggaaacaagtcttagtgcttgggagggaggccccgctgcgtgctcagactcacagccaacctggaaggtagacgagatagcgccacccacgcccctccacaccccagactccgagtaaagcgggcggtagggccggagtcacctcccctatggcagtggccgccgctgtactccatcctcccgtcaggaagatcagctgtaaataaacgctgggctccccagagcacctgtccgcccactgcccttgctgttctgggatcttcgctgcagttcacgggaaacaagcctgagtccgctcgcacccgcggctgctctcccggctcggcccggccgcctctgtctccggccaccgggtggcgctgccgagccagagccgccgcgtcccggcgctttccaggagccccaggcccggaggaggcgaagcccgcagagcaaaggtggaaacacgtgcctacgctgtaaagaaatcctgttccagagcatacctgttgtacaaacagacactgttcctaacgagaggagtgacgtattttcatcaccgtttttaatttgttttcttacgggtttacgattttgaatttttcttatttggttgaaagaattttgattctatcagcctgagtgagttcagcctgtaaaaaggatgttaagctgtgggtaaaatatgcaaacgaaaagaaatatattgtacaaattctatataataaggtacgcctgtgtgtggactggtctctccctcctccctccgccccgccgtgtctcgtggagctcaggcgtggagtttacaccgcgcccgaacggatgcgaggcggagactcgggggctcagggctgaaagaatggaaagctgctgtaggccttcctccagatcatcctcctcccaagcccgagccaagcccccgcccctcccccggcgatcccag

SEQ ID NO: 30115 - DNA, 1931 bp, Artificial sequence
  DNA replication origin
ctccttgagctgaccactccagttaggatgccaagcagccacgtctccaagagctcccgtgcgtaggctggacacaagcacaggctgtagcatggtgaaaataagccaagcagtgcagaatgcctcagaaagggtgggcagggggcccttaagaaggttcagagaccagccttctccagaggctgtcactgcaggagccgtgggcctgggaagacttggaagcggcctctctcaactggtttctgtctccgtggagctggaactgcctgcacttgccttcagagggaggcacagtccacccagatccacctttccagcaagacccccagtggctgcccagcctgggagcacctctttgcttttcacaccaaaccaaaactggcgagagcccctcctagccaccagtgatccccaagcatccagtacagaaccaggcatcgagctagctccctgcacggccgcaccctcccagagaactccttgaggagaacaagtgcccttggggacagccggcaggcgcccctgtacgtctgctcatgcaccaggcagcacagccgcagttcctcagttgttgttttgacatatttcagtttccacctcacgtttttagagcagaaccacactgtctccctggaggggctcgagggcatgaccggggactgaccattctgtgaaaggagcagaatgtgaggagcacgcgtgagcttatgtaccgtgaagatgatcagaggatatcttattttaagagtaaaaacccacataattttatttctgcttgatagtcatggtagtctgtcatacccacctctgggactctgcgtggctgtttggctgtcacttgtagcaataacgacattagttctagtcagtgctgttttacatttttcttttgatgggtttagtcttgccctggagtgccgatgatgattctccctccagagccacgcttgggaacatgaagcaagtctggcgtgtgggctgcgtgccggccttagtgggacccgtggggttggagcatgcctttaggggcagtgtctgggccgaagcacgtcccaccacacagtgccagagccagagaaggggccccaccaccaaggccaagcttgaccaggtcagcattgccatggcccagtgtgccccgtggcctctgaagatccctctgtgcagggtctgcagggatctggattgcaagggcccaagtctgcaggtctggaagcatcttcctataagagcactttcgccttctgggtcaggactccaaggtgcagcgggcttcacagccctacaattgggttctcagctaagccccagagttctggtagaaccatcccggggcgggtggagggtgggatttaagggagacgggaacacatggggcaggtcctggaacttggtggcctgaggactgaggccattgccctggtggaaaggcctggcctggttcctgtggcttgggacctgaataggcaggtgctgctggctccgtagaaacccttttcccatcttttgctctttgccaaacctaccttgctttgggagctgcctgcaccaccccagagaaggccccaccttcttcatccctcagacccgaggaggcctcccagtaaggagtttcccaagaggggactcacaggaaacaagtcttagtgcttgggagggaggccccgctgcgtgctcagactcacagccaacctggaaggtagacgagatagcgccacccacgcccctccacaccccagactccgagtaaagcgggcggtagggccggagtcacctcccctatggcagtggccgccgctgtactccatcctcccgtcaggaagatcagctgtaaataaacgctgggctccccagagcacctgtccgcccactgcccttgctgttctgggatcttcgctgcagttcacgggaaacaagcctgagtccgctcg

SEQ ID NO: 30116 - DNA, 1041 bp, Artificial sequence
  DNA replication origin
tcctgaatgaggttagatgtctgctctaaaatccctgtggcagatgaactagtcccatgcacgccccaccaagggctaacactccacattccagaggcgggtggccttgtttgggtagttgatggccaggctgatggcagcaatgttctgcagagcctgtagagggaaaaagagttgtcgccaatgtcgggagccactccctcattcagtgagtgctgataagaccctcagctgagcactgaggatgtggggacggaggaggggaaccagatgtgttcccctcccccacaggcctgcagagtggagagagaaaaaaaatgctattaagagcacatgaaagctccaaatgtaggtaggaatcatcactgcccagaggggcagtcccagggcggaggctcagaaggctgtctgcagaggtctgggaaaactctctggggaaaacagtgcaaagatgcaggtggggaagggcaaggcactcacaggaaacgaacagccagtgctggggaccagagggagtagagaaaacagggccaggagggcactgagatgccctggaggcgaggccaggcccgtcaggccttcagggtctgggcagcaagagggtggaggtggcagagggaggaagagggggttggcagggagacgtgtcagggagaaacgtcaggacactggtgcagtacactcaacaggctgtggggggggtcagaagagggtaaggaggaaatggagactggacaggggcagcaagagggacccgcccacaggcaagccgccatgctgagctttggggccaggacgggcaaatatcaaaatttcgttacatgatgtgatgaaacctggggtggcggcggcaatgctggtaggtagctgttgggggtaagggagtttctactctgcctacaggtctcgggtgaattcacacaaactcttcggtatgggctgggggcatttccacttccgagcgtacacgtcaaagcctacaacaggaaagaagacccttttcctgcaaaagggcggtgtgttcggagactacttccaagg

SEQ ID NO: 30117 - DNA, 1160 bp, Artificial sequence
  DNA replication origin
actcgtcctctgggaaatcaaggttgcaccctttgaggcggcgctccccgcctagctgtcgtgagttggtagaggccgcctatctacgtgacggcgcctttgcgacagcggtcgtcgcttgacggccaggaagccggaagccgcaggggccgccgtcgtctcctccgcgtccccgcccgccagctgctgtcggaggttgacaggtcgaggcggggaggcggcggcggcggctgcagagccaggcgcccaagacggagaccccatggggaacgctccgagtcacagcagtgaagacgaagcggcagctgccggtggcgagggctggggcccacaccaggactgggccgcggtctcgggcacgacccccggcccgggcgtcgcggctccagcgctaccacccgccgcggcgctgctggagccggccaggctgcgagaggctgctgcagcgttgctgcccacacccccctgcgagtcgctggtgtcgaggcatcgcggcgcgttgtttcgctggctggaagagcggctgggccgcggcgaagagtctgtcactctggagcagttccgggagctgctggaggctcgcggcgccggctgctctagcgagcagttcgaggaggtcagggccggcaggcgactgcggggatggggcagggcggtcgcccccaggggactgaaggaagaggtgggcatttgctttggagaggccaggcggggacccatatgaggtgtttccagcttttcaccaggcgtttgcttcgtttctctttaacctatgttagaggtctggaaagtctgcatcaggccgtccttgctctgaagagctggacaagcccatatgtctctctctgtatgttgtaatgcagacctttgtgcagttgattgacgctactctggagatcttctatcagattctcgaacagtttggagagaaaagagatgtaaggataggaggagtggcgctgagaaccattttttgtattgtcctgtccaggtttttacacagcaccttcccaattcagtgtgggcgccgaataagtgtggaaagacagtagtaacatgctggaaaggctcacattctaaaacctatcctcctcatgcaaaaactagcttttctaaaatacatactggtttgtagatccttaaagaaccatatattagac

SEQ ID NO: 30118 - DNA, 1401 bp, Artificial sequence
  DNA replication origin
agtccagcaaccccctccgctttcattcacccactttcctaccctcggctccgccttttgccgcgcctcccgcgattctcgcgagacttggtgattccgttccgcaccgccccggttgagccgcgcacttctcgcgaggttgcaggcagtgccgggccagacatggcggaaggtagggtttttttgtggagccgcgcgggaagacacggagctgtgggggcgctgctggccgtgcgaagctgccgtgggaggggaaggccgggcgtggttgcatgggggctccgcgggtctcgcgagccttcctgtctagcctctccggagcttctcgggccggggtccggagcgcggttcctatgacaacgtccctcccgcgatgccgaccccgcgggactgcggccggctgcggagccgggctggcaggtcccgcgccggtgctgcgtgcagccgcggggccccgagggcagcacgggaggctcttgattgccggcggtgccgggacgccgggggaagtaagccttctccttaggaaatcgaaactgctgtcctggcacgttctgcatccggaaggggtccatccctcgcttgcggaagagcgtgggtctcctcgggctgggttggggtgaggtggggtggggtgggggcgaggcagcagcgagctggcccacgcttcaggcgggcgcactggcggctccggctctgctgcaaccccagccttcaggccaggcgtacagatgaagacgggaggaaggggtttgcgggaagggagttggccaaggtcacactgctcacaagagggctgctcaaaccagacctctgtgcctttgcctccccgtccagtgcctaccctctggtctcgtgcacttttcatgacattgcagcttaaggcactctggtctctcagagtctgcctgtcttaatgtagcagtaattagaagccttcattgtcaaagccttattgtacacgtagggggaaagaaggcccagagacggggagttacctgtcaggaatcgtgcagggacattgttggatctgggcagcctggttctcctcttcaccccattattggagaacagtattccttatttgacctttgtttattgagtgactgcagtgtgcttggccacgacctttcctgttggttttgagctttgactgaacccatcacttgatggatcttagatttgggcagcacctgacagttggtcggcttttctcatttgcattagacttcagataacctcgtgaaggaggcctggcgtgtgtatttgcctttattgataaaggaatttaggcaaagttacagagatagctgtgactgacacccagttggttttggggggtgtgtgtgtgtgttttgagatagggtctcgctctgtcccaccggctggagtacagtggcg

SEQ ID NO: 30119 - DNA, 1509 bp, Artificial sequence
  DNA replication origin
ccccaccccacctcaccccaacccagcccgaggagacccacgctcttccgcaagcgagggatggaccccttccggatgcagaacgtgccaggacagcagtttcgatttcctaaggagaaggcttacttcccccggcgtcccggcaccgccggcaatcaagagcctcccgtgctgccctcggggccccgcggctgcacgcagcaccggcgcgggacctgccagcccggctccgcagccggccgcagtcccgcggggtcggcatcgcgggagggacgttgtcataggaaccgcgctccggaccccggcccgagaagctccggagaggctagacaggaaggctcgcgagacccgcggagcccccatgcaaccacgcccggccttcccctcccacggcagcttcgcacggccagcagcgcccccacagctccgtgtcttcccgcgcggctccacaaaaaaaccctaccttccgccatgtctggcccggcactgcctgcaacctcgcgagaagtgcgcggctcaaccggggcggtgcggaacggaatcaccaagtctcgcgagaatcgcgggaggcgcggcaaaaggcggagccgagggtaggaaagtgggtgaatgaaagcggagggggttgctggactctgggggaagcggagagccgggtttctttttaccgggtatttttgaggctcgagatttattaagcactgactgagccctgtcatattccacgtccttggcagggcaccgaaaaggatgacacaacgaatgcagactactctggagaagcttggcaatgagagggtcgagagagggggtttgttggtccttaggtttgtaaagaaaggagaggctgggagaaaggagtcagtggagaggtccctggggaggtaggatgctctgcatgcgatgcagaactcaggaaaacggattaaatttagactagaggcaggtcacctgttattccactaaaacggtaggaaacaagaacatgcgtgcagatatataggggggaagaaaatcagggagatcgtttgatgacatcgattttatgggtgaagttatgagacaaggaaggagaccaagaagagcaaagaaactttggaagaggacgctgaagttggaaggcctggtttcatgtgcctcatgtatgtgttgatggatcacttttttctagaactcagccaccaggctgcagtagcagatattttgaattatagcatttatccagggcttgggattgcattgcccaaaataaattgagggtgctatgagacgacagcccaggccatcaaacgtgggatacagactggctagggactgatggaggagccacgaaactgcaggtctctgataattgaaggccagtgcagtgcaggcaatgttgtgagagcttggtggttaaagtggcaaacaggttcatagtgaagtagcactaggagatgagaaaagtccaggacaggccgggcgtggtggctcacgcctgtaatcccagcactttgggaggccgaggag

SEQ ID NO: 30120 - DNA, 1082 bp, Artificial sequence
  DNA replication origin
cgggttcaggtgctgccggggccgccggaccttcggggccggctggagcgtccggacccagtgcggctgcgagtccccggctcggtgtctgagggcgggcggaagggaccggccctggcgggataggtgaggcgcacaaaacttctccccgggcggcgctgggtccgcggagttggggccgacaacaaaagcgctggcctcggcggcctccacgcgggcgcgagggtgccggagaccctggcggagtgcggatcgccgcctcgcctgcctccgcctggcacgggctccggctgcgccgcccggctgggggagggtaggagcgggccgcggggagagccgctcgctggccggctccgggctttgtgctcgccgcgattccggctgctgcgcaggcctgcaaaccccggagctgcgcccgcaggctctggcccggggcggcggccgggtcggcctccccgaggagcctgcggcccccctcccccattgtcccggcctccggccgtttgcggcttccaggttgactttttagggggttggctcctactctgctaggactgtgtgcgcggagcatgcgcagtggagacgtccgtgtgcggagtggaaggggggaggcgggttggtggcttcacaatgcagccccacgtgctgccagatttaaagagaaatgaaccagcacttacccctgctgtacaacacccggcgtgtgtcattctcagttcaagcgatcttccccctacccactctaaaaccagtagcctctagccctcagcagaagccaaagactggagtgatgaaatctgtttttgaaatacatttactaagagtttgaggtgttcgttaaatcacctttatggcttcttaaggaaaaggttgtcaggggttcttacagattgtataattgggtttattattagaccatgagcaagcaggtttggacaagtattaaagttctagatgctcagggggagttagcttgcagtaaatggagaagttctaatgatactacaggatactcataaaaattatgtgctggaaaagcactgaggccgggcgcgctggctcacgcctgtaatcccagcact

SEQ ID NO: 30121 - DNA, 1111 bp, Artificial sequence
  DNA replication origin
gccgagggcccgggctggcgccggggcttccgaagggctggggacaggctctgggggcggctggagcggggtgtgccgaggaacccgggccccgcgaccggagcgccggagccgaggaaggccgggctgaggcggcgggagcggcgcctcgctgccggtgcgagtccgctcgcttcagctcttttcacagcgactcacgcccggaaggggagggtgcccgggctgccgcggcgcgcactgggacttcgctcgcccgcttccctccttcaacccgcccgtcggccccaccggtgccttcccccgccactgcctcactgcgcgcagggccgctcggcgcaggcgcgctgagactgccgacttgggaagcgtcccgcccgctagcccgacccctcggcctcccgccccgcccccggcggcggaaccccgccccttgagcgcagttgtcccgtccgccgccattttgggaaggtcgacgcccggctgccagcccaagcctccgctggtagacgccccgcggacgccatgacaaagaggtcgcagagggtcaaatacagcctctggattgaagcagtggatataggagcgaagaggccagaagaagtggtagatgtctagtccttggcgagcgcccaaaagccatctaacactgccacatggtgtgcgaagtaggaattgttagaaagccgaagttagtactggtgtgccccattttaaccaaacatcaaaatagaggcaatatatgatgataactcactttacatgaagagtgcacaaaaaaagccaccgcgtccggccctattattattgagccaccgagaccggccctgttattattatcatttatggacggcaattctctctgtcgcccaggctggagtgcagtgatcatagctcactgcagcttggaactcctgggcttaagggatcctcccatctgagtctccttagtatctgggattacaggtacacaccaccatgccctgctatttttttatttgctttatagagatcggggggtttgacggggcgcggtggctcatgcttgtaatcccagcactttgagaggccgaggtgggcagatcacctgaggtcacgagttcgagaccatcct

SEQ ID NO: 30122 - DNA, 1141 bp, Artificial sequence
  DNA replication origin
aaaaagaaagaagccgggcgcggtggctcacgcctgtaatcccagcactttgggaggccgaggcgggcggatcacgaggtcaggagattgagaccatcctggctaacacagtgaaaccctgtctccactaaaaatacaaaaaattagccgggcgtggaggcgggcgcctgtagtcccagctactcgggaggcagagcttgcagtgagcggagatcgcgccactgcactccagcatgggagtcagcgagactccgtctcaaaaacaaaaaaaaagaaagaaagaaagaaagcgggaaggcaggagagacagagagagagaaaaacagagagagagagaagggagggaggggggagggagggagacagagagagagaaggagaggaagggagggagggagggaaaaagagaaagaaaaaagaaaagaaaggaaaggaaggaaggaaggaagaaggaaagagaaagcaagcaagcaagcaagcaagcaagcaagcaagcaagcaagcaggtcggcactgggacttctccacgggatgcagtgatgtgagtggacaaactcaagtttctggcagccctcgaggcaagtcccaggtctgatgcccggtggccaccaggtggcgctgaagtctaagctgagaaccttcactaaggggccgttccgtggcagggccgaagcgtccaccaagagacgctccaagaacacttggcttcagcgtttgccttctaggggcgaccttgaagtgggggaggggtctccagtgagaggcatcaggcataggaccaggggccggaccctgcgttgtctctggcctcggtcttctcatctgtccatagggtgtggattcactgtccaggttcctctagctcagacccttcctctgtgggcagaatcagggcaggaggaaggaggacggaaaaggggaagaggctcaactttcctcctctcttctgctctccagggcccttcccttggggcaaggacatgtggcttccggggtgtgttcctggtgcccacacattcgagaacttgccattgacaggctataggcattatcattctgctgtgatgaggtggaaacaattgtatcccatcgaagtcatcttgcagggcttggggaactcgtggaagaggtggggaggtgg

SEQ ID NO: 30123 - DNA, 1117 bp, Artificial sequence
  DNA replication origin
ccctcttccacatgacagccccacagatatgtgaaggctgcacccgtgtcccccagcgtctgcatttgtaagaatgattaacctggcagagccaggctctttgtggggttaaagaggagagtgtgtgctggagagggcgggtgggggaagggtggaaggagggttaggggctggccagctgcacagttttacccatttggggagctgcccagggagccggctggacaggaaccagcccacctcagggctccctgtggcccttccttggcttggaggcctccagccacaatgctttgcaccaccatcccagagcctcccgcccccttccctgccttcccacctgcccggagccccgtggccaaagatgccttttggccttcggggatcagagctgagcaatccttgtagcccctatagttcggttcctccatgttgctgcttcctccctgtaaaggcaggtggtgggggagccgttctgtgcagtggaggggcagatgccagcttggagcagggtgaggagggtgagggaggggaagcaggacaccgagggtagacaattcccttgaggagctgagctgacaggagcaaagggcatggtagctggagttggcagaagatcccaggaagctggcattgcttttcaagaggggaggacagaacagcctccagggagcagagaggggcaagcaggaggagagagggggccatgtttgagggtgagctgggggtggaatccagcactgggggaggaagtggcctcccagcagagcaggggcaggaagtgtgtggggacagggtctgtggcaggaagtagaggaaggtcccctttgccggccggcactggctcctgagacaggagatcggcttctctttcagcaggggcccagggagggaggaggccttagggtgtgtgtgaacagggtccacagaacaagggagcaggaagctaagggcagggcacgttcacgtgaacagctttgggcggccaagaaagccacgaggagctgataggaaaatgggtggaaactgcaggtgtctgggtggttggagcctgtgggttaggtcagagggcagagggcagcagagcccaggctcgaggactctgcagcagcccatc

SEQ ID NO: 30124 - DNA, 1450 bp, Artificial sequence
  DNA replication origin
cagcaaccgctaccgccagcccctcgctgcgccccccggcgccggcgccgccgctccgcgtccgcctcctcctcctccgcgccgcccgccgccgccgaggcgcattccaggcacatcatgccggcccggatcggggcggcggggggcgcggggggcgcggggcccaggctgggcccgctcagcgcgtgcgtgcgccgcggagccgccactgcaccatcctggtcgggccccgtcggctcctgcgctccggccccggctgcggcgctgccaccgctcagctcgctgcgcctcgttcgccgccgcggctctgacagctgcggcccggccccgcccaccaggcccgcgcccaatcagctccgggctcgggccacagccccgccccgcacgtgctgccctgggggtggggggcccggggactgggggcccgggcggcagagcccctcctgccaatgggggcgcagtcacgccggggccgaccggccgcgaacgcccgcggggagcgggagagggtttgctctggctacggagctgggagcagggtgctggtgacggggctcccagcacctactcagtacccttcacccaacccctgcctcgggcgtggactcccggcggaggctctgggagccgggctgagggcttgagcctagcgtatctgggagaactggagagaggagtctcagatggctaaagtcaggggcgccagttggagagccggtggctcctccgatactcacacgcccggatttaaccagttcagggagggcccagaacctagacctccaccagtcatggtgggctgtgtctcccacctccccagggcaacccagatccagcccccaacctaccccgggcccattcctgtgtgggcacccggaccctacccttgccccacagagtggcccgcagcccctggcggggagagcaagggctgtgattggggcccaacagaaacaggatattcagaaggggctttccctcctgagggaccacatctccaagcttcagacttccaggtatgtgctagagagggtacaaagcccccagtggcagacaggaggctgggtcctagctcagctctgccctggtgtgtggcatgatcctgaacatgacacccactctctgggcctccatttctgtatctgggggcagatggcaggatgggattcagtctggaaatccacgggtggtcacctccccttggtgggacggggcgggggtctgcctcctatggagagtggttggggtgcttctgtgttcctgacatcccatcacggtttcacccctccttagaggtgctgtggctctgtgacgatctcccccttccctcccccattcacctgtttggggaattaaaatcgaaattaaaatcctgtataaagtgcagaggacagaatgttagaactggacaaaccctcggaaaccagttaatcattccctgtgtttcaca

SEQ ID NO: 30125 - DNA, 1010 bp, Artificial sequence
  DNA replication origin
gccagcagaaggcaattccagaaccacgtgcgtcccccaaaggcccaatgatcaatcaactcacaaacgggcaaacagacctaaacacacgctgagactggcccaaggtcacacaccaagcacattaggagcaaagctggggctagaacccagttgttctatcgatcccaatcccgtccccaaggctgattcccagagatgctccctgaggatgaggctccacgtctctagctccagaggcctgcgccctaccctacaccccaagcaccatagagcagggggaggcgtctccaggcctctgtacagggccagctgcaaaccgcagcctgggtccccaggcgccgcggacccgccccgcccctccctccgctccccgcagcccggagcctttgtcagccacgcgctcacacacaaccgcgccgccacgcgcacacacacccggtctccctagcgcacacccgcaaggggcgcgcgcactcgccgcacgcacgcaggggggtggaggcggcggagaaaggaaggaactgacgggccatggacggacagacgacctgggctgggggaagggaagggaaggaggcccgggaaccggcagctggggtcggagggggcgcagagacaaggagacagagagacgcagaggagactcttggagaggaggacaacggatgggccgtcaagggctggagaggacgcgcgggctgctccaggggtggggactcctctatcccttggccccgggtgtgtatgagcggggagctggattgtacccgtggtgcacggaggcatcccttgcccagttgtgcctgagcagagggtccgtagggacctcacgtagggcctggagatagcaggcctgagaccaaaagctctctggggtacctccctcgaggcgggtggtgggatggggtggggtcttggtcctcgggctgggtggggcactcgctcacctgccacggtgtacctgtccaggtagttgagcacgttgcccaagctgaggatggcggcgg

SEQ ID NO: 30126 - DNA, 1205 bp, Artificial sequence
  DNA replication origin
cagctccccgctcatacacacccggggccaagggatagaggagtccccacccctggagcagcccgcgcgtcctctccagcccttgacggcccatccgttgtcctcctctccaagagtctcctctgcgtctctctgtctccttgtctctgcgccccctccgaccccagctgccggttcccgggcctccttcccttcccttcccccagcccaggtcgtctgtccgtccatggcccgtcagttccttcctttctccgccgcctccacccccctgcgtgcgtgcggcgagtgcgcgcgccccttgcgggtgtgcgctagggagaccgggtgtgtgtgcgcgtggcggcgcggttgtgtgtgagcgcgtggctgacaaaggctccgggctgcggggagcggagggaggggcggggcgggtccgcggcgcctggggacccaggctgcggtttgcagctggccctgtacagaggcctggagacgcctccccctgctctatggtgcttggggtgtagggtagggcgcaggcctctggagctagagacgtggagcctcatcctcagggagcatctctgggaatcagccttggggacgggattgggatcgatagaacaactgggttctagccccagctttgctcctaatgtgcttggtgtgtgaccttgggccagtctcagcgtgtgtttaggtctgtttgcccgtttgtgagttgattgatcattgggcctttgggggacgcacgtggttctggaattgccttctgctggctcccttccccagcaattaggggtgggtctaggggtaagaatttgccctagactgagctgctactggttgggaatggtggagctttgagagggaaggactttggccagactggcataggaaggggctccctgcaggaggagagcagtactgtgtgcctggcatgctggcccagaacctgcgtaactatagcttagtaaaatctggagctatcaaacacacacacaacagagagagagaggagataggagagagggaaggatttatttttggacagactctaaagagaactttgcggcaattgagggaagagagcccgggcataaaccacatgccacctggtgccttctctgggcctcagtctccccgtctgttgaatggagttttgtgtcaaatggaagggaagaattctgatgggagggcagaggcttccccctccccccatt

SEQ ID NO: 30127 - DNA, 817 bp, Artificial sequence
  DNA replication origin
ccctcctgtctgactctggcctgcccagctttgaagccaacctcctgtaggttggggcctgcttggtctgatgggggtctggggcccagcagtgccggcatttggtgctgagggtgcccgcgggtgcgagcggaggctcttgcaggcaggggcctgcctcaccagctcctgtcccaggccagtcgaggcctggcttggtcctcagggaggggaaccaagatgggtctttagcttgatgggaggtgaggacaaatggctgtggcgggggttcaggttccctcgggaacatgtgcctctctagacctcagtgtccccgtgacccaggtccaagggcagaagccaaggcaccctggtctcaggaatggagcaggagccgcgctggagaggcagcagcatggccgttcctgatggctcgggtactccgaggctcggagggctctgggctaatggcctctagtgactggcgcctgggcaacccccaaagtatcattccttaactgcatgtagctgggagggaggtgaagattccaatttcagaggggtgtgctgggggcacagcaggtttgaggccaatgacgctttcagtatggggcaggtcgcagtggtctgggttggaggtgtggaagcccctggggtgagggtgactgcagctgtgtgtgggtgggaggggctcagggaggagaagggtgactggcaggagagaagcagccaggctggtggggtgggcagtagaggggactgtggggaggagggcagggcccaggggagagaggtgtcaagacgtagggcaggagtgagtctgagggtgtgggggctt

SEQ ID NO: 30128 - DNA, 1627 bp, Artificial sequence
  DNA replication origin
cctcagaatcagttctccgggagaccgatctctgggaaagaagtgaggattggagcctgagtccagagtcgggagaactggggttgtcccaggagacggtccctgcctctgggctttacttccggctgggaaacagaaaggctttgagcagctctccggagtgcctcagcctggccacccttccctagaacttgcgcgtgctgggggaggcgcagaccaaggcgcagcatcagcaggcactgtcctccctggagctgctcaacgttctcttcaggacctgcaaacatgaggtgaggcgggggcccagtccgcggtcgtgttcgggttcctcttgggggccttggggcctcccggccagcagtgccatgcccgggctggactgcagggatgggggtcatgtggggaaacttctcagtgcctgggccagggctctgggctgccatttgggcagttaccaaaccatggatgggtgagtgacttgggaagggactgtgccaccctgtcctcctcctgcagggcggggtgagagggggtggggtggcactgccacatcccgtgagaaagccgagaaggggctggcagggctggagactgtggaagggttggagaagattcagggtgagcagccaggtttccaggcctggtacaggagtgtgggcagccatcagggcagggctgggaggcagctggaggtggccatctgggtcccccggtctggcccagagggcggggtttgggaatcttcagcataggtgctagtcagcccttgtggagggagagcttgccaagggggtgctggcaggcagaggcggggcccgggacggggccttacaaaactggctgatagtgaggaagccaggagagcagggctcccggaagctggcggattccaacaataacccattcaggatgtgcaggaaggtggcagggttgggtggggaagcgctttggcagccccgcggtgatggagtgctggggagtggccctcttggaggtgggtgggcccgggccactgctggaggggaggacaccgagactctgagaccaggcctttggctatgggaaggaggagaaccaacacctggggcgcgtgtttcctccctcggtaagagacacggatgacttaacaggcagaaggagaggctgaggcccaggaaggggcaggggtcactggtgaggcagcaacagggcagaggtgggaagactgggagcccgcgagaggccccgccctctgtggccccacagctctgccttcccaccctctgcagaagctgaccttggacctgacggtgctcctgggtgtgctgcaggggcaacagcagagcctacagcagggggcacactccaccggctccagccgcctgcacgacctctactggcaggccatgaaaaccctgggagtccagtaggttctgggagggggacacacaccttgggtaggggctgggaacaccctcacgctgctgcacacacacacacgctgcacacacgctgctgcacacgcacactgcacacgcatgctgctgcacacacatgcactcaagcgcattctcagatgtgggagctgtaggaccctcacaggaccctcgcaggagcctcgcaggaccctcgcaggacccaggggcct

SEQ ID NO: 30129 - DNA, 1186 bp, Artificial sequence
  DNA replication origin
tcggggtcctcaaagcacgacctcacctcccgcatggacagggtcttctggagcagcaggcaggcctgtgggtgggcaaaggtgggtggcaggagccttggcacgttgggtgctcacggctcagggatgcatgagggctcgggggcccgctgggcactgctgtgggcagcgtgtgaggctgcctgctgctctgggctctgtgactacctgctcctgtgcctttgtgtgcaggtggggacaccaaggcctcccagctggatagaggtgggacctcaggttgggacaattcctgcccattattggcttagtgccatcttcctccagcctgcccccaacagccctggcaccagagcagacactaccaggggcatcctgtgtgtggccagatgggcagcagtggctgcgggagtgaggctggccctgccccctcagctcctgtgtgttcactgtgtggcaggggccagggcacggccacccccttcagagaccatgtacccacagccaagccagtggggcagggacagctgtgcccgtgctcaccaggacagcgctctggggcctcacaatatccagtcagaagagggttaagcgggttaattcagacaggccctgggctgggagctgggaagtctctcacctgatgacggggccgcaccgggcccgtgatatgctggaccaggatggggagcaggctctgacagagcacctggtggggagtgacaagggctgtgaggtgcaggctgggctgagcagggaccatgaggaagcagggcaggccccaacactcaccgggtgccgggagaagaggctgaggaacatgggaactgtgagggggctgttgcgcttggtcaggaaggagctcagtgctgtcgagtacacccgggtcaccaggttcaagtccaagcagctggcagcctaggccaggggagagcgagctgggtgaggccaggagaggggtccctgggatgggagcagagcctggcctaccttcatcagaaggctgagggttgggccctggggaagtcccggcctccactccctggctgtgaaatgcctggggctgctcctgggccaggccctgctcacctgcgggcccgtgggcatgtggctggggtcagtgccagctttctgcttctcctgtgtctcatgcacgcagccctcagcagtgttgcccttcaagacccgg

SEQ ID NO: 30130 - DNA, 1619 bp, Artificial sequence
  DNA replication origin
gaggcctggctgaccgctgggcctctgtccctcagggtggagaggacagtgagaacgaggaggagctgggggatgaggccatgatggccctggaccagagcctcgccagcctctttgccgagcagaagctgcgtatccaggcccggcgagacgagaagaacaagctgcagaaggagaaggctctgcggcgcgacttccagatccgggtgagcctgggggcgggccgcacccacccccgcctccctgtgcgcccacccccgcctccctgtgcgcccacccccgtgttgctgacctgccctcctggctgcaggtgctggacctggtggaggtgctagtgaccaagcagcccgagaatgccctggtcctggagctgctggagccgctgctgagcatcatccggcgcagcctgcgcagcagcagctccaaacaggagcaggaccttctgcacaagacggcgcgcatcttcacgtgagcacgggggtgcagggcgggcaggtgtggccggcagcccccaggcgcaggagagccagagctctaggcttgctgtctgcacaggaaggagagagccaagcttccagcctgggcccctagctcgcaggctcactgctcagccctagaggcacacgtcacttagtgattcccacagtccttgcttcatccccgcgttctcccgacacagtgccaacagtgccctggagctggggtccatccctgcccttgacagtctcaagtggggctgtgccaacagtgccctggagctggggtccatccctgcccttgacagtctcaagtggggctgtgctggggtggagggggacagtgggtgcacctgtggcaggggacacccaacccagtcctcggaggtgtagtgtgcatgggagtttgtcaggctgggaggccttgggcagggcagaaagggaggaagagcatcctgacgggagctggtcagacacgcagctggaaggtcaggcaagcagcgaggccacagacccccgcaccctcgcaggccctgaccctagcggtgctggaggccacagaggcattatcagcaagagcagtggcgtggggaagggtctgagtctggtttgccttttcagaaacggctggcagcgtggagaagggtttgggaggggctgtgctggaggcagagggcccaggagggaggcggtggcaggcgtgggagagacaggcaggcacctggtagacctgccttcagagctcaggtgctggggaggtgaaggcctgggagctggggcgctgcgtggatagtcaggaggggtggggagtgtgactggcagtgcattcttcacaaacccaggcccgcccgggccacgccttctcagatagttctgccagcgtgcgtggacagtgtcgtttgttgagcatcctgcctcttgcccccattatatccccggccctgcagggccacagagggttctaagcacatgaacccttgtctcgctttacaaaaggcctgaaggccactgccccatgagagacaagtgtagacaggaggggtgccccaggcaggcagttggcccttggtgcagcctccactcagggagctgttctgttctcccctggagcgcccctgtcaccccagcactctgagcccacac

SEQ ID NO: 30131 - DNA, 925 bp, Artificial sequence
  DNA replication origin
gagctgtgacctgctgggtgacatccagacctgcatcaggaaaagtctgggagagaagccccgccggagccgcaccaagaccatcggtgggtccttggtcacgagagggactagagtggtggggtggggccagcggtcccctatccgggctcaacccctccctcttgcagacccccaggaacccccgtgggtagaggtgctggtggagatcttgctggccctgttggcccagcccagccacctcatgcgccaggtggcccggagcgtgtttggccacatctgctcccacctgaccccgcgtgccctgcagctaattctggatgtgagttgggacctttgggagtggaatgtgggctggggctcactgagcagcgagctgcaccaggggtgccgcttcagcctccagcctccctgccgggagcctgcggccggtgggaggggtctcaacgaggccttggcctggcctggccgcctctcctaggctccgttttcttctgggaaatggaggtctttggtcaaggctgagtggggcctggagaggagggcgggggctgcaaatgggtcagtggctggcacccctccccaggtgctgaaccccgagaccagtgaggatgagaatgaccgtgtggtggtgacggacgattctgatgagcggcggctgaagggtgcagaggtgttgccagcatgggccgggcgggggcggtggggagtgggacgatcggggaggtgtgtgacgcgcctgcctctaccacacaggacaagagcgaggaaggtgaggacaacagaagctcagagagtgaagaggagagcgagggggaggagagcgaggaggaggagcgcgacggggacgtggatcagggcttccgggaacagctgatgaccgtgctgcaggctgggaaggcgctggtgagtgggggaggtggag

SEQ ID NO: 30132 - DNA, 955 bp, Artificial sequence
  DNA replication origin
cttcgatccgactcgtcccagagcggcccctgcgctccgaacattgagccattcaacaattactgggctcctgctggcgtgccgtgctaggcggttggaacaaagcctctgctctcgtggaggaacacggagccaaatgcatttaaaaagatcataattatgaagagaattaggaatgcaagggtcaggaggaggcttttaagtgctggaacgtgaatacatcacccgttaaaaacacggctaattactattcaatagggtctccaataatgatttgaggggttggtcagggaaggcctctgtgaggaagtggcatttgggatgagagctgagtgacaagaagggcccccctcccccgtactcctgcaaggatctaaggggacgaaatcccaagccttgcaactacagagacccagggctggaggggctgaggctggcgagaagcaaggctgcatggggccccgggctgggatttcattctgagggtgatgggaagtcactggtgagtttaatgcaggggcaagcctggatccgatttacattttaacaagatgatgctggctgctgtgtgggggatggactgtaggtctgcgcaggtggaagcacgggaagaccatttagagatagtggtggactggacccagggaaaatgagaacaggtcagatttgggctgatgtggagcaggtggggtgggtgatggagttagatgtcgggggagaggaaatgagggggatgccaggtttgagactgaaataactgggtacattgtggtgccattacggagaagaattttcttgggagtgggaggtaaaggtggtgggatcaaacggtctattaaatcagagaagccttttacaatggcaggggaggggaactgctactggtcaccctcgcttcttggtttgagaagctgtttatagagggctgtggtccagagaggacctaacccttggg

SEQ ID NO: 30133 - DNA, 1495 bp, Artificial sequence
  DNA replication origin
accccagactgcaaccccaacccacagcctgatcagtgacctggaacttagggagtcagtagcactgacctcaagactgctaagtgagcaggacttagggtttgggcagcagtccaaccccaggctatgacccttgagcccgggtctgtggaactttgacctcaggcctggtcagtaactcctgatcccaggctcagtcaagggatcttgactgaaacaagtcagtgacccttgacctgcggctgctgagggacccctctgtctcctgcaggtgccatgttttggggcctcttccacgatagctcctcaggcaattccacggccctgacatcaggcccagcacagaccctggcccccggcctggggctgcccgcggctctgcccaccctgcacctgctgcatgcacgcttcggccgcctgccctggccacgcctgctagtgggccccaccacgctggctcaggagggcttcctggtggacacacccctggcaagggctctggtggctcggggcacagaaggcctctgtccactactttgccatgctgatgggacacccctgggcgctggggcccgagccaccaacccacaactggcagctgtgcttcgcagcgcagccctcgctcccacctcagaccttgctggggatgctctactgagtctactggcgggagacctgggggtggaggtgccctcggctgtgcccaggcccactttggaaccagcagagcagctacctgtgccccagggcatcctgttcaccacccccagtccctcagctggcccagaactgctggcactgttggaggcagccctgcgctccggggcgcccatccctgacccctgcccaccgttcctgcagactgctgtgagccccgagagcagtgccctggccgccgtggacagcagcggctctgtgctccttctcacctcctcgctcaactgctcctttggctctgcacacctgtccccaagcactggggttctgctcagcaacctggtggccaagtctaccactagtgcctgggcctgccccctcatcctccgtggcagcctggatgacacagaggctgatgtgttggggcttgtggcttcagggacccctgatgtggccagggccatgactcacaccctactcaggcatctggcagcaaggccccctacccaggcccagcaccagcatcagggtcagcaagaaccaacagagcatcccagcacttgtggccaagggaccctgctccaggtggcagcccacacagagcacgcccatgtctccagtgtcccccatgcctgctgccccttccaggggttctaacaggatgggggtgggtctggcagaaggcagagttatctgaagcatgggggcaggagcagagcagacacagcagcaatggagtgtgcacccgcagggtgtggtgcctcacacctgtaatctcagcactttgggtggtcaaggcaggaagatacctcgaggccaggagtttgaaactagccta

SEQ ID NO: 30134 - DNA, 1148 bp, Artificial sequence
  DNA replication origin
tgggggtggtgaacaggatgccctggggcacaggtagctgctctgctggttccaaagtgggcctgggcacagccgagggcacctccacccccaggtctcccgccagtagactcagtagagcatccccagcaaggtctgaggtgggagcgagggctgcgctgcgaagcacagctgccagttgtgggttggtggctcgggccccagcgcccaggggtgtcccatcagcatggcaaagtagtggacagaggccttctgtgccccgagccaccagagcccttgccaggggtgtgtccaccaggaagccctcctgagccagcgtggtggggcccactagcaggcgtggccagggcaggcggccgaagcgtgcatgcagcaggtgcagggtgggcagagccgcgggcagccccaggccgggggccagggtctgtgctgggcctgatgtcagggccgtggaattgcctgaggagctatcgtggaagaggccccaaaacatggcacctgcaggagacagaggggtccctcagcagccgcaggtcaagggtcactgacttgtttcagtcaagatcccttgactgagcctgggatcaggagttactgaccaggcctgaggtcaaagttccacagacccgggctcaagggtcatagcctggggttggactgctgcccaaaccctaagtcctgctcacttagcagtcttgaggtcagtgctactgactccctaagttccaggtcactgatcaggctgtgggttggggttgcagtctggggtcaggggtcactgacctagccccgtggcatgaggatgcaccactgccaggcacaatgcagctccaactccagcatccacgacgttgcccccggcaacaagcagctctcggcctaggtgggagcatgtggctgcagcaaggaaggcactgtcatgcagcaaggaggggggctaggctgggctggtgacccctgaccctcccctccccaagccgcccccagcactgactgacctgcagggctgatgatggcaccgtggtggtatacgccagggccgtgggagtgtccgccgggtggaggggccacagagcccaagcttcctgtcgacctgccctgattctggagctgcctcacagccagggagcagccaacagccagcagca

SEQ ID NO: 30135 - DNA, 1233 bp, Artificial sequence
  DNA replication origin
tcaggctgtgggttggggttgcagtctggggtcaggggtcactgacctagccccgtggcatgaggatgcaccactgccaggcacaatgcagctccaactccagcatccacgacgttgcccccggcaacaagcagctctcggcctaggtgggagcatgtggctgcagcaaggaaggcactgtcatgcagcaaggaggggggctaggctgggctggtgacccctgaccctcccctccccaagccgcccccagcactgactgacctgcagggctgatgatggcaccgtggtggtatacgccagggccgtgggagtgtccgccgggtggaggggccacagagcccaagcttcctgtcgacctgccctgattctggagctgcctcacagccagggagcagccaacagccagcagcagcagggctgccactacacgggcccaggttccgggcagcccgccagccttgttcctgcagagggggggtgtcctgagccacggctgggacagagggatgcccaaggaccccaagagaccccagggaatatttcccaaaaggtttgatttagcaagaggagcacaagtcagccaaggagaaagggcttcttggcagcgggtgcatcttgggcagacatggggatgggaaagcatctggggaaactgagcctagctagggagggagcctctggaggggagattggtggggcagagtccactcaggtgggagggaggcccagtggggtgtggcaggcaggagagaaggggctggggagcaggcccagccaggcgtagtcaggccccaacctgcccagcaggtgcctcctgcaccaggacttgggggctggggacctttgacaaagcagcagatgggacagaggctggcttggtacaaatgtccctccagatgcacagacttttgattgggtcaggccaagtctcgggctacagcctgggttttcccccaaattgaccgtacagtgcctggagctaaacccagcggggagtcgcctggtccccctgaggggctccagagagagggacttgccaacctcaagcctggggagcctggtgcccagacccctcccttacttacctggaagagtcctggtgcctccgggggtttagaaccagcgcctctgatgtctcctcctcctccacttcctcctccgactccaagcttggctcccagggcagcagcttctgatagaccacgggctcttctgcccgctccatggcccccc

SEQ ID NO: 30136 - DNA, 973 bp, Artificial sequence
  DNA replication origin
gatgggacagaggctggcttggtacaaatgtccctccagatgcacagacttttgattgggtcaggccaagtctcgggctacagcctgggttttcccccaaattgaccgtacagtgcctggagctaaacccagcggggagtcgcctggtccccctgaggggctccagagagagggacttgccaacctcaagcctggggagcctggtgcccagacccctcccttacttacctggaagagtcctggtgcctccgggggtttagaaccagcgcctctgatgtctcctcctcctccacttcctcctccgactccaagcttggctcccagggcagcagcttctgatagaccacgggctcttctgcccgctccatggccccccagtgctcgccccagccctcctgcctgccagcctttccggctgtgtctcagaggccctgcccaagcctggcaggtgggaggtggcagcgaccttggggaagggtgggggtggaatccagaacaggtctgggcagggcacggggccaaggaggctgcatgtgagcctgccccattaggacacaaggcccgaggagctctcgcgacagggttcccggggtgactgcctgtaaggggccacagctcagtgaggtcgagaaggagttcagccttaatgccacaaccttgatactcagggcacctgctgggctcctccccttgggggatgtagcccatggatcccacccacctgggactctagggactgtggacttgaattagagctacggtttcacggtggcttgggtcagagctcccacgtgcttgagtctgcacgtgactaggttctggcgtaggggtgtctggtctctggccggggtcaaggctcagcctgtggctactctgggtctgggtttctttgaggagcaacttggttcgtaactccctgtgcgtgttttgcgactcttgtccagaaggtagcgccacagcctggaaaccaaca

SEQ ID NO: 30137 - DNA, 1127 bp, Artificial sequence
  DNA replication origin
tggggagtccgagtcaaaaaggcctggagccaggggttcctcccaccacccgtgcggcccggtatcaggtggggctgggctggggctggagtaagcgtgcatattgtatctagtccctcctggctgctggcctggtgtccctggatctggggataggcgcccggcctcgtggtgccctcctcctgcatgggccagttggctccaccctcccggtgccagtgtcaggttccaggctgttccccgggggaactttgatctggaaagaatgagggtgaccgatctggctgctgcacagggccgagccgtgtcaccgagacctggcctgagctgcccctgccactttcccgcccactgggacaccaagcggttaccctgggctcaggagacacagagggggtctttcctgcttcccttccctcccttctcctcttcatcatccattgtttattcagcaattcactcattcatcaagtattggctgatggagtgggggtgagtgatggggacagagggacaaggagacagggtcctgccctttagagagcccctcacctgataggggggcaggtggcccacacagacacaccctaaacagagaccactgcttgagaaacacaagccctgctttggaggaggaagatggggagtgcgaggagggatgtgtcctagtgggcaccgtgcagggttagtggaggtaaggaggtaaggacaggctttatcagggagggcttcccggagaagggggtggttaagctggaccccgatctggaggatgagcagggatgtgtccgtttgagaagtagaaggccaggcacaatcacagaagcacgaaagagttttgtgtttgtgtgtttgtgggcggcagcggctgagaaaggggggttggagaggtgggtggggggctggttaggaagggccttgaatggccccctcaggcgttcccctgttggcgaggggacccatgagtcaggggtaggggtcctagctgggacaggttgtcaaatcaagacacagctgggggctataggggaagcggcagcttgatggcacctccgggccttgccgaggaggggctggtgcctccgagacctcccccgccagccccagccccagttagtctccacggt

SEQ ID NO: 30138 - DNA, 776 bp, Artificial sequence
  DNA replication origin
tgccgggattgcagacggtgtctggttcactcagtgctcaatggtgcccaggctggagtgcagtggcgtgatctcggctcgctacaacctccacctcccagccgcctgccttggcctcccaaagtgcccagagtgcagcctctgcacggctgccaccccgtctgggaggtgaggagcgtctctgcccggccgccctgtctgggaagtgaggagaccctctgcccggcagccaccccgtatgagaggtgaggagcccctccgccccgcagccaccccatccgggaggtggggagcgtctccgcccggcagccaccctgtccgggagggaggtgagggggtcagccccccgcccggccagctgccccgtccgggaggtgaggggcgcctctgcctggccgcccctactgggaagtgaggagcccctctgcccggccaccaccccgtctgggaggtgtacccaacagctcattgagaacgggccaggatgacaatggcagttttgtggaatagaaaagggggaaaagtggggaaaagattgagaaatcggttggttgccgtgtctgtgtagaaagaagtagatatgggagacttcattttgttctgtactaagaaaaattcttctgccttgggatcctgttgatctgtgaccttacccccaaccctgtgctctctgaaacatgtgctgtgtccactcagggttaaatggattaagggcggtgcaagatgtgctttgttaaacaggaaaaaaaaaaaaaaaaagaaagaagaaaatccat

SEQ ID NO: 30139 - DNA, 903 bp, Artificial sequence
  DNA replication origin
gagagcacagggttgggggtaaggtcacagatcaacaggatcccaaggcagaagaatttttcttagtacagaacaaaatgaagtctcccatatctacttctttctacacagacacggcaaccaaccgatttctcaatcttttccccacttttcccccttttctattccacaaaactgccattgtcatcctggcccgttctcaatgagctgttgggtacacctcccagacggggtggtggccgggcagaggggctcctcacttcccagtaggggcggccaggcagaggcgcccctcacctcccggacggggcagctggccgggcggggggctgaccccctcacctccctcccggacagggtggctgccgggcggagacgctccccacctcccggatggggtggctgcggggcggaggggctcctcacctctcatacggggtggctgccgggcagagggtctcctcacttcccagacagggcggccgggcagagacgctcctcacctcccagacggggtggcagccgtgcagaggctgcactctgggcactttgggaggccaaggcaggcggctgggaggtggaggttgtagcgagccgagatcacgccactgcactccagcctgggcaccattgagcactgagtgaaccagacaccgtctgcaatcccggcacctcgggaggccgaggctggcggatcactcgcggttaggagctggagaccagcccggccaacacagcgaaacccgtctccaccaaaaaaatacgaaaaccagtcaggcgtggcggcgcgtgcctgcaatcgcaggcactcggcagggtgaggcaggagaaccaggcagggaggttgcagtgagccgagatggcagcagcacagtccagcttcggctcggcatgagagggaga

SEQ ID NO: 30140 - DNA, 1248 bp, Artificial sequence
  DNA replication origin
tcccgctgcaggtcggccaccgtgcgcgccagggggccggccaggcgcatcgcctctgccactcgccgctccacgccgcgctgcagcccccgcatgtcctcgtgcagcgcgcgcaccgcaccctccagcgccgcctcgtagcggcccagcgcctcgcgcacagtgcgcgcctcctgggcgtcgggggccggctccatggcccagcagagcgcgcgggtcgagagcgggccagacgggggagaagatccgagctccgcagctccgggccgcgactggccgtccgtggctggcttcgctcgaggggctgccggggaggcgggcgcggggcggggcctcgggggcggagccggggacgactccgggacacccccctgccctggagcccagcgggacggtgcggagggagagctcgcccagcctctcccctccccggctcttaactgagccctgcgaccccggaggagcggcgtgcggcctgcgggaggggcggcgggcccacccgaagaaggccctggcccccctggaccgtagagagcacacccgggctgacgcgttcgctcgggactctcacccgcaaggcccaggttcctccgggggcggagactcccgggctaatggggacacctacagctcccacagctgccgccccactccgcggggccctccctatgcagcggccacggctctcgcaggcacacgctcacctgtgggaccttcgcctggaatttcttgtatctgttctaagacctcagggaggagacaggtggtgaggtcccctccctgactctgcgactacgcgctgtcccctcccagtcctactctgtatagcaagatcttcgtgcccttcccactagtggtcggtagaggctcccgacccaccaaggggcctccgttaggagatcctggagaggctaagggcagacagagaaagaagggtgtgctggagctgcatctccaaatcctggaatgggcggctttgcgactaatcgccccctcccgcaatgagagtctcagtcactggcctctacccgtaggccaggggtcttacccctattccttctcaatgctctttatggctgaacccagatagttcccccttccaaatgcacaccccaaaccatcaccagaaaagggaagaagggaaacaggtgttgctttaggacgatgggatgatgggcaaagctaactctaagttttcgctatatcataaagctgatttaaaataaaaatgagaacatatcctccttt

SEQ ID NO: 30141 - DNA, 1753 bp, Artificial sequence
  DNA replication origin
cgcccaggaggcgcgcactgtgcgcgaggcgctgggccgctacgaggcggcgctggagggtgcggtgcgcgcgctgcacgaggacatgcgggggctgcagcgcggcgtggagcggcgagtggcagaggcgatgcgcctggccggccccctggcgcgcacggtggccgacctgcagcgggacaaccagcggctgcaggcgcagctcgagcgcctgacgcgccaggtggaggcgctgggcttggccagcgggatgtccccggtgcccggcactcccggcacgcccagccccccgcccgcgcccggggttcccgaccgcgcgccccgcctgggcagcgcacgcttcgccagccacgccaccttctcgctgtccggccgcggccaggtgagcccgggggagcgcgtgcgctggcgccagggagtggggctccgaaccgggtgccgccccttcgccccgactgcctgcctctgctcgcgtctgcggggttggggccttcaccggccgctcggactaggtgatgggggtcctgccgcccctccggagttggagagggcggggggaggaccgctgagcctgccagctgcacctgtcttggtcctccgccctgttttagagccaggctctgtttgctcagagtcctgtctccctctctcctctgtcccatgacatcaacggcttgggcgccgaagtccggcccctgactgttcagcactgcctggagccacgcggggcatgttggaatggtcgacacccctgcctgacccccaccctccattcacgctcccctgcgttgccgcttcactgaggcctgacggctctggttattgattaactcagattgagaactcaggcccctggatgggtggggaggggggtcgagggggacgcgatcagcagcggcttttgggaactctccatcgcagggggtaaatcccttaccgtgaagggagagaggtggaaacccgccttgagccgtgtctagattcctcgggtcagtgactagccagaggcccacaccacgtggggatagggcggaggccgacgtggaccagtcactaccttgcgcatgggccacccagagcagttagaatgtgtccatggtgtgtgcagtggcccttgggtgggattttccatcctgatcaggcatgtgctctcgggttgggttcccaggatctggggctgtgtagcctgcacctgctccctccttggtgcaatccctggggctctcagatttcccgctgtgggctgggctggaccctagggggcctggaggagggtatcagattgggccttccccctggaggtcccatccagggtgggagatggccccagaccaagtttgggcagccagagatgttttgctccaaacacagtagttagccccttctcagtgggtatctcagcaaggctttgtgctgggggcctggggcttgctgctactggtgcagatgagggtggggtgggggctgtgcaggaagcctcagaaaggctgaaagtactcactggtgagtgcagcctcgaggtatgcgagtggagtgggcagtggcgaatgcccctagtgtgctgggcagaggagttgggctttgcccggcctgtaagaagttcttaaacatgtcatggtagcagaacccgggagtgtcccagtgctccgtgtgaaatgtctggaaatgtggatacacttaagtctgtcttatgaacatgacactctacgtgaccatggtctaaaatcaccactgtgagctcacacgtgcctca

SEQ ID NO: 30142 - DNA, 868 bp, Artificial sequence
  DNA replication origin
ctggtgagtgcagcctcgaggtatgcgagtggagtgggcagtggcgaatgcccctagtgtgctgggcagaggagttgggctttgcccggcctgtaagaagttcttaaacatgtcatggtagcagaacccgggagtgtcccagtgctccgtgtgaaatgtctggaaatgtggatacacttaagtctgtcttatgaacatgacactctacgtgaccatggtctaaaatcaccactgtgagctcacacgtgcctcatcaactgtgtcatcggttgtttctgaggttttatttgaacatgcatttgctatttgtctgctcatagcagcagctgtccaaattaaaaaaaaaaatgtcaggttcacatatacatgtagatgtgtgtgtacacacaaagagagagagagagagagagagagagagggaattctctccagtcgtgatttttgtcaatggagattagccattgttcactggcaccaagctagtccactaggttaggagttggtggatgaagctcaggatgagggtcttctttgtgtctggcaagccctcttcggggtggatggaaggtggagggtggctggaggtgggtaacttgattgtgatggtccaaggagaaaggaaaggtctgagctgggccgtgggccttggtgtgtagaggggctgccttggacagggtttcagagggggaatgagcagatggggtagtctcagaggggagctctgacttgggggactgctgggtcacagatctggggtgagatgctgggttccacccgggtcgtgctgaacatgaggggactatgggaactccaggtgaagctgtcccagagcaggtggattcatggatctggtgctccacacagtgag

SEQ ID NO: 30143 - DNA, 884 bp, Artificial sequence
  DNA replication origin
aggcgcttgcactctgcatagccgggtaaatcttgtgtccccgcctcccatgcaaagatctcatcgtgatcagggctccgtagctcatcgttggcccagaaggacctggtgccactggttcctgctgcccctgcacgggtagccatgccgacctggcccagctgagaggggcagggggcgaggcactcctgaccccatcatctggtccagcctgggggaaaaggtgagggggcctaatgtcattggaaccctccatcttgacttctgtcctcagctttttgggactctgggaggagcccagtggaggtgtttgcctcccaggatcgcaggggctcagcagttggagtggggccatcccagcttttgctgtgtgacttggcccgtcactttcttcctgggggctgttttctctcaacatgattggtgttttgccagaacgggaggggatttgggggtgggcagcttttgggggtgggcagctggccctagctgatggggtctcggtgacatttgtgtctctgtagagtttggatcacgatgaggccagtgagtcggagatgagaaagacctcaaactcctgcatcatggaaaatgggcaccagccgggggcaggtagggctgacggcagaggaggggtggctgggtaggtttgggggttaagtaaggccttggtcaggtatctgtgccaggctggcccttggcctggcatcggggggactctatcctgaaccccagcagggagagaggctgccaggagagcagcgtcattcagtagaacttgtgaaacacagagggaagttgggagatctcaggaggtagtgagctctcctgtttctagaggaaagcaaatagaggctgaggagccgactagtatttattaagct

SEQ ID NO: 30144 - DNA, 1017 bp, Artificial sequence
  DNA replication origin
ccgggctccacagcgcgctcgtccagggcgcggcagcgctcagcccagcgcttggcacagtcagtgaccacagggaggagaaagtgaaggcaggagcgcaccttcccacctgccgtccccgtcccctcagaaccgagtcctggggccacctgctcggcgcggtccctctctctctggctcagtccccgcaccccgatacgtctcctcctctcagaggctccgaggaagggcgtgggcgctggagggagcagggctcagccgggtgcccctcccgccaggccccaccggggctgagcctcttctgtcgcccgcaggagacagaactcaaggtggaagtaccggagtatctggggccgctgctgtttgtgaaactgcgcaaacggcacctccttaaggacgacgcctggttctgcaactggatctctgtgcagggccccggagccggggacgaggtcaggttcccttgttaccgctgggtggagggcaacggcgtcctgagcctgcctgaaggcaccggtaagcgcggggctgagggtgtcaggaggcctctgggctgtgtgagaagctggggggatgcgcgtgtggagaagagggcgcaggatgggggtgctggaacctggagcgccggggtctttgggggtgtcgaaggggcggtggctgcagctggcacaaagtggctggagcctgggggaggggcgtgatgctgaaggggcagaggccacacagaaggacggggtgctgaggctctcctggcagagacaagaagaggcgctcaccaaaagtcactggccaagtcctcctctgtccttctaggccgcactgtgggcgaggaccctcagggcctgttccagaaacaccgggaagaagagctggaagagagaaggaagttgtaccggtgagccctcctcccctgaccccacgtgagctgctgatgcttccagcacccatacttgatttccttcctgccccacaggtggggaaactggaaggacgggttaattctgaatatggctgggg

SEQ ID NO: 30145 - DNA, 859 bp, Artificial sequence
  DNA replication origin
gttaagcagggggagtgaattagggagaaatcattccggcttcagaagggcttggaaggtctgcagcagaggtggcgaggccgctggaggtttgaaatggcttttaaaatagagaaaccgggaggaccgacgaccgctccggcgaccgcagtttccaggcaccagagctgtgtggaatgaggggcgctcaggagcatccccttaattccaaggagatcgagtagcgggaacatttattgagcctttactgtgtgtcaccaactgcccaccatagggaggaaaaaagggaggagggagcgcgcctttccaccttccgtgccccgtcccctcaccatggagtcgcggggccacctgctccgtgcgcattttctctcttcctggctccctttgccccgctttctcggaagctcggagcaagggcgtggagtgcggggagcagggctccgcaggttcaagaggacgcgggcggtcgggggcgggacggatattgggcagggacgcgggagatgctcagggtctagaactgactgcgccggattcttgtttagagggaggtgaagagaggaaggaggcgcgggtgacaccgggggaggcaggaggagagggctgggaggtggggagaggggaggacctcatccgggcatgttgctttgacgttccctgagacagacatccggatttggggatctgggagagagctagagcagtgatgggaatttgggctttcgcggaagaaaaaaagttaacaggaccgggtagaacacccggtagatgtgacatgagatatgacgggaggtgggtcgggaaatcgagagcgttctcctgtcttgactccccatcccttccctctcaccaccca

SEQ ID NO: 30146 - DNA, 1298 bp, Artificial sequence
  DNA replication origin
cgcgccacgccaccactggaacccgggggaagatggcggcagccgttctgagtgggccctctgcgggctccgcggctggggttcctggcgggaccgggggtctctcggcagtgagctcgggcccgcggctccgcctgctgctgctggagagtgtttctggtttgctgcaacctcgaacggggtctgccgttgctccggtgcatcccccaaaccgctcggccccacatttgcccgggctcatgtgcctattgcggctgcatgggtcggtgggcggggcccaggtgagtccgtggcccgcgtgcccgcggccctgtggggaggatggcgcggcacctgtgcgccgggattacggtgcagtgcaagtgcgatagggaggttgaaggaaggagagctgcgggcagaaaggggatccaggtatcagtccggacgggatgcacgtatttctcctttatcggccatgagtttctccaggggaaaaatgggccttatttttctgttgttaggctattggtcggcacacaggaatcgattaggttccaggcccggtcactcactagttgtataatctaaaagtctctttttcctctggcaatatctgtttcggggattgtttcgactgactgaatgacgcattcaacaataaacatttaccgagctcttattgagggtcagatactgtactaggcgctccggttacagacgtggtggcgatacacaaaatgctgcgaaacaagatgagaattgaatatcaggggtctctaaccttatctgaagactggcagagatttttccaaagaaaccggcgtttaagctgagaccctaaggatgaataggggttgggtagggaaaaaatatgggaggggctgttcagtcagaggagagctcatgtgggaagaccctgtggtaggaaggaactggaaagaagggcatcgttcctggggctcagatgtggaggggaagagagtgggtacagatgagactggtgagatgggtaggcagtggtcgggtcatgcagagcgttttaggccgggttaggagcctttggacttctataagaatggaatctgataaccattcagttctgcaagctagacactcaagtaattctaaactcttcttcatacacctccataagcaatctgtcaagtcctgttgattttatcctttgagtagttttcagatctgtccactcttttccatctttctcattgctcccattctagcttgaacccccaccatcttgtccgggtgaaggcactgattctaagaaggcatatttctagcccataatagctgct

SEQ ID NO: 30147 - DNA, 1001 bp, Artificial sequence
  DNA replication origin
agaattgcttgaacccaagaggcaggggttttgttgagccgagatcccaccactgcactccagtcagggtgacagagtgagactccatctcctaaaaaagaaaaaaaaaaagaggctgggcgcagtggctcacatctataattccagcactttggaaggcgcaagcaggcggatcatttgaggtcaggagttcaagagcaacccggccaacatattgaaaccccatctctactaaaatatatatatataaactagcgaggcgtggtagtggacacctgtaatcccagctacccgggagactgaggcagaacagctggaacccaggagatggaagttgcagtgagccgacacaacaccagtgtccagaatttgtagggggtctcactgactttaagaatgaagccatggaccctcacagcaagtgttacagttcttaaaggcagcatatccggagtttgttccttctgacgttcggatgtgttcagagtttcttccttctggtgggttcgtggtctcgctagctcaagagtgaagctgcaggcctttgcggtgttaccccccttaaggccgtgtctccgaagttattcattcttcttagtgggttcgtggtttcactggcttcaggagtgaacctgcagaccttcccagcgagtactacagctcataaaggcagtgtagacccaaaaaaggagcagcagcaagatttaaccgcaaaaaacaaaagaacaaaaggtctacctaacagaagagtaccccagtgcattgcaattgccggttcaggcagcctgcttttattctctaatcggccccacccacatcctgctgattggttcattttacagagagccgattggtccattttacagagagctgattggtctgttttggcagggtgctgattggtgcatttacaatccgtgagctagacacaaaagttctccacgtccccactagattagctagatacagagtgtagacacaaaggttctccaagtccccac

SEQ ID NO: 30148 - DNA, 1239 bp, Artificial sequence
  DNA replication origin
ctgcaggggcccgggcatttcccccccaccctcattatcctcgaggacctgcgcgtgcggccccggatggctgtccctagggacccaggcgtccggcccccagatcctctccgctgcgccctcgtctgggaccgtcccagcccccgccccgagccgccgcccatgccccgccgcgtggccccacctcccttacctggtcccgggtttctcccccatggtgcgcgcgcccgccgcccgctcggttcgcggctcgctcgcagcctcctcgcccgctgccaagatccctgctcctccccgcgccaatgcgcacgcgcgccctccgcgctctcgcctcttccccctccctcccggccccgctctggtcttggggaaccggggccagatgcgtcagccggatcgcgcgcgccgcggcgctgcccgccctctcctagcagacacgcggggccattggctccgcccccagcccttcgcgctccttcccagcctggtagccctcccccgcgcgcggggccagctcccactcctcccgcccatctccccgccccgctgcaaccccttgaaaccgattggacccccctaaaccaaggcgcccgccttccaggggatctaagtctttcgattggccttcggcatccagaacctgcaggggtctcctcccctttgtttgctttctcagtggcggtgggggcgaccgggctgctgggggcggtggaatgagctgaagcgccgtctgggaaggaggatggtgggggggaacacgtgggtgagcggttcaattgcgtgatgcttgcttcagtgcgcgccgctcacctgctccactcggagcgtgccgccttctgtggccagccctcccgcttcttcactgcagcgtgtcagctcctcctggtgtttgcatttgatcttcgcagggttcccttttccaatgtctctgactatccatctccttcacccacccatcccagctaacatccactcactcacccgctcccatccatcggtccatctatggacccatccatccgtgcctatgttatgctattcactatgccaatcgatggggacacatacgaattaccatggcccctgccttcctagaatagttgaggagacacatacacaggtattacccaggaatgctattacagaggtctgagtcagaagacacagccgctaacagcaattggcccgggcgggggtggagggagtgcaggctgtccagagcggggaacagatgaggac

SEQ ID NO: 30149 - DNA, 1590 bp, Artificial sequence
  DNA replication origin
gtttcaaggggttgcagcggggcggggagatgggcgggaggagtgggagctggccccgcgcgcgggggagggctaccaggctgggaaggagcgcgaagggctgggggcggagccaatggccccgcgtgtctgctaggagagggcgggcagcgccgcggcgcgcgcgatccggctgacgcatctggccccggttccccaagaccagagcggggccgggagggagggggaagaggcgagagcgcggagggcgcgcgtgcgcattggcgcggggaggagcagggatcttggcagcgggcgaggaggctgcgagcgagccgcgaaccgagcgggcggcgggcgcgcgcaccatgggggagaaacccgggaccaggtaagggaggtggggccacgcggcggggcatgggcggcggctcggggcgggggctgggacggtcccagacgagggcgcagcggagaggatctgggggccggacgcctgggtccctagggacagccatccggggccgcacgcgcaggtcctcgaggataatgagggtgggggggaaatgcccgggcccctgcagaaagcgaggcctgagggggatcagaaaaaccggtgtcggggttctcgcagggatgtggggccagactactgggctctcccgtgcaggctgcgatgcagggatggaggaaggaggagcaggtggctggccccgaggggtcgtgtacggggaggctggatgccgggacgggggggatccactccagactcgcgccaagccaatggaaagcctcctatccaatatcccccaggtagtcgcgctgcccacacctgtcccgagggccgggtggctcctcacccaaacttctaccttcccttgggttgccaggagcaacagcttcatcttgggggagccgagtgcgtggcgaccctccctgaaactagatcgtatccctctctctgggggtgggggaggcagtattcaccctgggcgcgcgtccactccccggatgttttctgtgcaatcgaggctctttccttccactgataccccgagttctcttttttggtctctagcaaaatccacttcctgttgtgactcaacacccccaaggggcaaggggtggatgcctgagtcgcaggggagcgggagcaaaagacgaaaaggttggggctgtaggcctcaactcagagggtatcaggaatagggaattggtcctgagctctggcttgctctgcaaaacatcatatcaaccccacttccaacctatagagtatgagaacccgggtttctgagcatcaagtagacgagcatcagaaagagatcatcagagagatgatccgtctcctggatcagggtttaaacatcccagagaaaggggaagttgctgacttgtgggaggcccctgatttccgtcatgtggttcagggagtgggacggatggaccaaaggagactgctaacttggcacaatttccctcacccccatgaaattctgggccacaggaaatggagcgaatagcaggaagtgtgaaaggacatctgcttcagctacccctgctcccactgggcacctccctggtcatccccacactctgcctccttggcca

SEQ ID NO: 30150 - DNA, 1101 bp, Artificial sequence
  DNA replication origin
agtgcctcggaggaggagggccggtccggcagtgcagccgcctcacaggtcggcggacgggccaggcgggcggcctcctgaaccgaaccgaatcggctcctcgggccgtcgtcctcccgcccctcctcgcccgccgccggagttttctttcggtttcttccaagattcctggccttccctcgacggagccgggcccagtgcgggggcgcagggcgcgggagctccacctcctcggctttccctgcgtccagaggctggcatggcgcgggccgagtactgagcgcacggtcggggcacagcagggccggggggtgcagctggctcgcgcctcctctccggccgccgtctcctccggtccccggcgaaagccattgagacaccagctggacgtcacgcgccggagcatgtctgggagtcagagcgaggtggctccatccccgcagagtccgcggagccccgagatgggacgggacttgcggcccgggtcccgcgtgctcctgctcctgcttctgctcctgctggtgtacctgactcagccaggttagccgggggcggggcaggggacccagattcccctgtcacgggaagggggtgagttggggaggggacacgaggcccacggagttgagtggatgaaggcagcggggacaagaggaaagccagccagccgcctggggttggggacagaggcccggggacgcctggctccgggcgggattatggatgttgtcgggggcgtgatgatgtgtgggttgagcctggcgctctgaccctgggtccaccgagaggctgtcatggggctgtggattggatgccagggaacagcggagtggggaccctgggcctgggaatgggtgccgaccacctccgtcccgcgcaggcaatggcaacgagggcagcgtcactggaagttgttattgtggtaaaagaatttcttccgactccccgccatcggttcagttcatgaatcgtctccggaaacacctgagagcttaccatcggtgtctatactacacgaggtaattttacctgcctctgcgagggcagcgcctgggcggcccctccttgcaggtgcctccaggaccctctctggtccagcct

SEQ ID NO: 30151 - DNA, 1028 bp, Artificial sequence
  DNA replication origin
gtcttgtttcgttctccaccctgtcctctcggcagccatccttgccacctcctgcctcccgggcagcctcctctgactctcctggagggtttgtttcctggggggactccctgctggtaggggctagctcccggtcctcctctggttccaccttctctgtgctgcctgcacccccgtcctctctcttctcttcttcttcatcttcctcctcttcctcctccccttcctccccatcctctaggctgacaaagctgatgtaggggctcaggtctcgcaggtggagtggagggttgtctcccaggagccaggcagtccccaggcctggtccaggacctggttctgccccttgccccaggctgatgcccacactatggttgggcaggacatggagcacccaaagggcagggtcctggggtagccttctgatctgggcctccagctgccggcagcggccctcaaggctagtccctacagctccacgctctgccacaaactttcggaaccagccgaagagaagggcagtgaaatcaaggaactcatcccggtatccagacacaaactccatgtcttcagcggcacagggccccggcccagactgagcaaaagaagggatatatggtgagggacaggagagcaatgatggagtttggggctgggtcacaaattgagggagagggtaggtttgagagtcacttagggttggatccgtggatatgctaggagcggagaagaggatttttcagggctgaggatgggagtttagggaggaaaatgggggctggacttgaaagtgggtgaccagggttggagaagactactcagggatgagatggtatttggggcttaaaattggagagttcacaccctcaaaagcagagtttaaattaaggctagagaggagagagggctaatcctatcgggaacggtttggtggggagggaagcattttggatgcgtctgtggggtatgggagtgggagcgagggggttccctgggctcggatctgcgtggcgggcagccccggtaga

SEQ ID NO: 30152 - DNA, 1403 bp, Artificial sequence
  DNA replication origin
tcgttcccagtttaatggcccaattatgagcgtgtaatcaaaagatccatgactcagtggtttcaaacaagtaattttatttaccttttcatgttttaccaacctgtcctccccctaggccttgagtgttttcacgttttcctttcagtgtttgggagctggggactactagggtatcagcattcatttccgccggcgggccccccgcccaggtttcttttctcctcggcgccttcgggtgggggcaggaggagcagagggagttggggatgggggtgggggcccgggcgccgggcgggccccgctcccttgagcaggcttgtaaaccaggtggaagatgaaggcattgcagtacctgcgggggcgcggggcgcagtcagggaccacggggcgggactcccaggggtcggcgctcccaggggtcggggctcccaggggcgcggtcagggaccagggggcggggctccaccgggcggtcagggaccagggggcggggcttgcccctctgagttccagggcgtggggctagactcagggttgggtctgttggagggtcgcggggtcttttgtgggttggggagattccgtgagctagatctaaagaggggtgtgctgggggatgtcgagacctcccatgggggcgacgagtagtggggacagagaaggcaggttgctgggctgggggcaggagggccccaggacagcagggactagggtagaggtgggccttcgaggatgtggagccagagagtaagagaagttaagggtcaggaaggaaatagggtcgcagacccttaccaggacatgcagttgtcggccgctctgaggcgaaagggggagcggaaggggttgggctggggagggctggtgccccctccagtggccaccgccatggtctggccgtccatcacacagctgtactcgctgctctcggtgaagaaggctggcactcggagggactggggtggagcgagagtcgctctgagaggcccctccccaaatccatcccagcagccagaatgacagaccgggctgaaagccgaggtccccggacagaccgggcggaggggagcagggggaggacggagacagacacagagagaggcagggggacccgtgggcactccccaggtttgtggagcaggtgatggtgaagaggaggagagcccagagactttcagaaaaggagatggggaggggccaggcaggaggggagagaagttcccttttgcccccattgcccacctgtaaccggggcagagacctcagccacgtatccttgagagcaaacccggagttaaatcctgcagacagagaggagggagaagctggctcccacggtgggcttctctcccaccttccccacatgcctaaccctgagacccaggcttttaccaataacc

SEQ ID NO: 30153 - DNA, 1672 bp, Artificial sequence
  DNA replication origin
gatggagccgccaaggaggcggggaccggctggggggcgggaggccactcactcgacgagtgccctccatcccgccaggtacggcgacagccccacatccccttcgggtttcagactggcgtggaaccgcctcatcatgcggcccagcatcccccgagggcccagacacggaggctgtttcctctccggggcctccagggttcccgactcctgccggacctggtggggagacacgatgggaagaggtgggagcagattctgccctgaagaaattgttccgaaggtttagctggcggctcttctgctgtgcgctcagcttccgacgggagagggtagaccgggggaggacccgccctttgccggaccctcagcctggctccacgtccccctgttctggtccctcctggagcgcccgcgcccaatcctgcgcctagcgtacctggaagggcgccgtttcccctggaacgcagggctgcgccctgggtccgcagcccgagcgggcgcctgggtagaggagaagcggagcggtgagggctcgagaaagaggcttgagtcgtgagggcctggattccgggcttcctcccggagcaagtgagggaaggggcagctcacctaggctccgaacactgagataaagcagcagcagcgcgaagatagcgagaggaattgagtggctgaaccagtgccgcagggctgggggccgcgccgccactcccatgcctgctgctgggaccgccgccccctcaccagcgcctagccagtccgtgtccctccgcctccaggaggggacagaagcccgtggtgccctgaggcgcaaaggattaataattaacctactaaggccccttcccctgtgcccttcgccccaaagggcagctaccctgggtgcgaggaactgggtgaagggaatttgggggattcgacagcagtgacagatcagtgcatttcccttccctgtagggccagctgtagcaagaggcactctgagtattgggaagagaggcagggcccagaacagctcccctactgagcagtggtgtgggccctaaattcactctgggcttgagttccctccactgtaaattgaggataataataggtactttgcaagcctcatgtgaggattaaatgataacgtatgtgaaaacactaaatggaaaagctgaccacaattgccctataaatcttattaagttcaagcattgtccggctctgggatccagggaacacccacttctctctcgctctctttttttttttgtttgttttttgtttttttgttttttgagacaaagtctcgctctgtcgcccaggctggaaagtgccggctaatttttacatttttagtagagacagggtttcaccatactggacaggctggtctcgaactcctgaccttgtgatccgcccaacttggcctcccaaagtgctgggattacaggcgtaaaccaccgcgcccagccgggaacacccacttctaaattctctatcttattcccaggggactttgtcttgacctggatacatgacctcttgcaatcatatacgtacgtcaggctttatccttttgcatttttgtggtttaattttcaaaactccagattggctcttcaatcattcattgcaccaacttttattaagtacttccgcacgtactaggcttcaagaatac

SEQ ID NO: 30154 - DNA, 1023 bp, Artificial sequence
  DNA replication origin
ccgccggtccccgcagccgccgtcttaggccagctggagcaggccgcgctcggccagcaggctctgggtgcggttgtagacatcctccaaggtgccggcggcccggaccagcgcggcccgcgcctccgcctcggtggctccgggacacgccagctccagcaggcggcggcgacccgggaaggcgaggaaggcgaggcgggcggtctgtcggaccagccaggggtgatgcggacccagggccgcacggtaggcgtcgctgcactgcacgcccgcgtccgggcctcccagcgcgccggtcgccacccggtggaggcagagctgggaccagcgcagcgcgcggtgcagcaggagcagcgtgcgagagcccgagctccgggtcgggtcccggggggccgcccccggctgctccagcagtcccgccctccgctcccacgccgccatggccaccagcgaccagtagtgctccgcgtccgggccgtgcacccgagcctccaggtctgtcaccttggtgaaggcctccctagtggcgaaggcgaagacggagccgaggggagtcaggaacctgcgggcgagacgatttgagagaatggagatggagccgccaaggaggcggggaccggctggggggcgggaggccactcactcgacgagtgccctccatcccgccaggtacggcgacagccccacatccccttcgggtttcagactggcgtggaaccgcctcatcatgcggcccagcatcccccgagggcccagacacggaggctgtttcctctccggggcctccagggttcccgactcctgccggacctggtggggagacacgatgggaagaggtgggagcagattctgccctgaagaaattgttccgaaggtttagctggcggctcttctgctgtgcgctcagcttccgacgggagagggtagaccgggggaggacccgccctttgccggaccctcagcctggctccacgtccccctgttctggtccctcctggagcgcccgcgcccaatcctgcgcct

SEQ ID NO: 30155 - DNA, 1044 bp, Artificial sequence
  DNA replication origin
ggagggaaaggatggacagagaaacaatgaggaggctagtgcagtaatctaggatatagtctcccttcatagtcaaaggtactaggagtggagaaagtgggcactgctcagattttcacagattggatgctgatatgatgaaagagaaacagaagggctggggctgggcgcagtgcctcacacctgtaatccctgcactttgggaggccgaggcgggcggataacctgaggtcgggaattcaagaccagcctgaccaacacgtagacagcctgtctctactaaaaatacaaaaagtagcctggtgtggtggtgcatgcctgtaatcccagctacttgggaggctgaggcaggagaattgcttgaacccgggaggtggaggttgcggtgagccaagatcgcgccattgcactccagcctgggtaacaagagagaaactctgtctcagaaaaaaaaaaaaaaaaaagaaagaaaaccaaaccaaaacgaaaaaacaacccagaagggtctggatgacgaggtttttggtctgaggacctggaagaatgaagtgtcatttgagccagcaaagactatgaagggagaattttcgtggggagggcgtgttggagcttagtgttggacatggtaggtttgctatgcctaggtgacatccaagtggaaataccgaataggcaatcgtatatgtaggattctggagtccaggagaaagtggattgaagttgtgatttggaagttatcagtgtatgaaatggcaagatctttcatgttcattgtgggagtggccgtggagtcacttggctgcacaggggtgaagctcagggacaagtctgggctggagactcagcgtgtgtttggcaaccgaagccacgggagtgactacgataggccgggggagcgtgagtctctcggctgccgagaacagagatgacacatcttctcaccttcgttttttatttcccttaagcgcctgtcgtcatcacacaaaacgccctacgtcgacgctgccaaatattgcttttttattcctcacagctcctcccgtc

SEQ ID NO: 30156 - DNA, 1070 bp, Artificial sequence
  DNA replication origin
ttgtttttgcttttgttttgagacagtcttgctctgtcgctcaggctggagtgcagtggcgtgatctcggctcactgtaacctccgcctcccaggctcaagcgattctcctgcctcagcctccccagtagccgggattacaggcgcgccccaccacgcccggctaatttttgtattttttagtagagaaggagtttcaccatgttggccaggctggtcttgaactcctaacctcatgatccgcccgcctcagcctcccaaagtgccgaacggtttttgggttttttttggttttttggggggggggttttgctgactttcttgttttgtttgttgcttgccacgctgccatcaagtgctcactgtcgcaaaagaaccgtccccatgcagtactgtacttttcttttcccttctgccgtcaacctcggagtagcttcgctcccagaaggcctcaaagcgcgaccaaagagcgtgacagagcgctttacgacagttgctttgaggcagtaccggaggagaaagatggcggctaccttactagctgctcggggagccgggccagcaccggcttgggggccggaggcgttcactccagactgggaaagccgagaagtttccactggggtgaggaaggaatcggggttcataggacgtgcacaaggcctgacgcgatgggaagataaagcctgagtggggttgagagatctggcaggggtggagaggaggtggaatgtgttgtgctccaggaatggggagaggtaccccgaagatggtggagtggtgcggtagcttcgtagtgggaggtggagggtgggctgaagtttgaaattctgaaatcctgcgaggctagtgaggatcttgggcttaagtacgggatgagtcttttgagatttgagggttggcattctggtattctgcggggtgctgaggcccctataagatttgaaaatggttcagcgacggacagattttgtatttttggaactaggtagagagatcattgaggtttgtgtctgctggagaatgtagacttactcctttttcccttttcccagaccactatcatggccg

SEQ ID NO: 30157 - DNA, 683 bp, Artificial sequence
  DNA replication origin
cacctaccggcagctcccgcagcggaggcgcgtcccccgggcgccgaggcagcgcccgcggctggaggggcccggggcgggcgccgagcccgagggatgcgcgcagcgcggggtgccccgggaggcagcggccgggcacgctgggaccgacggcgcgggacgccccgacgccgggcagcacttacccgccgcaccgagagagctacgcggccccgcggccctgcagggcacagggcggccccctgcccggggctctcggtggcgcactgggcggcggggcgggccgagggcagcgggggcgggacaggacagacgagaatcccgcggaggtgaggccgggggccgccccgcccccgagggcaggccctgagccccggccccgcctcggccggccccgcctcggccggggcgtgggctccggctgcagctccggtctgctctcttggctccggaacccccgcgggcgctggctccgtctgccagggtgagggggccgggaaggggcgcgcgggggtcccgggtctcggaaatcgggcggggacggaacgggctcgggctgcggggcctccagactcagtcgcacgctcagatttcgggatttctacccccggctgggatcgcgtaacttcctcattcccgcctggacccctgcccccggcccgcctggcctggcgtgagccccg

SEQ ID NO: 30158 - DNA, 2054 bp, Artificial sequence
  DNA replication origin
gacaggacagacgagaatcccgcggaggtgaggccgggggccgccccgcccccgagggcaggccctgagccccggccccgcctcggccggccccgcctcggccggggcgtgggctccggctgcagctccggtctgctctcttggctccggaacccccgcgggcgctggctccgtctgccagggtgagggggccgggaaggggcgcgcgggggtcccgggtctcggaaatcgggcggggacggaacgggctcgggctgcggggcctccagactcagtcgcacgctcagatttcgggatttctacccccggctgggatcgcgtaacttcctcattcccgcctggacccctgcccccggcccgcctggcctggcgtgagccccgtagccgcgcgctctccggaccacccagggccgcttccccgcgcagctgctgcgccgccccaggtcggagccttccgggcctggctgggtgttccccggggctctggttacgggacggggcggggggcggggggcgggactgggattgtggatgaaggactaaggtaggggatgggggctcgaaggggtcggtggggcgttgcaaactggtcaggcgtcatccgcgggcggtcaggaggccgtgggggaagaggaggatctggaagagatggaggacctgcgggagttaggatggggggcgggttctgcaggacagctcgcctccctgaggcttcccaatgttcctaggatgacggcgacccctgagagcctcttccccactggggacgaactggactccagccagctccagatggagtccgatgaggtggacaccctgaaggagggagaggacccaggtacacagggaagatggatggccctcagggaggagaggcgttcgggagccagggggctggggcctgttgtggtctacactcctcgactttctttcctcccagccgaccggatgcacccgtttctggccatctatgagcttcagtctctgaaagtgcaccccttggtgttcgcacctggggtccctgtcacagcccaggtggtgggcaccgaaagatataccagcggatccaaggtggccagactggccccagggagggggaaagggagggcggcccggaatggatccaaggtggctgggctggccccagggaaggggcaaaaggagggctggccagagtggggaggcggggacccacgcaggggacatccattcagttcctcatacccctaggtgggaacctgcactctgtattctgtccgcttgactcacggcgacttttcctggacaaccaagaagaaataccgtcattttcaggagctgcatcgggacctcctgagacacaaagtcttgatgagtctgctccctctggctcggtgagggcgaccggactgcttcctgtagagggcaggtgctccccaccctcctttctgtctgtctcaccccggggccacaacctttcctccctgcaactctggccactgtgctgcctcccctgaccccagttaccaggaaactttccctgctcagctttccctgtccatggttctgtgccagcatctcagctgggcgggatgcccaaaatgctcttggcagcctcacccttttctagtctccattcccagggtagggggcctccgttttgccagcctctaggccttttgtttgttttttgtttttgttttgtacaaggtctccctctgtcacccaggctagagtgcagtggtatgatcttggctcatggcaacctcctgggctcaagcagtcctcccgtctcagcctccagagtagctaggaccacagccaccacacccaactaatttttgtatattttgtagagatggggtgctgctgtgttgcccaggctggtcttaaattcctgagctcaagtgatccacctgctgcggcctccccaagtgctgggattccaggcgtgagccaccacgcctggccacctccaggcctcttcttttcctccgagccccatctccagtgttttcaggaaccagagcacccagcctcccagctcttacctgaccttcatccatcctttccac

SEQ ID NO: 30159 - DNA, 957 bp, Artificial sequence
  DNA replication origin
tgcgcgcaggcgcaggcgagcaggcgaaaggcgcgcgcgaggacggagcgaccgcgcgagcctggcgtgaaagaagtgggcggcggccgaggcggccgcggagcgcgcccaccagctggtgcgcgtgcgcacacgcgtttccttttctttccctattttttttgccctttctctcccttatttccttctcagatctcctttgacgcctttccttccctttccctccttctttcgtgtgcccagctgccaatcaagccacccacctttccatttgcgggggaagggggcggtacccaaccccctctattactagggggttgttatggtaactccccacgcgagggctgggtggcctctagataggacgggctgtccacccacccaattgctatggcaacagtggagccgctgagggaggggccactccgtgagaacttggctggagaaaccacgtgggagttggggggcagaggaggggcaccggctgcctcaggaatgccctttccaccctcacctagcaggttggggaagcatcgaggtgctctcagatctcaggataaggaatcctaccgcagacgtgtatctctgcacctcttttaacaaagtgttctgcacaaaggaactgtttccacaattattcattgatcactggagtcgcgcgtggaggaaggggtggcgaaggggaagagagggaatctgcgttcagtcccttaaaatatagcttgggtcaccttagatctagtcatgttggcatagcgcctacagccattagcctcagtggaggctgggtaatgctatctaagaaccacgagtcatgttctaccactgaaatgctgtgtgaccttgagcaagttgctttgcttctctgaggttttctttcactgtgaaattgaggggggaggctgtatgatcctcaagagctcttctagcaccaacactgcctctgaaagactccac

SEQ ID NO: 30160 - DNA, 963 bp, Artificial sequence
  DNA replication origin
ctccccacaccttggcctggtgagagcgctggaagggcacaggatcaaaacaccacctggctgatagtctggagtgttcaccttgaaatcactaagttgccccttaagccaaagctccctgccgaagaaaaacataaatgctacagaaagctcttccaccagagtgtgtaagtgccccacaagggacaatgaacgggtatttccaagaaattcctgcagcatttgcttcctctcaacccctttccttattagcccctaccttgagaggtctccattgcttccagcctttagctaacataaacacccactgcctttccaaaccttcagcctgaccacatgtagcatgtgtcgtgtgtgcgcgtgtgtgtgtgtgtaaacatcctcttcccagcccgtgctacagtttccaaagagaagaaatgcctcccctcctccccgagggctcccagccccacgctgctgcagagttggtcatgtaatattcagggaccctgagaccggaaatgcctggttctgaactgctgcacttgaaacaggagagaagggatagggaaaactgaacatgggattgagggtgacggcacgaggggtggggtagctgaaattccgaccagggaaaggatgcaattcaagggtgggcgaggcagagaaagagggatgagagagaggctgtcgagacagttgcaaagtcaaaattccaggagctgaggaagaggaggggaaggaagaagatagaagtaagggcaaaggtggaaaagggccgaaaggaggtaaggaaccacaataaaggttctccaggtgatgggggaggctaagtttaggcgaaccagtgggtcccgaaccccagagtaaaggtagggtggcacggaagtgtgggggcggggcaccacagggtggggaccgaactggctcccagcatctgcagccagtggagagagaagggagcagagggcgggggcccag

SEQ ID NO: 30161 - DNA, 1000 bp, Artificial sequence
  DNA replication origin
tgaggtcaggagttcaagaccagcctgaccaacaaggtaaaccctgtctctactaaaaatacaaaaattagccgggtgtggtggcttgtgcctgtaatcccaactacttgggaggctgggacaggagaatcacttgaatcggggaggcagaggatgcggtgagctgagatcaccccactgcactccagcctgggcaacagagtgagactctgtctcaaaaaaaaaaaaaaaaaaaaaaaaaaaactaagaaagtccactctctggtaaaacatttaccaagcatataaattatgaggtgctgattcatatgacaaaaaggagattcacttttagtagctgctctaatgcattccacttaagtgaatattcaaggattattttggaaggatggagataatccaaaactagtgtgagaaactgctgcattaaggaaggagggaggtttttctagataactgctgcattaaggaaggagggaggtttttcttttatttctgtattcattcattccacagacaggtattgagggcagccctgacctccaagaacttagtctagcagaggagacagataagagaatcaatcacaaaaatgtaattggtgtcacgaaagagtcagtacagggtattgtgggaggagaggattgtgaggggcacttcctggaggtgacattgtctcagtggaggtcgggaggcacaggcacgaggcatccaggtaaagaggaggagagtgatgaacagcatgtggagacccaggagtgagaaggaacagagagaaagccactagttagtgcagtgttcctgcccctctgcctcatccccacaccagcaagaaccaaaaggcaccagcatgagaattggcaaggctccaggtaaaccatagctgggatattcagctgtacagcagtcatatgtgagcctgaggaagaacctgtttggcccacagagggagacagaatctactgggtggggggggtgtgatttgtgggggagtgtggtt

SEQ ID NO: 30162 - DNA, 1109 bp, Artificial sequence
  DNA replication origin
ggtgtggggtggggggcagagggcagggaaggaggaagaggcagaggagggcagcagcagcgagttggagaaggaggaagggatccgcaggagaatgagggggtgcaggggaagagtaagagagaggtaggggaggggatgacatgagccccagggggccatgcggcacagatggggaagaagagggcacagggaatgaggggggatgaggaaggggtcggggagtcagggatggggtaaagagatgggaatgaggcagggaaggaagagggagggggtcagggttggggttgaagggtgggagaaaacagagagaaagagtgaagctagaaaagataggaggaatctgggggtgggggagagaagggggaagggcacggggagcaggggcggcaggcagcaggagcgggagggcgggagggcagggatgcgggtgcggcgctctacctgctcgcgctccgcctgccgccgctcctcctcccgccgcagagcctgcatgtcctccagccgccgctgctgctccttctcctgcagcttccgctgctcccgctcccgccgctgttgctgtggggagagccaggtggtcttaagaaccataccggacatcgcgtcagcactgcccctccatggacagggaggggagccctccttgctcaccacggagggtggtaagagagaccggcttccgcttgtttctgcaactatacccatccccacccaagggcccgcggggctgggctcgggtaaacagccggtagctgtgacgagagaggctgtgagactgactgctgcctgtggggtgggcttagctagacaacaccttccactccccacaccccaccaaacaacaaaccaaagccgaactcaaaacaagcctccccagcactcctagcctaaaatcgacctttgcctgaagtccatatagagcgggtcgtagtgatagcctttggccacaagagggcaccaggtgcccgtgcacagaaagcacagaaaagagggacctggcccactccttgacaagcaccagtgcccaggtggtactttactttcacggtatttctgtggtggctttcacgaagtctaccaccaccaccaccaacaaaagcaca

SEQ ID NO: 30163 - DNA, 884 bp, Artificial sequence
  DNA replication origin
ggtacaggggcttcctgtccccaggcaggagctgctgctgctgctgtttctgaagctgctgctgctgttgctgctgctgcagggacttgaggtaggcatgctcctgctgcagctgcctctggagacgttctgactgccgctgctcctccagctgcttccgcttgtattcctgggcccaagggtagggagagagggctcagcagggtgtggccctgggagttagagcaggcatgccctctcttttctccaactgcctagagaggagatgtattcccttgatgtcctgggtgaatcccttcccttgaagtgttcccatcccgttccagcaaagaagctctgaaaagcatcttcccagaggacgctgagggacccgttaccagcagcagggcctgttcctggagcagctgttgctgaaggatctcgagctgtcgctgctcctcctctagcctgtgacgaatatattcctgggggacggggtgtggggtggggggcagagggcagggaaggaggaagaggcagaggagggcagcagcagcgagttggagaaggaggaagggatccgcaggagaatgagggggtgcaggggaagagtaagagagaggtaggggaggggatgacatgagccccagggggccatgcggcacagatggggaagaagagggcacagggaatgaggggggatgaggaaggggtcggggagtcagggatggggtaaagagatgggaatgaggcagggaaggaagagggagggggtcagggttggggttgaagggtgggagaaaacagagagaaagagtgaagctagaaaagataggaggaatctgggggtgggggagagaagggggaagggcacggggagcaggggcggcaggcagcaggagcgg

SEQ ID NO: 30164 - DNA, 1238 bp, Artificial sequence
  DNA replication origin
gccaggtttcgggtgggctggtcctgcagggactgggatcggggtacaggtgctgcatatggcttcagtgggacccggtgtgccaccaggctctgcagggagagaccagggagggtgggctgcctgctccatggcacatccccacctgcgaattggggtctggggtgggaaaggactttagctgccccttcctccattgaaggacaaggggttccttgagcctgatgacagctaagtcaggacagacacaggcagcaagaagcaggtgagtgagtctgtccacaaagcctgtgctctgtaatcctggctcacggctgagcaggtgtgtgtgtgtgtgtgtgtgtgtgcgcgcgtgtgtgtgtacctgtgctctgaacaaagctccctgtgtcttcattaagacaggggtggggagagactcaccttgtgcggtccctcctggggctccaccggcctctgcataggaggagtctgggaaaggggtcctgggggccctggggaggcctgggggatggggggctcaggccccgtgctgcctggcttgctcttggccaagggagagttctgctgcttgttcatccttgttctctcttctacctgtgatgtgaagggatgtcaagcaggccagctcttgcctccctgttctcaaaactgagggtcccacctgccctaactactcccgccctatgctctgtgctgtgtgctcctttcccctacttggtgcctgctactgtgaactactacttcttgtggctctccaggcctcaggcagtgggactgcagtctcaggaggcaaaggaggcagtgagtacctctcgggcccaggctggtttgtcagcgggattcatgccccgaccataatggtacaggggcttcctgtccccaggcaggagctgctgctgctgctgtttctgaagctgctgctgctgttgctgctgctgcagggacttgaggtaggcatgctcctgctgcagctgcctctggagacgttctgactgccgctgctcctccagctgcttccgcttgtattcctgggcccaagggtagggagagagggctcagcagggtgtggccctgggagttagagcaggcatgccctctcttttctccaactgcctagagaggagatgtattcccttgatgtcctgggtgaatcccttcccttgaagtgttcccatcccgttccagcaaagaagctctgaaaagcatcttcccagaggacgctgagggacccgtta

SEQ ID NO: 30165 - DNA, 1403 bp, Artificial sequence
  DNA replication origin
gtggcagaagtgagaggtgagagtgagttgggggacaactctattacctagaggcgttgggcgggccagggggctgagcagggggccctggaggctttggggtgccccgctctgcccgcctttgcagatagatttgccaggcggagttgctgcgaggtctgtgaagggagcacaggggtgccgagggggcggcgggggggcgctgaggtgatggggctggggctttcccacccccaggcgggtaggctggtaaagtccctgtgccccccctactccctaggctgccctcagacctcacccaggcgttgccctacccaggcattacctggcacggactgcctgggctggccgggaccctccggccccactggtgttaagggcagtggcgatagatgaggtcctctgaggcacctgtggagagaagtccacgtgctgcgagctggcgctgcgacaggcacttctcagatgtttaagcctcacctctgagaggtgagctcccccactttgatggatgagaaaactgaggttcaggggagttagtgaatacgtccagggttatgaagccggatgatggtggagctgcggttctaactggcaaagtctgccccttagcgctcccaaaacaccctgggcgtttctccgttcccacgctccccacagggatcgatgccacccctccacgtcgcgtcctcagctggacggctgaccccggcagggcagcgccctggctttctctcgcttcccgccctgcactcttcctccatgtggcctgccccttcactgccctccttctcttcatgactagctctctgcttttccctgggcctgcagaactgtccttaccttgggtggggcctcgttatctgggcggacccaggctgggggattcgggctggggccaggtccttcagaggtggggtctgaattctggcggatgacagctcctcgggcactgggcgtggcagtgggtgcggggatggcagggtcggggtcatgggaggctgggaaggcagccaggtttcgggtgggctggtcctgcagggactgggatcggggtacaggtgctgcatatggcttcagtgggacccggtgtgccaccaggctctgcagggagagaccagggagggtgggctgcctgctccatggcacatccccacctgcgaattggggtctggggtgggaaaggactttagctgccccttcctccattgaaggacaaggggttccttgagcctgatgacagctaagtcaggacagacacaggcagcaagaagcaggtgagtgagtctgtccacaaagcctgtgctctgtaatcctggctcacggctgagcaggtgtgtgtgtgtgtgtgtgtgtgtgcgcgcgtgtgtgtgtacctgtgctctgaacaaagctccctgtgt

SEQ ID NO: 30166 - DNA, 1318 bp, Artificial sequence
  DNA replication origin
gcaccctttgtctacctccacccaggcccagcttctccctgcccctcacgtggctcctccctgcaggactttgtgttgctgaaagagcggactctggacgaggcccctcggcctcccaagaaggccatggactactcgtcgtccagcgaggaggtggaaagcagtgaggacgacgaggaggaaggcgaaggcgggccagcagaggggagcagagatacccctgggggccggtacggcatcgggagtggggccctcccactccaaggcacagggagggaggggaagtggcagtggggaagaggtggggctttggggcaagtctgagggagagcggctcccttctctagagagtggggtgagggtgcaggttcctgtctctctcccgctgccctgtgtgttgtggggtggcctcttcaagtgcctgtctgcccctgtgccagcctgccctgtgtgccatgcagggaagcacctcacggtggagcaggggctacaccgtgagggtggagcaggttgtgttttgaatagagacaaaagcctgggctctggctgccatctgctgcctttggcacttctgtggccacgggcaggacctggaggggccccaccttcctctctcacagcagcgatggggatacagacagcgtcagcaccatggtggtccacgacgtcgaggagatcaccgggacccagcccccatacgggggcggcaccatggtggtccagcgcgtgagtgagcctctgctccctcccctgtacctgtgtgtgccctcctcagccccacgccaaccctgccctctgtcctgtagacccctgaagaggagcggaacctgctgcatgctgacagcaatgggtacacaaacctgcctgacgtggtccagcccagccactcacccaccgagaacagcaaaggccaaagcccaccctcgaaggatgggagtggtgacgtaagtgggccggaggcaggtccgccgggagagaagagccctggcgatgggcaggaggtcccggtgctgggtaacggcagaggatggggcggagcgctgggagctggacagcgggggtgccagttggggagctggagcctggggaacagcagcaggggcagggccgcagctggacttgcacttgtttgcctgactgctgtccccctaccacagtaccagtctcgtgggctggtaaaggcccctggcaagagctcgttcacgatgtttgtggatctagggatctaccagcctggaggcagtggggacagcatccccatcacaggtgaggacaggaggacagacctgctgtgaggccagggtccaggggcagcctg

SEQ ID NO: 30167 - DNA, 869 bp, Artificial sequence
  DNA replication origin
gtgaggggctgagcaggctgcaccccggggccacctcggggcatgtggctgggagggcggcagctcactcacccacagaagtaggcatctccccccactgcagcaccacatccttaatgatgcgcccgtacgtgttgacgtagacaccctcgtcctcgtagcacagcagcatctccatgccgtcggtgttggggaggaagatgatggcatggggcgtgatctggctctggatctggggagaaggagggggactagagtctccgtgtctggtgcccagactgggccatcccactcccccagcagccccgccaagctcacgtgcacagggatgtagatgtcatagctgttccccgagtcgacatccacagcatggaagccagcactggagccatagatgaccttgagccgctgcccctcctctactgtcaggtcgaccagcagagggcggtgggggaggtcggcaaaggactgcagagaaccggaggagaggagggctcaggggcacggggagaggcgctgggactccagatggtgttagggaccgaggctgggattaccttgaaggccatgaatttgtggtagggtttgggggcccaggcatacacctccacggagctcttgagggcgatgaccaggaacttaatccgctcgtatttcactgggggcgggagagaagagggatgctgagacttcccttcttgcgccacgggcgcctccccgtggtctgtcactacactgccccacccaggccccaagtccctggctcccagatccatttctctcttcatgaacaagtatgcgctggccactctgttgggacatcctcaccaacacggtagtgcccgcagccctccatgtcccccacggtg

SEQ ID NO: 30168 - DNA, 1413 bp, Artificial sequence
  DNA replication origin
cttccccaccctggaggctctctctgcctagtctacagtactgacagaaagcaaggacatgcggcctgcatggtgggagctggttgaattgtctttattaacaaacaggatatccaaggccactacattgaggaggggtggggggggagggagaagggttacttgctgctcacactatatacagatgcaagcaaggggcgtggagagtgagggctccctgctccctccctccaccggggaagggcatgggctagaagaggagaggggggtcgggaatggggggaatgttttggctggcggggtcccccctccattccctggagtttgggggaaggggaatcattaaagtgctttcagaaaatgaagaaatggtccctgcccctggagtggctggtgaccccccaaaaatctagggcccagtgaccccccccagggtctggtacattcaaggggggagccggctcccctgacgtgcaaataaaggggtccagggccctgcccagtcagcagcagtggggtaaggggttcaagccccaagcactctcctctcaaatggagaaaaggggggaggggctaggcccactcaattcctgggaaggggaagctgtgtccctccccagaagctggggacaggcacagttttgggaagaggacatgttggggaagaggatggtcacgtgatcacgaaagcatcaggggtcagaggtcacgttcccagcaggctccagtgaaatcaaaccagtaaaagcaaaagcccagggaggggaaagaggggcggcccgggaagcctggctgcagggggagagctgggtccagtgtgggacagccccagcccagggccccgtcaccagttcatgatgcagttacggttcagagtcatgaagtaaacttggctgctgcccccagagcggactgaggcaaaaaacacctgggtggggcaggagaagaagtcaccaagggctgaggttgggggggtgtctcaactgggagagggaaagaagggaagaaggggtggcagaagagttgagggagacacagagactgcaggaggagactcacagtgcccctcacccggaggaaaggcaggctgggatgttaggggagagggtgcaccactcgccccctgggggccagctgggaagtcctcggaatctgaagggagcgcagggcagtggtagtggctgactgccctctgagctcccagaggggcccgctttcaggaagccaccaccaccatcctctccccagaactctgcccaggggcctagggtcatggcagccgggacagcagggctttcagagggaaggagcctcccaccttgtcattccgctcacacaggaacttgagcctctgagctcgtttgtgcatgaagaccccgtcgaggtggcccgtctccacagagcggatctcaa

SEQ ID NO: 30169 - DNA, 1369 bp, Artificial sequence
  DNA replication origin
cacgctcattgtcatgaattgcgtcatcgtgctcaacgtgtcccagcggacgcccaccacccacgccatgtccccgcggctgcgccacgtaagcgcggagggggcggtgcagcccgggtcggggtggggcttcgtactaacctcgtcccctaagccccgcccctgccccaggttctcctggagctgctgccgcgcctcctgggctccccgccgccgcccgaggccccccgggccgcctcgcccccaaggcgggcgtcgtcggtgggcttattgctccgcgcggaggagctgatactgaaaaagccacggagcgagctcgtgtttgaggggcagaggcaccggcaggggacctggacgggtgagcacagtggccctggcccggggggccgcgcggggtgcctgccaggggggaggctcctaaggcccaccccggtgttttccccgccagctgccttctgccagagcctgggcgccgccgcccccgaggtccgctgctgtgtggatgccgtgaacttcgtggccgagagcacgagagatcaggaggccaccggcgaggtgggacaggagccagaggcgggtggagcgaggcagaggcccaccactgtctcccatgccgctggctcctgcagctgcctctttactgactgtgccgacccttccccaggaagtgtccgactgggtgcgcatggggaatgcccttgacaacatctgcttctgggccgctctggtgctcttcagcgtgggctccagcctcatcttcctcggggcctacttcaaccgagtgcctgatctcccctacgcgccgtgtatccagccttagctcgcaccgacttcaatttcccacccatctccagtaggaaattgattttgaaaaagtaggctgccgccaccacggcattatgatcccttccccctgctgatcaatctgcagtttgtgaacttcacaagaatggtgtgtgcccgttccctggcgtgtgtaggcctggccgcagtccaggggtcagcaggaggaaagggttcacataggctctcaggtgccagtcttccagaaagcaaggactgcccttcattcagccttgctgacctcccagcctttctaaggctcagccccacgggactctggtggctgccagcttgtgagctatctatctatattcatttcatagccaaacaggagacccctttgcaggacttgcacacagggaggctgtagccaggaaaccctcttcttccctggtctggctctgctggagcgggtgggaaccaaacaccttcagtgctggtggccctcaggcccacaggtttaaggctgaggctgccctgacccttccacagtcatttcttctaggttttcttggcccagcactgc

SEQ ID NO: 30170 - DNA, 1233 bp, Artificial sequence
  DNA replication origin
tgtctcgccccgccctgggctttattcggacgctgggtggggctggtacggggatggagtccctggtccgccgtcctcctcactgctgctggacgtcacctggaggtctcccgagtagctctcttgggggacagtccggctcagtgcctccctagccccgccgcctctggcccctaactcaccccgtgtcctgagctcaccggttctccggggattccgaggcctagctgctgttgcgactgtcgcaggaatgaggcagacccctgcagaccccgtccacacaggcatagccatgctccctggactaggagccgggcgctggcgcccaccgcagccccagcttgccgaaccccctgccctgcggcttgggctacccggctcagcgctgcacccggatccctgccgtctggggctgggcccgcgctgccgtctagtcgccgcgcctcctgctgcagccacagggctgagatctgcattgggggcacaggggttagcggggaggcagaggtccttgttcccgctacccgatcgccgcgtatcctaagccccccagtaccccacctctaacaaggtggtgccgaagctcacgaggctggctgtggcttctctcaacaccagccccagggtgggcttcggggcaggcagcatcccctgcatcttcggttcgggtggctccagggacttcagctctctgaacctctgctccagatattcatgggctgcggccacggagagttccagggaagacagaagcgggggctggagggccacctggagaaggagcagagcagtagagtagcagggcaggggtcacaggggcgaacaggagacctacccagaaggtctcgaggtgcagcccttggcgggcgtagcctcacctcggtggagctgtggaagtggtagatccacatcagggtgtccagggagctgggggtccccttcatggccgccacaagtggtaggacaggagaagggctgggggacgcgtctgtcgtcgtgtagggggcgcagctggagggcgtaaccagcccgtaccaggagaagccgtgtttgtgaggtcagcgcgcggcgccttcggtagctgggaggaggaacggtgatgtcatgccttccgggctcctcaggttccttattttcgtcatggtggtcgccacgctcattgtcatgaattgcgtcatcgtgctcaacgtgtcccagcggacgcccaccacccacgccatgtccccgcggctg

SEQ ID NO: 30171 - DNA, 767 bp, Artificial sequence
  DNA replication origin
cctagtccagggagcatggctatgcctgtgtggacggggtctgcaggggtctgcctcattcctgcgacagtcgcaacagcagctaggcctcggaatccccggagaaccggtgagctcaggacacggggtgagttaggggccagaggcggcggggctagggaggcactgagccggactgtcccccaagagagctactcgggagacctccaggtgacgtccagcagcagtgaggaggacggcggaccagggactccatccccgtaccagccccacccagcgtccgaataaagcccagggcggggcgagacagccagagcttttcccggggtctctgggttttggccacgcccccacccttcacactggccacacccccgcgggggctccggcttcacctgcccaggagcggcacgctcagagaagtctctgggattttctgggcaatgaggaacaagaagacggtctgggcgagcaggacgttgatggagaccgtgcatttctggccgccggctggagggagagccagtgagagcgggccccgcctcccgggagcgagcccgggtttgggggtaggttcggggccactgcttaccctgcgccggcaggaagtaggcgagcagcaccaggcccgagatgagcacacagggcacgatgatgttaatgacgtagaagagcggcttccggcggatgatgagcgagtagatgacgtcagtctcccctgggccgtcggtggcgccaccgtggtggcggcggatcacccccgggca

SEQ ID NO: 30172 - DNA, 890 bp, Artificial sequence
  DNA replication origin
gcgggggctccggcttcacctgcccaggagcggcacgctcagagaagtctctgggattttctgggcaatgaggaacaagaagacggtctgggcgagcaggacgttgatggagaccgtgcatttctggccgccggctggagggagagccagtgagagcgggccccgcctcccgggagcgagcccgggtttgggggtaggttcggggccactgcttaccctgcgccggcaggaagtaggcgagcagcaccaggcccgagatgagcacacagggcacgatgatgttaatgacgtagaagagcggcttccggcggatgatgagcgagtagatgacgtcagtctcccctgggccgtcggtggcgccaccgtggtggcggcggatcacccccgggcagaagtcgatggcccactcgccgttctctgcgggacgggggcacggtcagctggctgtcagagcggggcgcccgccgagctgacagcgggctgaagaggaggctgcggctgtctgcaccagggtcatgggccgtcaggatgggggcaattacggacagaaaagggcattctcgttgagggtatggaaagccagaaggcaggactagagtaacaatcgagaatgatttcaggacaggggtaagctaaacccagttgtggaagtcatcctccagtgtcgttggtccggggcaagcccaccgtggaagtcccctctctggaccccgtctagaagcgggtttttctgagcaggcaggggcttcaccagtataggcctctgtgtcgatgtcgatcttgttgatggtcttgccgtcgttgtctacggcaaaagtgaactccacctcttcggcattgtacgtctgagagctgcggagccagggccgggagcccaccccagaagctct

SEQ ID NO: 30173 - DNA, 1051 bp, Artificial sequence
  DNA replication origin
caccgtggaagtcccctctctggaccccgtctagaagcgggtttttctgagcaggcaggggcttcaccagtataggcctctgtgtcgatgtcgatcttgttgatggtcttgccgtcgttgtctacggcaaaagtgaactccacctcttcggcattgtacgtctgagagctgcggagccagggccgggagcccaccccagaagctctgacctgggccccggcctcaggcccagccctggaagctgggatctagcggggccgcgatcccaagcccaccccttcacccaagcccagcccgcacgcctctgttcccatctgtacctccggccgcgctggagcgtcccacccagtgcctacgcctggctccgcctccagcgcgaagccccgccccgagggcggtgcttcccggttggccccgccccataaggcccccccccaacaataatcgtccgggcctcggagtagctcttcccaccggaaaataagcgaacagttctgccaatcgaaggggaagtaggtgacctccactgcgcagacgctgcggtagatggccggaggcagccacgtcacggagccgccctcgtagacgagcacgttggcgtcgtaggccactccgaactggccatcaatactgtgggctcggggaaaccgagctttttgcacaggtctgcaccctctcagagtacccccttccccaaccaagtccagcccgcaccccaggccggcttccctccagcctggcgtctggcccggttctcacttgttttccagcacaatctctggcagccacacgagttctgaagggactcgcagggtttctatacccccaaagtcgtccttgctgtagttgagtcggtaatcctgccaatcctaaggggtgggggatggaaggccgcgtgccctgcatctcccacctggcgctgcctgggaggggtttgggggaaaaggggtgccctggacaagacctcacaccattccccagatttgactcacgattccaatccagacgctagtggtgagagtctcctctttttcattctgcagatgggaga

SEQ ID NO: 30174 - DNA, 956 bp, Artificial sequence
  DNA replication origin
ggcctgtggtttcacatgcccaacccagctcagcagcaggatgaggaccacagaggcaaagagcagccagaagagacccaagacatagaagcccagggggaggaggcagcaaaagtcggggtggagaaaagggtcatttctggagctctccaaatgcccttggagcaccccacggagctttggtggctgatcaagttcagggatggtttttttggtggattctaagagtgatacgggttttgtggtagttaaaaatgtgctttttggagtgatcaggcttgtggcagacaccaggatggtcgggcttgtggcgatggtcgggattggggtgggctccggggtggtcgggctgggggcgggctctgaggtgggctctggggtggtcgggctgggggcgggctctgaggtgggctccggggtggtcgggctgggggcgggctctgaggtgggctctggggtggtcgggcttggagtgggctccagggtggtcatgtttggggcgggctccgggacgggctctgaggtggtcgggcttggggttggttcagtagtggattttggagttttggagaatgtgatggattccatgtgaagtgtgaaatttggggtccatctaggtgggaatgtggtctgctccttagtggattcttgtgttggatgcaaggaggagggcatttggctgtctagagaagcagtggaccatgagtagaatagaccccagggggttgtatgggctttggtggggaacttgaccacagtccttgtggcacgcaccttatcgccctcagtgtcctcttctgggtagtaatcatataggtctgtgtcaccttcatcaccaagggtggggcacccctttcctgggtatttgtagacgggaaacttgtctgaattgtcacactgcacactggccacgttagaggtcatggccttgacgtccacaccttgcttccatacgt

SEQ ID NO: 30175 - DNA, 957 bp, Artificial sequence
  DNA replication origin
gctaaacagggaaaaagaaaataaaaccacccatatttgtaacatccagacacaacgagtgctcacatcctgataaatcactttccagattttcttctgtgcatagatgcatgtgggaaccatgctgtattctgccaaaatggttcaccgtgagatctggcagcgccccatgcagcatcgggagctttgtcttgtccccccgccaagtccatgtcattaccccttctgctttggctgggactgaaattgtgtgcctgtgttgtgaagacagggcttctgatacagaaaaaggaactaagacccctccctatcaccctgtgttccttacccctccaacccccaactagattccaataggagagcccacaggctcttctctcaaggtccccaaacctcccaccctcagaggctgtggccagagtacctaatgctcactgtgctcagcaggtcctgaccacgaccctgactcagagctgagggcctccttcctgccactagaggccccacacggccattaggccgtacccacaggaagaggctggagcggaaagtgggaagcgaacctcgaaggaagagcagccaggcccggggcactgtcacttgccgtcccctctgcagctccaggtgtgtggtttgtgtggctgtggtcagagcagcaccttggccagagtccagggcctgtggtttcacatgcccaacccagctcagcagcaggatgaggaccacagaggcaaagagcagccagaagagacccaagacatagaagcccagggggaggaggcagcaaaagtcggggtggagaaaagggtcatttctggagctctccaaatgcccttggagcaccccacggagctttggtggctgatcaagttcagggatggtttttttggtggattctaagagtgatacgggttttgtggtagttaaaaatgtgctttttggagtgatcaggcttgt

SEQ ID NO: 30176 - DNA, 1971 bp, Artificial sequence
  DNA replication origin
acgcttgtaggccttgttcatctgctccaagaagatgaaggtgaggacggtgtgggggcccaggcgggcatagtacggcgtgaagcccttccacaggctgaagaagccctcgtagcggacaactttgaacagcacgtcctagacacagacaggcagggcgctggggctaggactctaggtccccatccccctcacccagctgccttcacacctttcccaggggatccgacaccccctcccaggcccccagaatggcttcctcaccagcccgttcttgtattccggcttcccatcaatcatccgcatgttctggattctgcaggagaggacgcaggggcatgagagaccgaaagggcaccctcccacccacctccaggcccaggctgcacactcaccgggtcttggcaatgtccacaggcatggaggcagcagtggtgacaagaccgctgatcatgctggcacagaagtggcacaagatgttgtcagagaagtagcctgggggaggtgaggcgggggtggcagtcagctcagaggtggctcaggccaggctgggaactaagggcccagctctggatctcacctgagtccagtaagaactgcttggattgggagtaggaggcgagctgggcagcattgacgacgacggcccgagccatggtagggatgcagccctggagggaggggagcggggaagagtcagaaacccctaaaaccagacctcacagcccccaagtctccagcccctccactcacccgccacagtgtgaggacaccctcttcccgggtgattcgaatcagggcgttaaacacatttttgtagccacggcgctggtcagctggaagcctggtgggaaggcagaaagaggtcaagatcaggattgcccacaggtgcaaagaaaggaaggccagaacaggtaaacactctgctccagatccgggataaaaaactggtcctttcattctagattcgagggaatggggctggggttaggttcagacttggaactcaccggccatcggcagtcatgcggataagagccacttcggctggtgttcccacaaaggcaccagtggcacctgcggtcatgccaatcacagccttcagcagaaagccagggggagtaccatcagccccagtcaggcgctcaaacagcacggtatagatgccaaggcgggtagtggtgtaggtggcctgacgcagcaggccagccgacagcctgaggagcagaggggtcagcatatcaggccaaggtctagagctgccaacccacagtctaccctccatcctgaggccccaatacccagtgtaaatgcccctcaggccttctgccttcaggatactggtgagggcatggaagctggttttgtactctcgagtcttggccccttccccgctcaactgcatccggttcttcaccaggtccaggggctggacaaaaactgtagctcccatcctgggggaagacagaggtggagtgaagggccaggcattccagatctaccagtgcccactggagcctggcagcaagaggttacaaaggtcagggcctgccatgcgattcaagaatcaggatgctggtgagcatgtgtataagagtctatatgtacaccaagtgcaacgggtctgaaaagtctagttgtccagtaggggccatgcaatgaaagtgctccaagcagcttcatgacagtcaagcagtgacctggggctgcacgcagtccgacacagggaggggaggaaggggcatccaagatttaggactccaggtagtcctgcaggagccatttaatggcctggaaccccctgccgcccggccgagcttagcaatgcgctgggaaactcagctggcccggcgggggttgtgcaacgaccctgcatgcagtccataagggtcctgcaatggggccctagcagcccatcggggaactcgcaatacgctggagatcgcgctgaccccgtgccggcacagttca

SEQ ID NO: 30177 - DNA, 1053 bp, Artificial sequence
  DNA replication origin
ctagcagcccatcggggaactcgcaatacgctggagatcgcgctgaccccgtgccggcacagttcactgcaacagacccagagatgaaccgggcccggttccttttgcccttcccttcctcctcttttcccatccctggggcctgagcttacccggccaggcccccaaacaggaacttgacggacttaggggaggtacggggcttcccgtctatcccgccggccccggcactcgccgtcgccgccatcgccactcaatggccctcggctccgggtcccgtgcgcgcgcggccccgctcgcgcccaaggtgacaccgcgcgcgcaacagagcgagggcgcgcgcacgcccctccagctctcaggtccgacacccgctggaagccggcgcgggcgcaggcgcgcagcgcaaaggcggccgggagtaaggcggagctgaaggaggagcttgatggaagcgtgcgagaaggggcgtaactgatttggaaaccagaggaaaggcgctgttttcaccgaattagaatcgcgggaaaatagagaagagtttgtttgaaggtctcgcgagatcgagtgagtacggctcgccaagttggagcgctctcgcgatagacacagcaactattcagctgcgaggggacgggagaggtggtgagcactctcgcgagatttgaaggagcggcggaggccagagggaggagaggtttgtaaactaggaggctccgggtttccgggcacttttattaggtcgtcttctgggccaccagtgccccttccatctccacaggcagtccctccatcgctaacctttttttaaccggccttttaggaccggaagtccttcatctcaagcatccaatgctgaaagcggcctgattttctctaccggaagcccttttccagaggctgggaacacggcccacctagcaggaagtcccacctccttgagctccgccacccttcccgaagtttttctgtcacctgtgttaggctccgtcccctttccgcgttttatccccgtaccagaaaaggatacatttagtgcctcccacccagctc

SEQ ID NO: 30178 - DNA, 817 bp, Artificial sequence
  DNA replication origin
tcgcgccgcttccagggcaagcacccagtcagggcctctcgctgcgcgccctagaccgcgcccgcccccacccaagtccctccctcagggtccaaaccggagcagtgccccggaccgcgcaggcctcgcagtaccgtgatgttgacgaacgttttcccggggacggcggcccagacggagggcgagtccttgtagcccacgatggccgcgtcctgacaggtcccgtccgccatgaggttgtcgatgtaggcgttccacccggccatggcgctgctactggggctgctctcggcgctgctgctggggccgcggactgggctcgagctgcctcggctggcgggcggggggaggcggagagctcggggcacgcgctgccgtccggaccgcggctccgctcgctgtgcagcagccctcgcaccgccacttcctgctcctccccccccccgccccgctagatttttatttgcaaaggacggtaggggcggggcctactccccattccctccctcccccactcgccagcccagacaccgaactttgcaaatgcaattttaaaaatccctccccctattgcaaaatttgcagagttcgatggaaagcaatgcagaaggatggggggtggcgggagagaggtgaagggtagggtttgctccaatttgcactgaatataaaccagactttggtatcggggcagggagtgagccagaagaaggaaggaaggagaaagcaggaggaattagcaagctgcaaatttagcaaattaaggagagttcggggagcccagggttaaacgggatgactcctccttcccccacct

SEQ ID NO: 30179 - DNA, 731 bp, Artificial sequence
  DNA replication origin
gacaccgaactttgcaaatgcaattttaaaaatccctccccctattgcaaaatttgcagagttcgatggaaagcaatgcagaaggatggggggtggcgggagagaggtgaagggtagggtttgctccaatttgcactgaatataaaccagactttggtatcggggcagggagtgagccagaagaaggaaggaaggagaaagcaggaggaattagcaagctgcaaatttagcaaattaaggagagttcggggagcccagggttaaacgggatgactcctccttcccccacctccgccgaagggaaggaccggcgggcggcggcgcgtgtgcccgcgcctgcgcctgcgccggggccgggagtgcatggggcggtcggggccggagccggctgcacgggagcgcgcccggcccgacccgtgtggaccctgcgggaaaggaaggcgggctggggacgtgtctcccgcctggcggaaggggcgggggcgaagccgtgcgcgctgccgcctcaccacccttgattttacttattcaagtaataagaaagcaaagaagagtttggccaaatcctctagtcgctctcatagctgaaggcacccaccggggccacttctgtccccagcgtcttctcgggtcgtgcaggttgggttcaccagggcccattctcagtctagaggattgtcccttctctggatcggctctagcccagggcctcaccccacatcccagccccg

SEQ ID NO: 30180 - DNA, 2170 bp, Artificial sequence
  DNA replication origin
cctgggctaggggcaaggggtcaccgagcgcggcccgggcggaaagggggttggttttctctctcctcccgagcgcggcgcgcatccctggcgtccacgccgaatcccacagtccccgacgcccctcgagtccgtgttcctcgacagccgcgcggctgagtcactggcgggctcgggcggggccgcacccgggcacgtggcggcgctccccgcccgccatctcctgacccctggcccaccgcacccctaccccagggtggaaaaatcccgggaggagcggcctgagatgagggggcggggcgagaggggagactggacgggtggcggggcaggtggcctggggtgggggctgggaggccgcgcgggccggcggggcggggagcaggggtggggagagggcggcgggggtgagtcaccgggcgcgcgctgccccggcgccgacgggaagggcctccgagtcgggccgaggcgccgtgtgtcccccgccggtcggctggtatggctgcagaggagctcggggcagaccccgcactggccccagagccggcaaagtggagatctctaccgagggcagagacctacctccccgcagtgctacaagtggggcgccggaagagccccaggcgtgcagaagctcacaaaaggccacccgtcctcggtccattcatttttgttcactgttgattcagccccattcattgatgggctggggccgtgcgctgagcgcccacagtcgatggggaaaggggctctgaccgacagtccccacgccgggcgacaagtgctgtcccagcgttatcagtcgggcgccttgccagccgaaagggcctgtctaaattcgtttcctgtcccctaactcatcccggcgctggctggcctggagagggtaggatggggcggcgccgagaatggccgttatgaggaccctaagaggtgagaccctctcgccttctggggtggggggtcccgtcctttcccccactgaggacagaggcccgcccagcgatctgagcatgtgtggacgtcaatcttgcagcccctcttccaggccccctccccagccttgcagggctcaggttacccctggcctttcctaaaggtcactcattcctcttgacgtttgcaaaaggggaatgtaatcctggggtggggggagacccctcatctgtagcccctcccttgctcctcccaaagggtggaattagaacagggactgttattgggagacagaaagtgggggatagtagttgacctttggtaagggggcaggtgcccagggccagaggcttctgcttcaggctgtagtgggcacttggctgccagcccagtgtgaaggggggaggatggagagaaagagaggcggggctggctggggaccgagtggctcagggataaatgcgcagcctgagagggggtgagctgacactgtcccagctgccacctagactcggagctccatccaaacctccagcgaagacatcccaggtcgggtgaatcttccagccctgggggtggaggtagtaaagggtgagcatggtattggcttggaggaagtgggggacatttctgctttttttcctcctgggactggagatgcttgaaaaagctgggggaaggggcggctggagcaagcagatgggacaaactctgggaacaccgaaggatctagggaaaggaggctgtgaggagggcagcagggatggatagaaaagggcagctagagctggaacctgatagggaattgggggcccaaggagatttcggagcaggaaaatgagaaccagaaaggatttgaaggccaccagccatggagaacagactgcttgaccagaggggtggaaggagaaggcctaagtggaggcttgggggaggtgggggcttggtgagcggtggcatcccaggagctatagataagaggcccctggattcttaggatgggagggtggaataagagctgttctgagtgggggagggggctgcgcctgcctctttggtctgtgacctttttgtagggtatttttagctccagcacctgccttcttggagtggggaagaatcttaaagggcaagggatttctggttccttaagagatcaactgtctacactcactcacacctcctgtcctgcagccatggccatgcagaaaatctttgcccgggaaatcttgga

SEQ ID NO: 30181 - DNA, 709 bp, Artificial sequence
  DNA replication origin
actaagttctttgggaagtaggagaggaaaagacttatcttgatttcgggctcttgagatgctgctgagaacagcggaatctgagagaggaatggtgtgggctgggggtggggggtcatgacagagccacaggggcaaagctcttggagtcaggccaaggattagtcaaacaaagtcttgagatcaaggtgtgggtaagtcaggtgccaggggaaaggtaagcttggagttggtgggtaagactgtagctggagtgggcagagctggggcagaggcaggctatggtgagcctcagggtcaggaggcactcacgcctggatcgattcggtcaccgagccgatctggttgaccttcagcagcagacagttgcaggccttcttctcaacggcctgggcaatcctcttggggttggtgactgtcaagtcatcccccacaatctggatgttcacccccgagaggaaggaggtccaagtggcccagtcatcctggtcaaaggggtcttcgatggagaccactggtggggtttggagcagagacagggcagagacagagcagagacagggcagagacagggcagagacagagcagagacagggcagagacagggcagagacagggcagagacagagcagagacagggcagagacaaggcagagacagggcagagacacggctagaggtcagaaggagcctcatggaggggtgacag

SEQ ID NO: 30182 - DNA, 1040 bp, Artificial sequence
  DNA replication origin
agctcaggatggagcccagtaggtccgccatcttgggagtgactgagagggggcggtgcgtcttaaagggaagggcggaatgcctttaaggccggaaacacgtcggaggcggaaaaccctgggcccgcctggcctgggcgcagatcccaggcccgcggtgcatggcggcctccagctggcctaggccccgccccgcccccgcagacagaggccggaggctggctggtgcagcgatgtttaatggcaattcgtataaaccaagcccatgcacaagtagaaagtgcccgtggagccggcaggaggcccccgccgcgctagagaaccacaagcccggccgtgcagccctccccgcggcgccttaaatagattcttcactatactctgtatgttacagtatgtacaagacccctcccctcgggggacggggcggactccgcaacgcgttcctatgtacaccacctccccttcggccctgaggtcagtggccagagtcgggtgatggggtaagacagggccagagagggaggaaacagacgcaaacatgcggagtcgggtggggacacggtcagccctgaaacacgaggggcgtgcgcagcgaaggcagtggtgggaaccgaggcggatacattcagagacgcgtcgaacaaataaataaggcaagtcaggagggggccgagtcgggtgcaggcaggaggagctggggagcaggggcaggcagggctccggaggtcacagcggaagatgcaggtatgtggggcgcgggttttctggagccaggaccaaaagagacggggcacgaccaggagggacgaggagaggggtgtgggagcaaggcgtggggaggagggaggaggcctacagagggctccaacaaaggtgaacaggaaagctgccgacaggggctccccctgccccagaaagccctctccctgttaagactgcacgaggcgcccccagggtggtgagaaaggcggtggccaggtcatgtggccagtcccggctggggaagcccttccagctcctggttctgcttcagttcc

SEQ ID NO: 30183 - DNA, 1051 bp, Artificial sequence
  DNA replication origin
tcccggctggggaagcccttccagctcctggttctgcttcagttccctcatcctgcagagagaaagataggagtcagaggagactggcggatcacgacgggtggcaacgcaaaagcccagggggagaagggatgagtacctgtgtcggcagcgccgcaggaatctcatgatcttccgggctgcctggtcctgcttcttggtgagaaaggagcctctggtgaaagaaacaaaagatggacctcacagaaggcatcgcatgccttcggcccccccaggaaccctaggcagggaatggcagtgaggcatgatgatcaagaggatgagtaagggggaatggcgtggatgcagtgggtgggcacagagggctggggctgggccctacttgttgcgggcaggcagggtggccgaagtccggtggggagggccgggcctgcggcggtaggagcggtagtgctgctggatgagcacagccgctcggcggctctgctgaaatcgcttctgttcatagtagcttcggaacttgctctggatcaggatggccgcctgggtcatcttcttatagagtgcaaactgcaggggtggggaggagggacaggggctgaaatagagggacggagacccaaagccctgaggctcacccaagttaggctgatgcaagactctctgtaacccacacactcaaggaaagactgaatcatcacagacctcacactcagagctcatgcctaataccttaagtgcaatccaggtcagcttgtggagagagaaggggagttagggctctggcaacattctggaatggttaggcgtgggtgtgggttggtgggttgctggttacacttttgagggagaagggtctcacctgcttgtacttccggtaacagcgctggattacagctgctgctacctcctgctgctccttcagccgccggccctgaagggagagaagtctcaccacctcatgacccacataatggcatatctgacttgtcccttcaactttcctggggttcccctgaccctttaccccatccaaggcctgtctgcacga

SEQ ID NO: 30184 - DNA, 855 bp, Artificial sequence
  DNA replication origin
taaggactgagtcctggtgggctttatttaggtgaaggggtaaaggagctgttgttttggggaagataaaagaatatggttctgtgtcctcatccccagatcttgggacaggtctacttttggtgttcagggcatcacctagactgcccactcagcctcccatacccgttccccctcagacaaccagttccggatgtccatactagagcgactggagcagatggagaagcggatggcagagatcgcagcagctgggcaggtgccttgccagggtcctgatgctcctccagttcaggtacttctgtgaggagggaggtggtctacggtggggagcagggggaggacacagctaaagaaaacatctagtgcccatgactctcctccctctcctgtccccagcctcctcagcctgtcttccctctccctgacgtcaccctgttcccatccccaccttgtggcaagagtggctattctgggcaccctcttggcatgacgggcttcagactatttctggtctgaagaagggtggaggtgaaggagagggcgggggaggggtcaggagcactggggctcagatctctgtgggtcccaagtttctgaaagaagagggctaaggctcagagaaggctctggcttctgagggggagaagccatgtgtgaacatggcactaatctgagctgatgggaaggcacatgggcaagattgtgtgaggtctggctgctggaggaagtggctgtgggagcaagagacacaggccacagaggaacttcaactgatgggatcctagagtgggacatgtggggagggggcaaaattagaagctgggaggacagatgtgaggtggccaaggccac

SEQ ID NO: 30185 - DNA, 664 bp, Artificial sequence
  DNA replication origin
tcccacctgctactgactgtggtgggggaccccgagcagctgcctggggctccagggcagcagcaggctctagggcagaacagggggtatgagcggcctctgcctcggggaagtctgggcttactccctgcccccctccatatgtctggcccctctgggggctgttgagaaaacgatcagggtcaaaggcaggactgggaggagctggtggggcagaaggctcagtgcctacaaccactgccaaactcatggaaggcctaggatcagcctgtggagccaagtgcctggtgggcgtcaagcctccagcccgctgctccagtcctgtcaggaggaggatagcagtgcctcctcttgaagaaccccctcgagaagtgggagggctaggtctgatttctaggggctctgcaaaacctgatgaggaggaagaagaggaagaagatggggaggtgtgtgccttggggagctctgggggaagtggggctatcagtggaggaggctctggggggtgagcgtgggggatagaggtcagggttaaagctcggggctccactttgggagagatgatgcggtgtttcgtgctgctgcatttgtgggtaaggctcccagaacctggagtggagaggagtaggagggagaggagataagacacatcattccgcacctt

SEQ ID NO: 30186 - DNA, 1501 bp, Artificial sequence
  DNA replication origin
cagcctccgcctccctggctcaagtaattctcccgcctcagcctctcgagtagctgggattacaggcgtacatcaccacgcctggctgctttttgtatttttagtagagacggggttccaccatgtttgccaggctggtcttgaactcctgacctcagatgatccacccgcctcagcctcccaaagtgctgggattacaggcatgagccaccatgcccggccaagatccatgtttttatacctctcctaggatccccaaagagcttagaatggtgctctgcacttaggagtgttgacagacacggaaagaccccccactcaccctcctccagcctactaggtcttgctgggccccaacccccagcctccctagaaaacctcatttgtattccaccgtagcctctctggaggcagcagcgggcagcgaggaagacactccagcagcttcttggggagaaagatcttcaggtggtggctgttttctaaagggaattagaagggagggtttagtgtgctaccctggggcatccctgtgatagtccaaggggaaagggctgaaggcaatacagagcactggggaaaactgaaacctcactaaggagaacagaaaatccaagaattagagggccactaaagcgtggggagaacgaaaggctgtggccacattgggaacctggtttgtgaacttaccagcaacctcggtggtgtccttggtattcatggtgagggctccagggggcaaggtcacccccggcctgaggggccggggggagggggagtctgtgctgggaagggagagaacaaggtcatggcagaagcccccacattaatccaggatgagaagtatgaggtagggagtgggtatagaactgggtcatagtatctgggaaggatgaggaaagggagggaggggctgactgtgatgtgacagtagaagagagaacaacacacagtgcccggagccaatatgagtgagcagactggacaggaagagtgagcaggaagaaatgggttggggtgggggagcggggagaagactggcagggcttgggcctcagaggccctaaaccttgagcttttgcacagactggggctatggttgggtcaggtcctgggggttgggactcaggccatccggtccttggaggatggtttggcaagagagcctggatcctgggggcagggcaggagattctacctccggtagaagctaggcctttagaagacacgccctgagttccttctctgtttgatttttccaaggggaagggcagatctgataactgaacctaacctattctctcctccaggttggttaggacctgatagaatctgggccagacacccagattcccaccctcaggacaacccaccctccggctgacagccctctctacgtagctccctctccccaaacgcctctgcctcccctggcctccaggcctagcctaccccatctaccgctctggctccagcctgagccccccgccctcctcgggga

SEQ ID NO: 30187 - DNA, 1259 bp, Artificial sequence
  DNA replication origin
actctgggcggccccccggcggagtggtggtcccaggagaacctccgaggtgggagggtcccgcccgcatagagggatgttctggagaagccgggagcagagtccgcgggcacgcggtgggcgagggacagtgcaggtgccgggtgcgggggtctccgggacagtccccggcacgcgctggtccgccgtggggccctgcggtgagcggcgccccctggcgcgggggaggaggacggaagcgggaggtgagggcgaaccgggaagagggacggtggtccctggcgcggcgctccgcgtcgggacctggaggagctgcgccctctggcgcgggggcggagaggcgggcgagaggccctggctcttacctcccggggtcccgcgggtgacggcggcagcggccattctaccccacaccgaccccccccagcgccggctgacagcggcgtctaacgtcactgcgcacggggcggggcctcccaattaaggggatgagggtcaggaagggaacctggggtcagcacacgtggagttctgggtggggcgctgggcagagggactcggcttctagggctctgagccaggccgagggacagactgctgggaagtccccaaaagggcagcagcactgaggggcaggattccagggtcctggaggcggaagctcggccgactgactcccagttcgagagaacggggcgggggcagcccaccagtgctggaacccgaggggccgggcgaggaacgctggactgggagcaggacccttctcgcctcggacaagactccttgtctggggacccagcccgacttcattgtagctgggtcctcgagaaagcgaaaggagccctccttccccattggcctctccatcgctgcatcccaagaagaaagacaactcgggctccacttgcttgctttttaataacagagcagagagaatacaaggccaggagcggggcctggaggaaaacaggacttggggtgctcctgtgagagcggtgggttgagatgggagcccacgggggctgttaatgcctagttcagaggatgggaaaggcagttggagagacgaaggaaggggaaacgccttcatgtcagcaatgagggtgactctagtgacggaactagtcttgggtccctggggcaccactagcctctcggcatcggtggtttctccttactcttcagacgctgccaactccatcccccagggattgtgaagggggttccttctggctgtgacagtgctgaacgaggcc

SEQ ID NO: 30188 - DNA, 887 bp, Artificial sequence
  DNA replication origin
gcgaaaccccctctttaccaaaatacgaaaaagtttagccaggtgtggtggtgtgcgcttgtacccggaaggctgaggtgggagtgtcatctgagcccgggaggtcaaggctgcagtgaggtaagatcgcaccactgcactgcactccagcctaggcgtcagagtgagaccctgtttctaagaagaaaaaaaaaaaagccaggcgcggtggctcaagactgtaatcccagcactttgggaggctgaggtgggcggatcacttgaggtcaggagttcgagaccagcctggccaacacagcgaaacccagtctctactaaaaatacaaaaattagccgggtgtggtggcaggcatctgtaatcccagctattcgggaggctgaggcaggagaatcgcttgaacccaggaggcggaggttgccgtgagccgaggtcagcctgggcaacagagcaagactccgtctcaaaaaaaaaaaaaaaaaaaaaaaaagaatactagataagttaggagagagtgcacataggctcccgaaggacagaagcagccagctggaactgtagaggtgaactagtatttatccaagggaactagggatgggctgggaaagcaggtgaggtcaaaagcggagagaagtataccgtgcggaagcggcagatggggctagttggagttgggctgaaagggcctaaagtggggtctaaaggggatgtcctgactcggaggggggtcagcagaacgcgagggagcagcgggagctgcggggcattcgggcctcagatagttgggtccaagcgggtgacctagatccaagggcaggatggagctgaaggaagccaggaaggatcctccacagttgacttcggggtagccacggcctgcgcctgcgag

SEQ ID NO: 30189 - DNA, 1083 bp, Artificial sequence
  DNA replication origin
gagacacagcacagcaaacacacggtgttaaagagacagggtggggaactccggcgccaaagcacaaactgggagcccagaagagagaccagagaggaaactgcaaatgcaaaacctgtcctcaaattcccccacagtgtcggcaagggagaatctagtttccacctgaggcccacaacctccatgcaccaggccagtagtgcagatgggcaaagtccaaggactgtaggtagggcccaggactgggatccacagggccagctgtgtgggctctaagccccttgcccagcccccagcacttcctcctcaggatccgggacaatgagcaggggagggtggggtcatcctgtagccatcagaccaaccctcagggctccacccttggggcgcccagaaatacctgtgtttgagggtagagggtccctggggcctccctaaaagggagaaagaaaaggaagccggctggctggtgccagccccaacctggggctagtgctatggcgtccactgccctggggaaggtgccaggctggagcccaggaatgtgggtgatcgggtgcccacaccctgggaggagaggctgagcagcccacgcccacggacaacagggaggaggaccacgaaggataagggatgcggagccccctcctgtggccccagtggaccccaaactcctgtcacgctgggcctcccctcaccagtcttcctgggcagagcatgggagggtgaggggctggtctgtcccaggacaggaagggagtagctggaatcacagaagctggctcaggaagaacagccctgaccccctagaccctgaccaggggagggaaggacactggtggggacaagcgatggtgacgccgttgctgcagctaatgggacagggatggggtggcacggctgggggccagcggggtaagggaatagaggtagggacaggggtcggccggtgcagctgtgaaggagccgtggggtacaaggaggatactgggcggctggggtggggccgaccggcccgaaagggggtcttgggccacctgcaccttgcccacccggcggttctcacacaggtccccgcccggc

SEQ ID NO: 30190 - DNA, 1046 bp, Artificial sequence
  DNA replication origin
gacattgcctcccagcttcttcccggaaccagtctcttcacatctcccccagagccacccagcctctcaaggacccagctcttattcccttggctttcctcccaaatgtcactgtcttgagagactcccaaaggtatttctgcctctctccccagccatattccagcttgcaggaacctgggcggtctcccccagttacctggcgtcctggccccagaccaggggggctgtatcagttctggctgccaccggccctcgtagggggagccccatcctactcctggggcctggccacaccagctggggctctgggagataccctgattgcgggggaagagttgttagaaggcacctgtggttccagagacccgtctggggttcccaggttggagggccaaggttacggggggaatagcaggaaaagtacggacagctgcccctctagagtggctgaatgcaatgtgaatccaagggcagggacggtgatatttttattccttgtcactcgcaaatgtactgaacgttcagatagaggacagagagagaaagaggctggacagagggcaattcagagagaggggcacatgggcagagacgtgaggggggtgggaagagagagaggaggggcagagagtcacagacaccaagaaaattagagaaataagacaaaaggcaagcctgaggtcatgctatgaaggaaagaatgggagaggaaaggaggaagagacacagcacagcaaacacacggtgttaaagagacagggtggggaactccggcgccaaagcacaaactgggagcccagaagagagaccagagaggaaactgcaaatgcaaaacctgtcctcaaattcccccacagtgtcggcaagggagaatctagtttccacctgaggcccacaacctccatgcaccaggccagtagtgcagatgggcaaagtccaaggactgtaggtagggcccaggactgggatccacagggccagctgtgtgggctctaagccccttgcccagcccccagcacttcctcctcaggatccgggacaat

SEQ ID NO: 30191 - DNA, 1062 bp, Artificial sequence
  DNA replication origin
tgaagagactggttccgggaagaagctgggaggcaatgtctgggtccctgcagtggttctgaccccaccactcctttctctgtcctccagctgaggagggcaggagtgtctggagctatggctggtgcctcggtgaaagtggcagtgagggttcggccctttaacgcccgtgagaccagccaggatgccaagtgtgtggtcagcatgcagggcaacaccacctgtgagtgagtccccggggcctggctgggcacaggcagggaaggccgggcccaccacacaggccagtcccgctgggccaaactaagaggagggtaatgctgggcacagagcaggtgctagtcgtaagggcgggggctggggcaggctggcctttcccgtgttcccagtccctgggagggggaatgttggcctggagccctccattgcccaatccagggaggcagctcagtgggggcgggtcctaggaagccaaaattagctttggtggctggagggggtggggaatgttaaaggggagagaagagtcaggacagtggtgaggagtgggatgcttggattccaggggctggttggggtatgggcagggactgggaatacctgaccttgactttccttcctttaccctctcctgcccctcagccatcatcaatcctaaacagagcaaggatgcccccaaaagcttcacctttgactactcctactggtcacacacttcggtgggttgttgggctgggggaagagcaaggcagtgagagacagaggatttaggtcctggggaggggacatgttaagaaataggacccccaggggattagtcagggtgaattgggaggatgatcctgggtgggggtggtaggacccttaggctgtgattgaggcctcgacaggaaggcggaatcccttggggtaattaggactagcaggggctggataggatccttggggtggtaaggacaatgatgagggtgggagggcacacaggacatttggggaatcgtcagtgatggaagcaagactcttgggacagagacacaaaggataaagacatccagggttact

SEQ ID NO: 30192 - DNA, 1072 bp, Artificial sequence
  DNA replication origin
ctccttgtcctcaaaggctggctcccatgttacccttccattaagtcctcctgatccccttgaaatcccatagttcttcactttgttcctctttgcatgtgagtccctcccagaacacagtggcactcaaccccctgggaacaaatgaatgaataaacgaacttaaacaagggcatgagacaatcagaaactcctccatgaggcatccgtttcccacttgtaatggtgtttccacgccaagcctcacctcccctagctgactctcatttcctgactgactggacagcagtgcctgggcttgactcatctctgtaccccgcctagcgcttcaccagggtgaggtagaaaggccacagtcagtccttctgcagcagaggcaggggtcttgtgttctgatggaaggcttaggaaaacttcccggaggaagttgcatttcagacagactgggaggaacgtgaaggaagtgaatgattttggcaggtgggggcggggcgggaggcggtctgttgttggggacattggcagtcagggatgcaggaggcctactttggagggagtgctcaggggtccgctgagtggaagtacagagtctgggagagagcctgggaggggggcttggacagatggactggagccgggacatggaggaggcccagggatgccaggggaaaaagtaggctcaagtccagcgggcctggggttccagctggagaggtctcagcagagaggcaaagacatggccatagcgaggtgtgggcaggaagctgggagacctaaggggtggcaggaaggcaggtgggcctggtgcagggtggtgccgagggatggagaggtgtgtggcacggcagcagctggcaggaagggagacttccccaggcgtggcagcagtggcatgaatgggggtacagaggcagcgtcgcctgtacgccatccagagtactgcccagcaagggcagggctgttataatggaaacaagtcaggagaaggtgctgtgggagaagggaatgggccgggttttcagcacagagcagcgtaacaatcactcaggtgttcaggatggacttggctggg

SEQ ID NO: 30193 - DNA, 984 bp, Artificial sequence
  DNA replication origin
gaggaggcccagggatgccaggggaaaaagtaggctcaagtccagcgggcctggggttccagctggagaggtctcagcagagaggcaaagacatggccatagcgaggtgtgggcaggaagctgggagacctaaggggtggcaggaaggcaggtgggcctggtgcagggtggtgccgagggatggagaggtgtgtggcacggcagcagctggcaggaagggagacttccccaggcgtggcagcagtggcatgaatgggggtacagaggcagcgtcgcctgtacgccatccagagtactgcccagcaagggcagggctgttataatggaaacaagtcaggagaaggtgctgtgggagaagggaatgggccgggttttcagcacagagcagcgtaacaatcactcaggtgttcaggatggacttggctgggggccttaggcagggacagccccaggcgggtgctgcagggacccaggcttgaggtgaagcagcccagggaggggtagtcactggggaagagtcaatgagtctgcttcgagaaacatgtttgttccatttgcttttaagttgaagtgacactttttatttttaaattgtgaaagtaattcatgtgtgtaggaaattcaaggttgatgaaaggtggggagtaccagtctgctcactcagtctcccccaactctccagaagctgcaaggtacattttgaggaaagaaatgatgggacctgagacagaggaatatagggaagaagagaatgcagggggtccggggcttctggtgagggagcctggtgggtcgaggtgcttctgaagagacaggccttgggaagggttgctgacctggatgcagctggatgggtggggcaatttttgtcggccccttgtgtgaggagagggtggatcaggctgtcctgaaggcggttggtgtgagaggtgggaaccaaagaacgtcatcggggtggagggatgacgatgggaggagtacaga

SEQ ID NO: 30194 - DNA, 956 bp, Artificial sequence
  DNA replication origin
gggcacctgtaatcccggctacttgggaggttgagggaggagaatcgcttgaacccaggaggtggaggttgcagtgagccgagactgcaccattgcactccagcctgggcaatagagcgagactccgtctcaagcaagcaagcaagcaaacaaacaaaataaaaaacgaggtcaagtttcaaaagatgtcacccccaacctggcaaaacttctcctcaagccctgtcgttccactcttgtccgccaggaggagaaaaggttccctcgaaggacgtctttgcttgcgcgttcacggagccttgagaacgagtggccgaggggacccctgcggccctgcgcgcctgtgagtctcccgggcgggcgggcggtgggggtgcgaggccggggggtgggtgcgaggcgtgggggaggtgcgaggcgggcggggcggggggcgcgaggcgggagggcgcacgcgcagaaggctggctggggtgacgcggcgccgggcttgggcttctgtattccgcgtgtctggaggaaggtccggaggtgggcgggagccctgcggggatttcctcttcccccaggactagctgtcatcttcgtttttcagaagggaggacctgactcctttcagaattagcatttcttccccttcgtgggtgctcttgagttccaaagaaaaggaagagaagccttcattgagcagcttcttctgccttagggactgtgctagggggtagatcgaccttaggggaaacaatccccgcttattagaggaggttttggatcagggtttgctttatttgaaatttaacaaatacagaaaagcagaaggaagaaaattgaagtaatccatgtttccactgggcgcggcggctcacgcctataatcccagcactttgggaggccaaggcgggcggatcacgaggtcaggagttcgagaccagcctgaccaacatggtgaaaccccc

SEQ ID NO: 30195 - DNA, 1418 bp, Artificial sequence
  DNA replication origin
cacatatgagaacacacacagacacagcacccacgacagcacctgcaagggaggacacagcagcaggctgagcatgacatgcacttgctccaggggacaccctcctccccacttcatgtctccacttgctcaccacaaggaccacccctgcagtggtgcccaccaggggtgggcaggggctcaggattgccagtgccatcaggtaggccccaaagagcatgcccagcagagaaagaccaaccagccctgccagggacctgttggggatgagcagagactcagggctggctgttctgggacctggaccccaaccttaagttccacccaccaagcctggggacccttttgcacctgcacagcacgcccatggccaggaagcaggcaagggggttggcggcactgcccagcaccacagccaggtggtaggccaggcgcccatagggcaaacaggaaaagctctgcacagaaggcagcacgccattggtcacggcactggtgaaggccatcaggcccagcaggaaggcaccatgggctgagaacagctgatgggcctcagggtctgggccagggatggtgcctgctgcctggctcggtggctcctgcaatggcaaagcctcttcttcctccttctcttcctcctctgctcctggggatcccagttgaagttcaggccctgagccccctgtggttacagagggtagtgatggcaacagcaacaggagaccccggaaggcggcagctgaagtgaccagaagggcagtcagtgcccagaagaaggtgctggcaggaaaacgctcagggaagtcgaggggaggcccagaggtgccattggtgggcgctggtgggcactcgaggcggcccacaccttgcactagggccagcacacaggggagtagggcactgagaccctgacccaggaagaaagaccgtaagaaaggaggtggcaggtggctcaggaagggcaggaaagtgacattagaggtacaacaggccattgccaacaccaaggccagagttaggaaggccacagagtggagctgccctgccactggggccacgtggtgccacagaggggccagcagggctgtgcccactacactcagcacctgtaccacctggatggggacctgctcgcccttgcccggggccagctgcctccacagggtcaccaccagcagacccaggtttcccagcgccacaaccacagagaggtatgaggggaggctccaacctgcagggaaggaatgatgccatgtcaggagcacagtggctaagggacaaagagctgccacaggccacctttctgggcatacctgccccacgcttccctgtacctccctcccactcaccctctggaaggtcttttaccaccacaggcagctccacccagatcccgttcacagcagcccaggagccca

SEQ ID NO: 30196 - DNA, 1177 bp, Artificial sequence
  DNA replication origin
cccttctaagggtggtcactcctttccctatttcataggattatggtgaggcaaacacagaagcccgccgtcatccttgcgggaaggcaggtgaccaggcttggtaaatcacacggtcctttcccccttgattggtccatggttgagcaccagacccaaacagggctaatcatagtcctttgtaactgatatttgggaaggatagtgtactctgaggcaacattatatagaatgaaagtcttcaatgtggtgatcttggaactgacacctaaaaacaaactggctggctggacgcggtagctcacgcctgtaatcccagcactttgggaggccaaggtgggcctaaggtctgacctaaggtcagaagttcgagaccagcctgaccaacatggtgaaaccccgtctctactaaaaatacaaaaattagccgggcgtggtggctggcacttgtaatcccagctactctggaggctgaggctggagaatcgcttgaacccgggaggtggaggttgcagtgagcagagatcgtgccattgcactccagccttggcgacaagagcgaaactccgcctcaaaaaacaaacaaaaacaagctggaggccgggcgcggtggctcatgtctgtaatcccagcactttgggaggccgaggcggccggatcacctgaggtcgggagttcgagaccagcctgaccaaaatggagaaaacccgtctctacctaaaatacaaaattagccgggcgtggtggcacatgcttgtaatcccagttactcggggaggctgaagtaggagaatcgcttgaatccgggaggcggaggttgcggtgagcggagatggcgccatcgcactccagcctggacaacaagagcgaaactccatctcaaaaaacaaacaaacaagaaaacaagctggctgtgcaaaattacagaggaagtaacaaggaaaggttctgaggtgagaatgggccaagcttgctcagggaacccaggaaggctagctgcagaatgctgtttccgtggcctcggcagcttaacctaggcctttactcttaaccttggtaattcccacgcaatcttgagatttcaggccaaacgtcactcctgcaagcccttccggaactcaaagcatgtctcccttcgctcccgccgaggagagacctgttcccaggatctgcagcc

SEQ ID NO: 30197 - DNA, 1154 bp, Artificial sequence
  DNA replication origin
tgcgggttgggagagttaaaagggtcgcgcaaacggtccccgcgggaatgcgaagcggattctcgagttcttgagcctagagcaatgcttggggagcgacacgagggcgcagagcggcagatcgcggagcggaagttcatccccggagccgttctaggaaacccggaggactcaggtcgtcaatgattccggggctgaagtgggcatcgacgggtgcactttgctgttccagggagccggctcggcaggcggcggcgacgtggaacttgggctagggctagaaccggcgaaaagcaagccggaaaaggcaagggggcgtcggtgcgctgaccacctgttcctccagcggagtgcgacgcgcgccgattggctggagtgccgcccgggtaccggaagtggccgatgcccgtcgccagtgacaccgggacaacagctgcgggctctgtgcgagcggcccagcagcgcggagcctcagcggagtgagcgagcgcggggcagtagcggcctgcggtgagacctcattccgtcgcggctgtgggggtaggcgggggctgggctcccagctccctagagagccgagcggaaaccctacgtttaggcccgttctgaccggggttcgctgtgtgaccttgaagtttatgcctccctccattccccccgcccccaggccttcatttccacctgcacacagagagggtggggcctggacaccgccagggacagtcccagctctggtttggtgcctgtcagccgtgggggtgggagaagcagggacactcccttctgtaccgaggtggggacccgtgggagctgtggttttctcagacattccacccccaagtaaaccgctaggacgaaatggcgggcagtgtcacaaacttaacgccctagtggcagattgtgccctgtgctgccagacaagatattggcttatgaggggtggtcgtgaaaaggagacaggtttgagctgcaaagatagagccctattgtgggtcagagggagaagagaggaaaggaggttaacagtgccataaattaaatatcacccagattgggaaaaggaacttatttttacaaacagttatcgacaccagctatgtgtcagacactatcctaggctctttagatataatgatgaatgaaatatccagtta

SEQ ID NO: 30198 - DNA, 900 bp, Artificial sequence
  DNA replication origin
gaagcccatttcaggagccccggtacccgagctcgggcccctttccaatcccccaggcgtccttcccatgtccttgtctcctagtcctgggaatccacggccactccactctcctgcagtaccgcggacaagaacaccatgtactcttcacaggcaggtgtcttctggtggacccaactctgttggtacttgtcgtctccaaaaagtccccaaatgcgctagaggccagccagcccggtatccgagaggtaagagccccggcggcgcaggcggaagcgtgtctgtcgcgaggcctctctaggactccgggaggacccctcgttagcgcaggacctcggcagccgggggttgggctcgagggctgagggcggcgcgccatgcgcggattagctgccatccggcgggtctttctgccggggaccagtggggtcggacgctgagggccgaggaaccccgcccccccaccgcaccgggcgggctctggggcgtccgcggaggctcccgcgtgcgtgtgcggggtggggtcggggtggcagttgggggcaaatcaatgggcctgtacttttgtctctccgcctgctgggatttgcagtttgtgaggacgtttcacatctcacggatatttacggagtcccttccacggcccaggctcttctggacaccaaaccaggcctaatataactatttaatatctaattattacaattaaacttatttgcagtcgggaagcatagactcaaaacacgaaaggcagggttggctttagaaagaagtcactgtcgtctaagactgtcagaggggctaagaagataggtatggagggccgggcgccgtggctcacgcctgtaatcccagcactttgggaggcctaggcgggtggatcacttgaggtcaggagtt

SEQ ID NO: 30199 - DNA, 1339 bp, Artificial sequence
  DNA replication origin
gacacagcccgggcgcaccccgcgccgcctttggccactgaggcggtcctcgaggcgccgggctagggaaagcctccccggccgtcaaggctgggatagcgccgggggatcggggcggggtgcgtgcgccgaaagggcctcaaagctgtagggctggacggcacaaaggggcgcaaggcacggaggccaggcagaggggacagctagcggcgcggcgggacgggcgggccccgacgcccagctccaaatgcgtggccgctgtgggagctcgtctccaggcgcccatcagtcttcccctcactcgacgctaccttggcggccgcgcccatgctgtccccgctccaactagcagtcaggaggggccgcgggcagcgctcgagacgctcattgagaggacttcccgcctgcgggctctctgctcgacgccactcccggccccgctccgggcggcccccctcaccactcccggccccgctcccggcggcccgcctcaccactcccggcttcccggggcttaggcccgcaccatcgagtcgaaccgagtcctcatgttttcctagacaagccgctgggggagaggggaaacacttctggcccatgtgagccgccgtctcgtgtggtgtctgaggggcgtctacctggagtcactgagccgacgaaagggaaaaggccagtgcctgtccgggaagagctcagcctagtggggcgggcgacaagttacagttgctgccttacgatggccgtggcccgtggaggcactagaccctcaccaggggtctgtcaggaaaggcgggcagatacgtgaggcctgaacaggaaggaactgggagacccaagactgtaccgccaagaccgctttcgagtcgggccgaccggaatttgaattcgtttcttcacttactagttgtgagtctttgggcaaatttgcctttctagagcgtagtttcttatgtataaaacagggttaacagttgcactcactgaggtaaatacaagagaaaattgatggtaagtgcttatcacggtacccaacacatagcaagtactgaaaagtgatggagctaggtacggagggagcaatcttcacagagggaacagctcgtggaaaggccacagggcaagagggcggtgcctacattcttggggaactgcagagagttcatgggtaaataataggaaggaaaggtaagtactttgcagaaagccttccccagctaggtgagactccccactgtagtatcatatgcctctcctttttggcacttatggttgcaactttattaatgattctaattagtttctcttctacaattataagttccatcaggccagagacttg

SEQ ID NO: 30200 - DNA, 1191 bp, Artificial sequence
  DNA replication origin
cctgtgccccacttctgaaaatctcctgaaacccctgtggcccactctgccttccagagagaggggctgaactgcgaggtggccaccaacacagaggccctgcagagcggcaggatagagatatggagctctacatctctgtgcagaacctgagccatcccagctcagcaaggtagggcctctgtcccctccccaccctgtacctatcaccccagggtgagcccagccttatagacccctgcttggaggtgtgttacgggacccaactggcccagctgcaggggctcatcagaagcatggagcagcagctgtgcgagctctgctgcgacgcggagcaccaggaccatgagcaccaggtccttctggacgtgaagacacggctggagcaggagatcgccacctacagccgcttgctagaggttgaggacgctcagtgagtgtgcacccgggtacctgctggggcgggctgggggcccacttcacctaggaagaagttggtgtctgagcaccagtgaagttcaggaggtgtgaatgtgggaacctgtgggggtttgcaggaggtgaaactgacaatgcaggctggagtctgattgaggagccttgaatgccaagttaaagcgtctggattagatcacgtaggcaatggggagccatggagggatttggagctgaagaggggaatgaacatcaagatattttagaacattcactctggctgcagagggagaaatggatcagaggggtcagggtggggccagagagatgtgtcagggggctggagcagggagtgtggccagagaagtcctgcggggtggagggtgggtcggtggggtggcaggggaaggaaggtggtgcacgcagaagagaggttatagctcaaaacagcaggactggatgcctggatctcagggtaagcgtgactcacagtcaggactcagtaagtgtggggtgaacacatgaaggagtgggcattgatggccctggatttctggttccgatgactgtgtgagtggtgacaccatcagccacagggtgaagagcaaggtgggtggtggtcgggtttgcaggtgggaagggtgatcaggccttcagctggcagtatcctggagtctccatgcttagtcacacgttgcagctttttgctccccgaaaaggtttttccatcaaggtttttccaaaggacaagcggcc

SEQ ID NO: 30201 - DNA, 1688 bp, Artificial sequence
  DNA replication origin
ttacacaactcaccataatgtagaatcagtgggagccctgaacttgttttcctgcaactacgtggttccatctggcagtgatgagacagtcacagatcatcaggcattaggttctcataaggagcacgcaatctagatccctggcatgcgcagttcacagtagggttcatgcttctgtgagaatctaacggcaccgctcatctgacaggaggcagagctcatgcggtaatgcgagggatgggaagtggctgtttctacagatgaagctttgctcactggctggctgctcacctcctgctgtgttgcctggttcctaacagttgggtatccctcatttacccagcaagataaatacattattatgtcaattgaaattattcaccttgaaccacccaaaattaccttgcatacctacacccacccaagggtcccgcagcacactttgggggctgtagatagtaagcctggagctccgtggagcattccatcccttcaccatctgtgggctaacaggctgcgttagtttcccagggctgttttacagtaccacagactgggcaccttcaacaacagaatgttactgtctcacagtactggaggtcatgagtgtcagtccaagatcaaggtgtcaccagggtgggtcccttctgaggctgtgcaggaaggctctgttccaggcctgtctcctgatgtgtgggtggacgtcttctccctgtgactcttcattaagggtgattctggtgagggctcagaagaggagacttggacaaaatgttggtagataaatgtgtcagtggaaaccagagggtagacaggaatccatccatgcccagggctttctggggacagacctgtccaagcagctgccattcccaaccgagttctgtttctggaaagccaggcaacagctggggctgggccctctgggatttgtttagtgacccgattatgtgggaagcctggactgggtggttgggtggggggtggtaccgcccaacctcattgcatcactcacttcccaggccctgtcctggttctcagccaccctgtcccagtgggtgcttcagcccactcactgaccaagtgagggactgactcgaggttacagagtgctgtgtttatgtgacctgagagtatgtgtgcacagactgtgcctgcagtgtcctcgtatagttgagcatgtccatgtcctgcccgtgggtaggcagcctgtccacacatgcctaggagtgtgactccgtgtcctggtagggtcccctgattacttctatgggtgcgtgtttgtgcgtcttgttaggggtccttgttaggggtatggaagattctgccctgggtgcccttgatcacgtgtgtgtgtgtgtgtgtgcgtgtgtgtgtgtgcgcacgtgcgtgcttgcgcgcgagcatgcattagggggtgtacggtgttaacagcatcctcaaccaactctgtatgtgtgcatgtttgtgtgtgtgtgtgtgtcctacaggtgtgagccagtggatgcttccactacgtgtctgcacacgtgtgcgtgcacttgcattgtccttgcacacctgcgtgtgtcccgtgagagcgaacgaagcccagcatgtgctggcacctgcaggaacgtgtgagtatgcgttctgcgggtccctgtcctgctggctccccgcttgtccccagggagtgcgcacacggg

SEQ ID NO: 30202 - DNA, 739 bp, Artificial sequence
  DNA replication origin
aaagggcagaacaaaaacgtagttacttgaaggggtcactcaccccggacccgaccgtgccacagccccgacgccacgcatgtctaggaccagctgaggacgcggcctctcggcggtaaccttggtaaccagccagcgcgccgctggccctccggaagtcagactccgccgggctgagccgagctacgccagcgccgactggcgtcgtggaggagtctgcgcagaggagacacctgatccggtgggagacggccaggggagcgcgcgcggattggctggagccgacgggggacggctgggcggggcgcggactgggggaccgcagtcccggggagcgcaccggaagttctcgcctggcccaggcgcggggtccaagatggtggcgctaggagccgcgacccagtgatagcggccgtggaggggcccccgaccgagcgggaggttgggggtagcctggaggtgagaccccgctgcgttcacagagctggcggccgcggcgcctgcgtccaccggcaagcgaggagtggagcagagctcatatgcctatggggagaggcctgggggaccgcaggaggatgtaggcgccgggtgcgcatgactgggccttcttgctctcggtcggcttcttggtctcggcgtgccccattcccggccctgtcccgctactcttgcctgttccagttccctcctgtgggtaccgctaacggcatcttcccgaggcccagaatccaccgtcagg

SEQ ID NO: 30203 - DNA, 951 bp, Artificial sequence
  DNA replication origin
cccatccccctgcgcctgcgcactgcttatttcccgctgtcaggatgaggaggcggaggtcggcggtcgggtccgtctctgcccgcggctgtggcggcgccggcggatccagccttagcggtttctctctgggcggcggcggcggcggctcggttgacgcctcctccgccagctgagcccgcgggagcccaggacgccgcttccccgcccatccccgctccccgaggccggccgcctggtcatggcgcagccgggcccggcttcccagcctgacggtgaggcgcccaccatggcaggcgcggcgggcgcggcctgcccggcgtcggcgtcgcgggaggatttcggggcgggcaggcggcggcaagggcgcgcgcaggccccgggggtgaccccgccgggcggaggcgggggcgcgcgggctgcggcgcgcgagggcggcgcgggcgccccggctgccgtcgctggggagggggcgggaggcgcgggtgcagcgcttgcgggagggcagagggaagggcgtggggaggctgctgggtagcgtggggtagtgtggggagggagcggttctgggtagcgggggaccggcacgtgggttctgcccgtgggggaggatggaaatcgggaacatgtgctatattcgttaaagaaaaaaaatcttagcttaggtagtgtaccctccctgccgccccaatccttgctatagaactctttgcacccagttatgtgacctgaaagtagttgtgtacagtaactggatttagtagcattccctgaatggcagtgtggcttaatggttaagtgttggggcctgggagtctagaggacctgtattcttaaccagcaagctctgggctcatttcttagcctcgttgagcctcagtattctcacccacgaattaaccaagaggttaattcatgcctttatattttatctataaaaatagcaacacg

SEQ ID NO: 30204 - DNA, 1153 bp, Artificial sequence
  DNA replication origin
cgccgctggcttgccagggacagacggcgcggttggctccccaaaattccgactgatacgcgcctcggcgagcgaaagcaaacgcgggatactctcgcgttcctgattggctggttgtggacacctcaattatgacagaaaggggccgggcgggaaagttagctgtggccggcggggattggcagaaggaacctgtacttactcgtttttcccggacgttggctggtggagaagagagggtggggagatggggcgctgggggggggcggtggcgacgcaactcgtgattggcggatgtgcgttccttaggtctctacggattgcggttgcttggcgttgattgggcagtcgcgggaaaactaaagtgggcggggggcctttgggcccgccccgccgccggggcctgctggcggaaggggaaatggggtgggtggggggtggggcaggcgacggtggggaagatggcgtaccagagcttgcggctggagtacctgcagatcccaccggtcagccgcgcctacaccactgcctgcgtcctcaccaccgccgccgtggtgagcagctgcagtgccaccttctcattatctgggctggatatgactgggtcttcaggaaactggggtttgggcctcggggaggcccagaggggctggtcccggggatgggtggaggcgtacagggattactctggggttcgagttggcgccaagaatgcttatccagtgacgcgagaagggagtgctgcttcatggggggtcaggtcagtttctaagagatgagcgccggacctatagcgggttagggttgcgggagcctcccacccaagaaatgtgtccgagagctctgccaatggccaggtggtaccatggtgactagtgagaggaaggtccgtttagtgaagaaacaggaatggggaaagcaagctggaaactgtcgagaggggaatggcttataataaaaagggtctctggatctaaataaggggctagctggaggtacccagccctaacggtggcagggtctccagtctccgttatttcaagtgagttttgttgtttcatacagctgtttcaggtggtgcccatgtggtgggtagattcatagcagctgtttttatttgtcctgtgtctaaaatatcaccacctgtctgcct

SEQ ID NO: 30205 - DNA, 919 bp, Artificial sequence
  DNA replication origin
ctgctctgggcactgggatatgactagtaatgaaaatggggctgggcacggtggctcacgcctgtaatcctaacactttgggaggctgaggtgggtggatcacctgaggtcaggggttgaagaccagcctggccaacatggcgaaaccccgtctttactaaaaatacaaaaattagccgggcatggtggcaggcacctgtaatcccagctactcaggaggctgaggcaggagaatcacttgaacccagggcgcggaggttgcagtgagccgagatcacgccactgcactccagcctgggtgaaagagcgagactccatctcacagaaagaaggaagggagggagggaaggagggagggaggaaggagagagaaagaaaggagggagggagggaggaaggaaggagaaagaggaaaggaaggaaggaaggaaggagagggagggagggagggagggaaatgggcaaaattccttcctcaaggagcttacattctagttgggagggaggacaagaagccaaataagtaagtaaaatatattgtgagtgacatgagctatagagaaaagtaaagcagaaaggagcagggagtctggggatgggtgtgcaattttaagtggagagacgaggcaagatgtcaccaaagcgacttccttctgagcaaagacctgacgcaagtggaggagcaccccatgaggtgtcagcaccagaagattgttccaggcagaagaagcagcagaagcagcaggtgcagagaccttaggtggaactgtgcctggggtgaggaaggaagagagagaagggcagtgactatggacctaaaagagattagagatgaggacagagatgatgaggatccaagtccccagagccctgtagaccaggaaaaggaccgtgaattgtattctgagtaatgtgggaa

SEQ ID NO: 30206 - DNA, 1426 bp, Artificial sequence
  DNA replication origin
ggcaggcgcctgtaatcccagctacttgggaggttgaggcaggagaattgcttgaacccgggaggcagaggtttcagtgagccaacattgcaccattgcactccagcctggacgacaagagagaaattccatctcaaaaaaaaaaaaaaaaaagatgattctggatgaacctggagaaaagtctctgcctgcgtgggctttctttgctcttggcttcatcatcactatcattcattcattcgatatacattcatcaagcacttgctactcccagccttacaccaggcggtgggggtataatggggtgcaaaacagatggagttcccgccttgaaggagtttatagtctggtgggaaagacagataactcagtaagcagtaatcactgagggaggccagttacccagtgccatgactggaggtgggtctcataagagcaagagatggaagcctatcctgggggtggtggggtggcagggaagccataatcatatgtgaaaggtgagttagccagaggaagggggtggggtaagagcgggttcctgccaaaaaggataacgtgtgcaaaagtccaagtttcagaggaagcaagcgtgctgcaaatggaccagtatggccagaacatggactgggggatggatgcggggagccatgaggctggaggagagaaccggggccaagtctggaactgcctggaactcaggcttcatcttgaaatccggaacgatgcattgaaggattctggacagagttgccatggtcaggtttgtcctctgaagagagctctccggctgctgttggaaagtgggctggaggcgaaaagcctggaggcagggagtacaggtcagaggctctgggagcagccaggtgagagattgggctggacacgcatggcactgggggtgaaagaaatggacaacttcgaagatatcagagagtaaaaaagacagactttggtgactgaggggggcgctgcgggggctgggaaggggtcctggccgtcacagtccccacatagcacgaaaaagggagaagctgttgggcctggcaaaggtgcataagtccagaggtcagaagcaaaatcatgtccactggagtgagcctgaggagggagcaccaggaagacacatccaaaacagagcatggggggggggcctgcatgtgctgagggaggaagccaaaaagggtcagaacaccagggaaggggatgttagcagggaaggccaaattggggagcagggagcattgctctgagccccctagccaagatcccgctgcccttttgtgtaggggttaggaaaatgccaaggggccagtgcaggggacagctgaggatgccactcacaggaaaggctggcagctaaagtgacagtccacactgacagagccagagcgtgaagcctgcactgaggctggatacccaggcg

SEQ ID NO: 30207 - DNA, 1053 bp, Artificial sequence
  DNA replication origin
agcgcaggagcccacggaggtcggggcgggcggggggagggggaagctcaggcacggcgggctgcaggtcccgagccctgccccgtgggaaggccctaaggcccggcgagaaattgagcacagcagctgctggcccaggtgctaagcccctcactgccgggggctggcggcgtgggccggccgctcagcgtgcggggcccgccgagcccacgcccacccggaattcgcgctggcccgcaagcgccgcgcgcagccccagttcccgcccgcgcctctccctctacacctccccacaagctgagggagccggctccggccttggccagcccggaaaggaactcccacagtgcagcagcgggatgaagggctcctcaagtgccaccaaagtgagagcccaggcagaggaggcgccgagagcgagcgagggctgtgaggactgccagcaggctgtcacctctcagctgcacagctggctattcagtagcagaactgagacccaagagcaggtcttctgggaagcaacagggtatgagcgttaagaacttgggctttagaggcagacacgcttgtttcaaatttcctcttgccttttgctagctgtgtggccgtgtgtatgtttattgagttctgagcttcagtttcctcacctggagaatagggatgccagtgcctgcattccagagagattgtgagtggatcctgttacagcgtcagatatgtggtgggcactcagtaatgtccaatctgatcactgttatgctgacaccagagtctgctgctacacagactcacacaggcatcattcaatcatccggggtctgtttcttcctctctctgtctcccttggcccctctatcactgtcctgtgtctctccttatctctttgtgtgtctctatgtatcccactgtgttttccctgttggtctgtgtgtgttaaaggatctctgtctctctctctccgtgtgtctttgtaagtgcatttccctctgtgcatctgtgggactgtccacttctgagtgtgtatctatttccaaatattcttgtctctttgtg

SEQ ID NO: 30208 - DNA, 1021 bp, Artificial sequence
  DNA replication origin
actggttctcactcccatcacattgacacagcttctgctttgaactttaacctgtgagccacaggcaaccaccaaagggttctaaataggggagtgatgggttcagaactaagttttagcaaaagccctctggcagaaaggtggatgatggatgggagggagtactggggctagggggcagagaccagttctgagatttactgtagactcagtaaaagcattggaagtagggcaggaaatggaggtggggtggggaagatgtgttaaccataatcgtatattgtataacttggttcttaaaaaacatattgggaggtaagaattttccttgctgttttataaataaggacaccaaagtcatatgaccggaaggctcccagcctggatctgaacttgagtgcctatgactcaaaggctcctgtaatttcctctaagccacctcatgagcgctcccgcgtgggcggtgtcagattggatccagacgtgaggagaaaggcaaggtagagtggctttagagatatagaagtaagccgcggtggtggagttcttacctggagaaagagaaatcaggagggcgtgggtttggacgcagcagggtatccagtggaaacactaagccagcagctggaagtggaagttagaggcctgaagtctggagatcgcagatgggctgtgggtttgagagtctgaagggtagacctgctgtctgaaggaatgggagtgaagaggagagaggagatgtgagagagaaaaaggagagacggggaggaaagaagaaagagaagagagatgctgatagggcctcagggatgctggtgcccagggggtggtgaaagggaggaggggagagagatacaaaggagactgagggtggggtgaggcatagggaagtcaaaccagggaagagtgtgaagagggaggtgaccgccagtcaaatgctgcagagaggggaagaggataaggcagagtgggtgcctgggaattgagcctcggtggttgggggtcaggggtggggttggaa

SEQ ID NO: 30209 - DNA, 891 bp, Artificial sequence
  DNA replication origin
gtgaccgccagtcaaatgctgcagagaggggaagaggataaggcagagtgggtgcctgggaattgagcctcggtggttgggggtcaggggtggggttggaaagctagtgaggaaggtggaccacagtactgtgtagatgcctggacgggggctgcctgggatcctcctctgagggtcttgcctggggactcaaaccaggattctatagacaacgtcttcacgtggcaagttatttttgctgtgaacccacgtggtcgcgcctggtaattatagggtaaaaggaattaagcaagacataatttctccccatcaaacctgactgttttacgtctccacctcgcaccggcaggcaggctttctcccttcacaggtgccactttgatttcagtcacgttggaaaggaatttgaaacatcttcaaagtgattaaagagaggaagtcattgcaaatgtgggctaaatgtaataatcacataaactgtttatggccatggagctttcaggagggaaggccttgtggtagctgacagtcggggtggggctggggctggtgagaacagtggtggcagaggtggcgacggcactgcaggtacaggtggaggatggctcaggtgcaggtggaggatggctcaggtgcagatgcaggtgcaggtggaggatggctcaggtgcagatgcaggtgcaggtggaggatggctcaggtgcagatgcaggtacaggtggaggatggctcaggtgcaggtggaggatggctcaggtgcagatgcaggtgcaggtggaggatggctcaggtgcagatgcaggtacaggtggaggatggctcaggtgcaggtggaggatggctcaggtgcagtgcaggtgcaggcacagatgcaagtggggatggatctaa

SEQ ID NO: 30210 - DNA, 1068 bp, Artificial sequence
  DNA replication origin
aggggccgggcgtggtggctcacctctgtaatcccagcactttggaaggctgaggtgggtggatcacctgaggtcaggagttcgagaccagcctggccaacatggtgaaaccccatctctactaaaaatacaaaaaattagccaggcacggtggtgcgtgcctgtaatcccagctactcgggaggctgaggcaggagaatcccttgaactcgggaggtggaggttgcagtgagctgagatcgccccattacactccagcctgggcaacaagagcaaaactccatctcaaaaaaagggaagggaaggcggggaggggacgggaggggaggggaggatgggaagggagaggaagggaagggaagggaagggaagggaaggcaggggaggggaggggaggggagggccagtgaggagtgatgggattttacttagattttaacctgaggctcactccatctgctgtgttgggaagaaaccaaagaatgacctggacggatgcagaaagtccatttagagactcttcactcatccaggaaagaggtcatcctggttcagagtggggtggtggcagtggggtgatggaaattggtcagaatctggatctatcagccacaggacttgctgatgagttggggtgtagggcgagaaacaggggtggaagctggtgctcaggctttcctgtgagccactgcaaggacagacttccatccttcaaggtagggaaggcagcaggaagaacaggataggggagaacatctggggctcaggcttggatgtcctacattcaagttgcctattggatggtcagtgaagatgtcagggggacacatggagttcagagaactgggctggagtcgccagcatgcaagatgatttaaagtcatgtgactgagtgaggatcattaccagaaagggaaaggtccttgccacccagtgaggtccctaagggaggaagtaacaaagataagaggcccaaggaccgagtcctgaggcaggaaatgtttagagacataacaatatagacgatacagcaggttaaaatggcccccaaagatatacattctactt

SEQ ID NO: 30211 - DNA, 1437 bp, Artificial sequence
  DNA replication origin
aaggttgggactctgaggcagcacagaattcgtctctcacttactgtatcctcttcctgggcttaaggatattaaatccaggtgccccaagaccttcagagcattctgccttcatgcggatggtgcagactctgttctaattctgcacttggccagacatagctatgcaaactgcagcgagtctcttcccgctctgggcgccacctgactgacccgcgtaaggagggactgtgactggtccccaggcaaacgctttccctgccacctgcacctgttgcaagccagctcctcggagccaggccaagcagctctgcccctagcgggagtcggaggcatgaaactcccttttaggaagacggagtaagaggcaccaccacctgctcctgctgcctctgctgtcctcagcttctgggagcatcttagcagccagctccgggtgaggacagggtccaccggtgcacatggcagagcagggcagatgctgtgacttggcggctttgggggaacagggtggggctcctccctgggaaaaatctttaggtttggatccagcctttatttaaagagggggattgtgtatagacttgtgtgactgttcagcctctttccacctcggtgcgtgtgtgtgtgtgtgtgtgtgtgtgtgtgtgtgtgtgtgagagagagagagagagagagagcctgtgggtcaatgcccagtatgcccctctgagagtgtgtctgttagtagacaccagtgtgtgacattgcttctgtgggcaactatgtcaaggcgtgggtttgtcactgtgtgcggtgtggagcagtatgataagccggcggccgacccccgagtgtgtagacgcgggagctggtgtcagggtatttgtagggctgcaattctgtgtaggtctgtctcagattgtgtgagagtgtctgtgttccagcaggtgcttgtttctgagtgtgaatgtgtgtgaagctgtgaccgtctgtctctagctctgcatgggacggtgatccggtgtgtgtgtgtgtgtgtgtgtgtgtgcgtgcgtgtgtggtgtgtgtgtgtattagagtgcactctaaactgtgtggctgtgtgtgtacgtgtgcgtgcctgtcacagtggcccagtctgcttctgggtgagtggggcagagcccagagagtgtgtgtgtgagtgtgggtgtcggtgtctctgggaagcagtgattcgggatgtgtgtgtcaggcagtgtgcggctgtcgctgtgagtctgcatgggagagtggcggcgtgctctcctctgcgcggcagtgccccgtgtgtttgtgggtctgtgtctgggtgtgagcgtcatggtgcgtgtgttagagcccgtggggccccggtgaaaggctgtggctctgggtgactggtgtgtgtgtgtgtgtgtgtgtgtatcagagtgggtggcggcgtctctgctcggc

SEQ ID NO: 30212 - DNA, 1586 bp, Artificial sequence
  DNA replication origin
tgggtccgcttgccgcgggcggccggagacgtgcgggcgccggggcttctgggctccgggcactgcggggggctgcgggctcggcgcccggggaaggcgggccatgggcgcgggtgcgggcgccccagccggccgcgatcgcggggtgagtcctgtctctcggcgctccagccggacccccgcgcgggctgcgagcagggtgttccccttgccgcgggcaaacaagtttgtgcagacgcggttgggagcgcggcggggctgcacctgctccggctgcagggcgggcttgccgggggcaccttcccgggggcccggggcggctcggccggggcaggggagagtgagcgggtgcgtgcaggggttgtgggggggcgggggcggcgctcggcgcggccgggatggggtgggggtgcgcgaggcgccgcacgagccgcgtccccctccggagtcctgagagcccgtccgtcacccgggagggcgctgcggttggtcccggggagggggcgagggcagggtgtggggtgcgcacagcttccctcctaggcggcgacgtttacccagaagcagctccctctcgttccgctaccaagagaggcttccggtcagcggagggtttgctccgtctcttggtgaacttgaacagaggcagaggcaaaagcaaaacgtatgtattttgtccagaaaattacctagtgtagagctttgcgtcttcgtaggtgtggacggagactcacgactgaaggttgctaaattgcgtttttcttggctactcaggagcgtacgtacctggctgggtcccctgcctccgggtaacctcgctggtggttttcctgagcatttgtgcgcctgggatgatgcctgctctgctgatcgggaatgcgggtggggaaggggaccgctcttccttccgctgagcagtgggaaggctcatataggagttctagcctcatagccctgcactgggatccagctgctccccacactggccctgcccctgcagctcccaagatggacagatgcaggactccgctgtacttttctaacatgagatacccgcatccctcttgttgctggaacagcatgcttaggtttatggaggcacttggtttatcccactttggcatcaggagtgggggcctttcttttttcctctgatttgcctaggttgtcaggcacagaaagtgagggtggtggggagtgaaagttacaggagatataaagctggcttgccctgcgctgtttgcaatcacccactcctggtggctgcaggtgctggggagagagctaggggaggtttccttgggctatgggagaatgaggtttgtctctctcaatcatgcccccacccccacacacttagattggccctcaggagatcctccgggaaggggcctcaaccggctgccagagctcagggtttctaggaggaagagcaggagctctcccaggcatgggatctgaaggaggcttggcggtggttgggctggtggctgagcctgactgcctcatcttctccgccagaaggctctcacctgtggctgcatcctccaggcctcagcagggccatttccacagctcctctgtaa

SEQ ID NO: 30213 - DNA, 1375 bp, Artificial sequence
  DNA replication origin
atgatgataagcctgttccacacctaggtctcggcagatcttgcttgcttctgcttcctctctgcttctccaccacaaccctgagaacttgcccaggcttgcctacagagaatgagattcacatgaaggagagccaatgccattctagatgggccaacagcccaccagctgccagacacatgagtgagcccagcgaagatcagcagagcggctgggcctcctgcagctgaccccagacacacgcacaacaaatgcaatgcttgtaggttacagaggataagtagcaattttatgtagcattatatggtaataaataatagatacactcctccaggttctgaagcaattgagtaatagagacaagaaacagacaggtaacaaaacagtttttgttttgttttgtttttcctagtaagacttggttggaaaatgctacttgaaacttctgaaccaaacctggatttctacccaaattgaatgtacccatccatgactgcccaggtgagattatcatatacaggggaggaagaaaaacacctgcagccatagtcaggctggtcaaaaagagagaatgatccagagaaacccagcaactcatgctcaatcctttaacagaacctcaggccagtcaagacacttctcccctagggaggaatgagcgagggggtagagacaagggtaaaaacgatgtgcccacacttccaggagggctgaaattcctattttcatctttaatggggccatggcagaaatttagggcaagaaagaaaatggcttctgctagacaggagctgatggaggtggtgttgttggaggtggtggtgatggaggtggtggtgatggaggtggtggtgatggaggtggtggtgatggaggtggtggtgatggaggtggtggtgatggaggtggtggtgatggtgatggaggtggtggtgatggagatggtggtgatgggggtggtgctgatggaggtggtggtggtggtggtgatgggggtggtggtgatggagatggtggtgatggtgatggaggtggtggtgatggaggtggtggtggtggaggtggtggtggtgatgggggtggtggtgatggaggtggtggtgatggtggtggtggtgatgggggtggtggtgatggaggtggtggtgatggaggtggtggtggtggtggtgatggaggtggtggtgatggaggtggtggtggtgatgggggtggtggtgatggaggtggtggtgatggtggtggtggtgatgggggtggtgatgatgggggtgatggtgatgggggtggtggtgatggtgatgggggtggtggtgatgggggtgatggtgatgggggtggtggtgatggaggtggtggtgatggagatggtggc

SEQ ID NO: 30214 - DNA, 1238 bp, Artificial sequence
  DNA replication origin
tgctgccttcaagcatctgtttaacaaagcacatcttgcaccgcccttaatccatttaaccctgagtggacacagcacatgtttcagagagcacagggttgggggtaaggtcacagatcaacaggatcccaaggcagaagaatttttcttagtacagaacaaaatgaaaagtctcccatgtctacttctttctacacagacacggcaaccatccgatttctcaatctcttccccacctttcccccctttctattccacaaagccgccattgtcgtcctggcccgttctcaatgagctgttgggcacacctcccagacggggtggtggccgggcagaggggctcctcacttcccagtaggggcggccgggcagaggcgcccctcacctcccggacggggcggctggccgggcggggggctgacccccacctccctcccggacggggtggctgccgggcggagacgctcctcacttcccagacggggtggctgccaggcggaggggctcctcacttctcagatggggcggttgccaggcagagggtctcctcacttctcagatggggcggccgggcagagacgctcctcacctcccagacggggtcgcggccgggcagaggcgctcctcacatcccagatggggcggcggggcagaggcgctccccacatctcagacgatgggcggctgagcagagacgctcctcacttcctagatgggatggtggccgggaagaggcgctcctcacttcctagatgggatggcggctgggcagagacgctcctcatatcccagacggggtggcggccgggcagaggctgcaatctcggcactttgggaggccaaggcaggcggctgggaggtagaggttgtagctagccgagatcacgccactgcactccagcctgggcaccattgagcactgagtgaacgagactctgtctgcaatcctggcacctcgggaggccgaggctggtggatcactccggttaggagctggagaccagcccggccaacacagcgaaaccccgtctccaccaaaaaaatacgaaaaccagtcaggtgtggtggcgcgcgcctgcaatcgcaggcactcggcaggctgaggcaggagaatcaggcagggaggttgcagtgagttgagatggcagcagtacagtccagcttcggctcggcatcagagggagaccgtggaaagagagggagaccgtggggagagggagaccgtggggagaaggaga

SEQ ID NO: 30215 - DNA, 1197 bp, Artificial sequence
  DNA replication origin
gtgcatattcctaaaccatattgttgagcttttttgcgtttgaatttatacagtgtcatactttatgtttgtctgcatattgcttttttttaatctaacatatttctgagattgacttaagttacaccatctggctacaatttgcttatttttcagtgctgtataatattctataatttgaataaataacaatttatatgtcttaaaaaatgccaccgatagccaggaacggtggctcacgtctgtaatcccagcagtttgggaggctgaggcgggtggattgcctaaggtcaggagttcgagaccagcctggccaacatagtgaaaccccatctctactaaaaatacaaaaaattagctaggcgtggtggcaggcacctgtaatcccagctactagggaggctgaggcaggagaatcgcttgaacctgggaggcggaggttgcagtgagccgagatcatgccattgcactccagcctgggcaacaagagtgaaattccgtctcaaaaacaaacaaaaaatgccaccgatatatgaatttgggcattacatttccaacatgtgaaatttgagggacacattcaaaccatagcagaggatcaagtaagttaataaactgcaacaccggtacctgtgcatactaagtgccatatacacgttaatcattatcatcatcctttccttggaaatcactgaggccaaaggagtgggtgagaccacccagaaacggagagggctgaagacagagtctcaagaagccatcatctcaggctcttgtgcggagaagtaacaaagaaaccagccgggggagtgggcagcactgctctgaggtcaccgaaaggagaaagatgagctggagagagctttataatggctgcatttgtttggatgctaaggagaagagaggcaggcattccgctggagagagggagggatgcgtggggcaaggcgggggcggggagccggtgtagacgggtggagggcagaccggtactctggtctatccccgcttccgggacgcgttttctagggagggcggagcgtggatggcgagtatggggaactcagagagggacagtgtcttgtcacaggaagggagggtcaggagggaaatttgaaagaaaacgtctctgggaacccagggctctgcactgccagtccctggctccttctgacaaaaccactgagcaagaaggaa

SEQ ID NO: 30216 - DNA, 1031 bp, Artificial sequence
  DNA replication origin
ctctgcactgccagtccctggctccttctgacaaaaccactgagcaagaaggaaaagccagaccccttggcaggatgagaggggtctctgcccgctgccgggcctggggcctggggcctgagccaggaggcctaggtcccaggacctccgcctccaccccatgggtcagagcagcctgaaccctgtgcgcgctccagggaggggacccggtgtgcgatgcgcgggggctgggctagcaagggcagtggcgcgagcgggacgcaggatacaaagcccggagccacgaggctggcggcggggcgggggccggagcgatgaatgggcacggccgggccaatccaagcgcagcatttgcagccgcgagagagggagccaatcggatccccggggcggtggcggtggcgggggcggggacggaaccaatcagctgtgaggacggggccgggggcggagccgcgcagagtttcaaatcggctgcggtgggcgaggagcagctgtgctgcggctgtgctcggccttagtggtgtcgggtgagtgcgggctgggcacaagtttcgcccttgttgcccaggctggagtgcaatggcgcgatctggactcaaaacaatttttttgttcggaggggagggcatcaggttctgttcacaggggagggcatcaggttcggacacgcacggcctgtggggtcgtctgggtaccacaagaagtcggatcgaaatcggggcgtctggtgggaaggccggggtctgggcgggtgcgcgtttggtctgggcgagctggtgaagaagatggtgatcgtgtcctgggcccagcgctgaagctcggctacggcgtgtcttgaccctgcctcccctcctcgcctgagccagagagaggaaggaggttgggatgaaaagacagctgttttggaaacttgaagggcgggacatcagaaatgctgctgacccgaggcccctcttccaggaagcatcctccttcctgcacccacacttaccaactcgcccgcccccgccaccccgctgcatcccgtc

SEQ ID NO: 30217 - DNA, 1566 bp, Artificial sequence
  DNA replication origin
cctgacacagggtggccccatggcttggagtctaccagagtgcacataaagggtccccaagcaggggccccctggggttggcctgggaaggctttccagggggtgggctggcctcactctccccctatgcctgccctgtgtttcagtgcttcatcaaaatcagtgcggcctatggctccacgaaggacatctctgtctacagcgtgctgggcctgcctgcctcccagatcttcattgtgggccggcccaccaagaagtaccaaacccagtgccaggtgggtggaggcggggctggaggcggggagttgtgagggaggtcagggaaagggatagagggagtaagcacttcattcattcattcattcatttgttcattcccccatttgctcattcatttattcaacaaacacttcggggtgcctgccttgggccagggcctgtgttgggtgcagggggagaatcccaagtggagccagatgcaatgaacttcagtgtagtggcgagatggacacatttgcagttggtgacagtggagtgtaacaagtgccatgatgtatgacgggagcacagggaactgtggggccctggagagggaccgctaacccagactccagggcaaggttgggtttccggaatttgaaggaatggtccaggaagggcctgagattgagaagaatatttgtgacagaggcagcagcaaaagccaaggtcaggaggtgacacagaacatgtatattctgggaactgccagtgactcagcttggctgcatgggacgtgagctgggaggtgggggggcggggctagaacggtcagtgcggccaagatggcctgtgtggggactctgagagggtgtgggatgagcaggtgtgtgattcaggaagctccctcaggctgcaggtggcaggtggttcagaggaaggaaagaaaagccgagaggacattgaagagaaagtggagggtctgagaggcattttttggtaggggatggattgggtttggtaatgcccagatcagatgtgcaggatgagagaaagggaaggtggaggacagctacttggtctgtggcttgggtgaccacgtaggaggtgccactattggaatcgcgcagcaggtggaagggaaggagttgacctccctctggggcatgtcaagtgtgcaatgcctgagagtgacccgcgggtagagggtcaggagatggtggcgtctcccagttgggaactcagaggccctgcttctcaaactctgaagtgcacaagcatcacctggagatcttgttgacatgcatattctgattccataggcctaggggcggggagagggccggaagttctgcctgacaaggtgccaggtggtgttgatgctgccagagtccatggaccacatattgagtagcaaggctctggacacagccagaaggactggcaaggagggcagtcgcagggctcagaaaaatgacaagaggcatggtgaggctgcgtgacgggagggactttgcaggattctagtgagccaagtgacaaggatgggcgcttccccaccctcaagaatccagaggccaagcaccc

SEQ ID NO: 30218 - DNA, 1173 bp, Artificial sequence
  DNA replication origin
aggaccaggagagagagacgagactccaggtatcgggaggagagggcttcaaggagatagcgccccttttgccgagggtgtgggatgctgagaactgcctagtagacaaagactggccaccagatgaccttgtgaggaaaagacagttcggaaggacaagggggcaaaagtagcagggagaggagcagagaaagtgggtgtcagctgggagggtcatgaggcaggtaggcagggtcgccagagctggaggatccaagttataggagtgagctcaggtgaatgagaaggtggaagggccagacgaagaggggctgctccatcctctgagccaaaggccagttgggaataaaccaaccattgaggtgaggggcagtgggctgaggaagccctctccttggtccagcatcgaaggcagtcacctgcaggatggggtagggctcagggaaggacaggaagaagatggaaggtgagagctgcgtggctctgtttctttagcagctctcggtgggcagcatgtacaaaaacacaaggtggatagtggaaaaaatttccagggctgagatttggccgggcaggtgtgggaggaggatgaaggggtgagagaatccggggtggaggcaaggacacagggatgccatgggtcactcaggcaggatgaggaaggggcgaggcagcagggctggtgcagaaaagacaagtgtcagtaaggctgagagcagccaggtgggggctggcggagaagtggtggggagggggcagaagccctgagcggagcggacatgtggaagttcacagttagaggggcaggttctgagtttggtcctggaagtgacggccactgacgtgaaagaaggtgcgaagctgccaggccgggtgggaggtggtagatccttcacgtcatgcagaccgtgggtcatcccagtgatggtggggcttggcaggaaggaaagcttgtgacccaggaccaaagtctccaatggcttgagaggagtgtgagtgggagaaaaagaagatgacagtgacaggaggcacacagtgaggggcagctgggtggcgagcacctcacaggaggaggtagtttgatcgggtttatcctggggaggggagggaagggtgatggtctggaagtgcccctggagcaagacggaccttgtgcagttctctgaattgaat

SEQ ID NO: 30219 - DNA, 971 bp, Artificial sequence
  DNA replication origin
caagatttgcattacggtgagagcgcttgtggctgtctgcgttgtaggagaaagacgggagcccagtacgtcctgtttcccacttgagtgactaaggtggttctgtgtcctgcacgtgcggaagagcagggctgggcagggggcggaggaaagtgagttttgtttgtaggttcttgggggtgggagagagtgtgctgggctgggggtgggtccccagcccggtggcacccaggccagggtgctccagcccaaacctgtgccccacgtggcacatccacgactgtctgggtgtgtgaagtgtgagctgcctcttagttgctgggacggaaggggagtagaggagtctggaacttagagaagacatcaggattccagataaaaatgtgggtgtcatcagagcttggacggcatttacaactggcgatgagtgccagactaagggtgctcctacagagagggaagttcagggatgagtcctggagctcccccagggagagaaggagaagccactgaaggagagaagaggacatccctgaggttggaggacccagagagtgtagggagaggacccctgagataggcggggtgggagtcaccggggcagtggcaagaatggcttccgtagaggagtgatggagaagaaccctgactggagtgggtggaggagagggggcaggtgaggaaggggtgacagcatatgggctaagtcctctgtcagtgctgctgtgagggacagcagggatgtggcggtcactggagaggcatgaggaatctgagagagtattttttaagatgggcagtattacacgtatttgaatgctaaggagagtgatctagcggagggagtctaatcagctctgcgggattgggaggggagcatggctggagcaacgtcctcaagaagcaaggaggggctgggatcaggactcaagccggccttaagaaagggccaccttgttgtaacagaggga

SEQ ID NO: 30220 - DNA, 729 bp, Artificial sequence
  DNA replication origin
taggttcttgggggtgggagagagtgtgctgagctggaggtggggccccagcccattcaacccctccaagctctcagtgagtagggtgactcacctgagcaggggctgtgagaacagaaggttagccgactcctctgtcttcagagtcgcccacctgtgctaagcacctgcttgtctgaggcatcttggggctcagaggcccccaacaggctcccggacacactcctgtggccagggctggtgtaaacttgagctttcagagctgatggcgggtccagggatccgtgctccaatctattttttttatgagtgcccagcctggactctgaaggggtagggcagagagtgtgccatcctggtgggcttcatggaagaggtggcctttgattagggtccagagaggggaggtgcatttgggcaggtggagaagagctagaggatgagggttgagatcttccaggcagggagaacagcaggagcgagggcaggtgttttggcgaagagccagtggcctccagggtcaagtggggtgaaccgggcatggaccgagtgtatcgtcgatgggagacctgtaatggacagtcagcagcttggaaatcggagccttggctccacgccctacttgaggaaatttagcctaagcctgctcagaggtttgcgtcagggatgggggagttgtgcatggggccgattcaggattaaaaaccatcccttcctcacccctaattc

SEQ ID NO: 30221 - DNA, 959 bp, Artificial sequence
  DNA replication origin
cagaggtgcagaggcctccctcctgcccctgactgaaagttccaaagcttccagctgccagccccagtgatctgccgaatgcctataggatttgggccctgtaggcgtttgggtcatttttgcacatatgactgctgagaacccaggtatccacccggccccaggcacctacctttagctagttcaacaggataggcaggaggggagcactgcagccctcagtgcctggagcagtgggtggagctcccagaggccccataccctggaggtcccctcagtttgtcccccacaggtgccagggcccacagtgggcaaggatgtgccagcgtcagcagtgagcaagctgcccagcgctcaaccagcccttctgtggacacatccttccctcctttctccccaccagctgggttccctgctgcgagttggaagtctctctccccagcccactctccacctgcagagagagcccctcttccagccaggaggaagatgatgtgagtcatggccagcatccccgaagctggcatccccacagttagtatccccaaggctggcatccccatggctagtatctccaagactagtatccccaaggctggcatccctatggctagtatctccaaggttggcatccccatagctagtatccctgaggctagtatccccatggctagatccccacagctggcatccccaaggctggcatccccaaggtcagcatccccaaggctggcattcccaaggctggcatccctatgtgctttctacattctggacactgtgttgagtgcttcacacacattagcacacagactcttcacagccaccctgagaggttatttactatggctaccttcattgtacagattaggaaattgagacaaggagaagttaaacaccttccccagaccacacagccaggactcaaatccaggcggcctgagagcccacacacttag

SEQ ID NO: 30222 - DNA, 1043 bp, Artificial sequence
  DNA replication origin
ctataatcccagtactttgggaggctgaggtgggcagatcagttgagctcaggagttcgagaccagcccggccaacctggtgaaaccctgtctactaaaaatacaaaaattagacaggcgtggtggtgggcacgtatttagctgtaatcctagctacctgggagactgaggcaggagaatcacttaaacctgggaggcgggggttgcagtgagccgagatggccccactgcactccagcctaggagacagagcaagactctgtcaccaaaaaaaaaaaagaaagaaagggaaggggaggggaggggagggaaggggaggaaaggggaggggaggagaggaaaggggaggggaggagaggaaaggggagggggaggggaggaaaggggaggggaagggaagggaggggaggggaggggaggcgaggggaggggaggggagcagtggctcccagagctctgataggtactcttggaaccagctcgctaaccctgcatcatagcatgtggcatagatagggtcgctggaccagcagctcaagggaatgccaagggcttaggggcatctggggaggggaacacactggcagaataagaaactatctaaggaacccatagctctcaccacttgagctcaaggaatgtgggctcatgaatgggaacctgcggccacacaagatgtggggaccaacagccagtagcagatgcggatggaacagcgtgaagctgttctgaaggttttaaaacttttttaaaaacaggggaaatttttagccaatgaaagttcccttaggagcccaatttgcaaagatgaaagtggatcggctctggctgaagcaggctggggggcccagagcccaccttcctcactccagcacatccctgtccctaggcagctcctgagggcttcaagagactgaaacttaaaagccactgagcttgttcagcagccagactgcaggccaccctcctctgcaggttcccagctcctagcattgcagaaaaggaaaaatgacaatctaaataatggtgggggaggtggggga

SEQ ID NO: 30223 - DNA, 1615 bp, Artificial sequence
  DNA replication origin
cgcaaaccgggacgcgccccctgctcctgcagctctctccatccaggacgccacaaccccccgccccagcccccgtcaccagctcagtccagagacccagattccttctcgggaaggaggggagccccgtgccgcgccggctgctggccgccccgccccctcccccatcgaccctgggacgcaaagcctcagctgcggaggcctcttctggggtcccgtgggctctgccctcccccaggctcagacggtgtagcctgtggtttgagggagcgggcattagtcattcgttcattcatccagcccgacgttcattcactagcatctgctctgtgccagaccctgagctgggcaccggggctcaggcggactcagcccccctgctgcgcccatgctggggagacccaggcccgtgactcatcgggcacattctgggcccgatggtgccttgggaggcgggtggaggacagctgtgcccacagggccggccatacagtaggcggcagcaagcctggtctcggcagtgcctcttgtgaggctggcgtgtgagaatctaccatgaactcacacccaacccgtgacgttggctggtgccatgccgtcccccaggaccgggcgcgacagtgaaggaatgggtgtgaataccatcgggctgtgtgtcaatccacccccaagcccgaaagctgcccgggaccctgggctgcggacccgtctccctgtgcaggcactgagcctgtaagatttaggtgcctgagaatgcactcccgttctgtccccaaggagtcctgtcggggtggggccggttgtgtgaggcacagccagtatggaacacagctaaacagccttctcactcccctcccttttcccctcctgagggaggcactgtgagatgacaccaaggaagctgaaaaaggcttcttgcctccctctttcctccaccgtgcctgggtcctcacccaccccgactccttaaaatggcctgtggcagggcgtgtgtcccatctgctgccctaccctgtgtgtgtgtgagtgtgtgtgtgcactgggacgccttgagcacaggtcacctgccagggcactgtcatcgcaacggcagtgaacatttgctgcttgttctatgtattaggcagagtgctaagctctttactgtaccgtgatcctgggagggaggaaatgcgactctcccacttttaaaacatctagaaacagatactcagagaaatagcagcctcaaggtggcttagagggtctgggcagagcctggactcacagccaggtctattggactcgaaggactctctctgtcactgccctgataggtcacccccttaccaaatgggggtgccagtctcagtccctctgccttagcctgtgggtcctttggtccctgggctgagagtctgtgggaatttgttccagtgacaggtggaaaaactgccctgctctgagcatcaatgccttgtgctgttctaacattttggtttttttctgctgcaatttcacgcttggccctttccctcgaggcaacacagattccccgtgtctgtagatccagtgcctgggctcctgccccccacactcagcagtcatcccaaggagtctggttacctctcccttc

SEQ ID NO: 30224 - DNA, 1724 bp, Artificial sequence
  DNA replication origin
acgccctcccgggacctccgcccacctgcgcgaggggttcacctgggccggcggcccctcctctagacgcgcgagtccctcccccgggccccggccctgccctccccgcgcccgccctcacctgcacggcccgccttggccatgtcccgggcggcgggctccggcggcgctacgcgcgctcctcgcgcttcccgggcccggccccgaccgcctccggccccgaacggactccgagcgccgcgcccgcgcccccgccccgctcgcctcggctgccgccaccgcagccgccgccgcctcgccgctccctcccgctcccttaaaggcgccgagcggcggccgcgccccccccccaccccaccccccgcgccgccggggagggactgacgaaggaaggcgcccaacgccgcccccgcgggcccgcacccccgccccgggccgtggccgccgcgctccagcccgctccgctccggcccgcgcggccaccgcagcgcgcgaggggcggcagcccaggggctcagagacgcggagacagcccgagacactgcgggccagagacggggccctggactgggagaggggcgcacagactattagacagcgctggagagagacgctcctagggccagaacgccgaggtggagggagagagagagaaattcagaggagaccagagacccagagcccggctccggctccgggagagacggacagagggagcggagagaggaaggaggacagggatccaagggaggcccccacgaagtcaagaggaaagtcgctctgggatcagagacaagagagggaccccctccatcagcccccgctccaggggttctggatcatttatggcgtctgacctaacctcaaaagagaaaggattcccgtgattttaaccctcaagggataagtaaaacacttgcacatccacctggggttctaggctggagcaggctttgtggaccccagcggcctggtggtgagcagtacccgccttccacttcctaaatcgggatgcagagattctagtggacaggccttgtggtccggggagatatgggttatgacttctgtttaggggcagcagggatccacagtccagccccaaaagagagcaggagatggccaattgtatttggcggtgcctgagaggtaacaaccctccactgagagggtgccctgcctcccccaggaattggtaaggctgaagcccagttaccatctgtagagccaggcacccaacccaccctgtcccactccacttaacagggaaaaggtcaactggagaattccatccatggtccaggctccagggtcctgcaagctcctctatggaaacagggcacacatggggttagatgggggctctcagtccagtgccttctctggggctttgactccattcacaagattcctgctaagcagtcctccagctcctggttggttacctccaaggacaggaagctcagtatcttaagtgagagttcttccttttattaattttttttttttttttttggctagtgctggccttaagaatgttcttactcgtttgagctgaaatctacaacccgcatgtcccatccatgagttctgctctgccttccgacacctcacccaacaaaaccagggcttcccaaggccttctacccaaactccctagtatggattcacccagggagaacaaccatccacgtttgccagagctcacctcccaggaaacccat

SEQ ID NO: 30225 - DNA, 863 bp, Artificial sequence
  DNA replication origin
aggagaatgagaaaggaggaggaagaggaggagaaggaggacaatgagaaggaggaggagaaggaggaggaggaagaggaggagaagagagagaatgagaaggaggataatgagaggaggaggaagaggaggaggggaggaggaggaggaggaggactacgaggaagaggagaaggaggaggaagaggagaaggagaaggaagagaatgaggaggaggaagaggaggaggaggaagaggaggaggaagaggaggagaaggaagaggaggaggaggacgaggagaagagtagttctggatggaagggcatgttccactcagtgttctggatgctgggtggaattgggggcatcctggggcaaggaggagacggtgacaagaaaccagctactctcagaacaattctgtaagactccaaggaagagcaactgtgtctgggactacttttatgattaggggtggttcccatggcagtggacagcaaccatgacactttaaagcataggaaccagaaaggagggggtgaagaagggtacataggctgggaaatacatcaggaaggggtgcttccagtggtccaggtgagacatagtgatgtgatattggccagggagtgagactcaaggacaaaaggggctgtggaaatttacaagtgggagtgaacactcctagctggatgtttgtgtttggcctgggaggatggccccacttgcttgtccatgttcatgtcatcctcttggctttggcccatggttccagtttgtcaaggccatggtgattgggtttggcccgtggtcccagcttgtcaaggccatggtgaacagccgtgcatctgtccagtctgcatgagcagcgtccttctta

SEQ ID NO: 30226 - DNA, 1082 bp, Artificial sequence
  DNA replication origin
atgacggctcaggcatatggggaaggagactggccactgaggggcccacagctgccagggttcctggacctgtggagggggagacaggctctgaaggtgtctcaggcctgtggagaaggagacacggtggagccattcccgaggccgggagggtgcctctgcctctgggggtgcttgcagctgtaggagctcccatggcagggcgtgcgcctgctgcggtgtgggtgactgggtcctcaggagcagaagcggacgtgggtgtctcaggtctgaccgtgctgaggagacagtccacagggggagtgggggcttcagaggatgagacaggaggtgggaatattttgggactggccgggggcagccaggctgtggggacatctcacacctgtgtgcctggggccaggttatggagctgtccaaggtctttgggggaagaaacagcctatgagaatgctctaggcatgtcagggacaagaacagctgtgggggtaccctcagtttcaagggaggaaataggccttggccatttcagagaccacctacagccaagtgggaggaggctggctggaggagtgtctgcagtcagagtgagagggagcaatttgggagagagttatgtgggggaggctagattgaggggggcgttccagtagtgtgtgtagggaagaagttggggctgtgtgggagggaacaggttcggggtaggtttgtcatgggttgcggatgaaggcactggctgtaagggcatctcagcatgggggagagagggttttcgtggagatgccccagggtatgtagagggacaaattgggacgtttcctggagcagtgggaaagggccagattgcaaggagagtcccagaactttgtacagggggacagtttaggggtgggtgtccctggactttgtgcgtgtgtgtgtatgtgtgtgtgtagcatcacttgaggcatgctggaactgtggggatcacctagtttttttctagtggagaatggactatttggcccttggcacctagaagcagccaggagggaagtactgaccatttaaaagtggcagatctccgggccccatttctgcag

SEQ ID NO: 30227 - DNA, 1873 bp, Artificial sequence
  DNA replication origin
acccagggccttggggaaggacacgggctgtgtgagtgtcccagggctgtggggagcgggacagatggtaagggtgccccaggctgtggtggtacctggagccctgggagaagagctgagccacagcgggggcctgggcctgtgggacggacagcaagctcttggggggcccccagccgaggcagtgcctgggcttggagaggagacctgtagtgggaatgttctgagcccgtgggaaaggaggcaggctgtgggggagccagagagtctggggcctccagctttaggggtccctgggtcagtggatcaggaggctggctgtggagatgttgcatgtcagtgtgggaggaggcaggctgtgggggtgtctgagacggtgggcatacccagggcagcagatgtgccccggcaggggtgtgccgcagcaggggtcctcatggcaatgggtgtgcccggctctggaaaggtgcctgccagagtgcctgctgctgtgtgggcgtctggtcctgtgtgtcaggaaggcagctctagagacattttgaacctgtgggaaaggactcgggctgccagaatatctgtggcttcggggggacccgtggctcgggaggagctgtggtctggcggggaggaatccgtggcttcagggggacccgtggctcaggaggagctgtggtcaggcggggaggaatccgtggcttcagggggacacgtggctcgggagaagctgtggtctggcggggaggattgtggttctggggccttcccgggcccatgggggaggagacagactattggggttcctgtggtgcctgaggggcctgggcttgggggggagactgactctgggggtatcccaagaccctggggacagagacagagggtcagggctcctgtggccaccgaagtccttctggctcctagggtgcctggttctgtggagctggagcctggtgatggaggcttttcaggcttgtcagggaggcagcaaactgcaggaatgcctggcactgtggggctgtctgcagctagtggggtgcccgtggctcccagggtgcctaggcctgtgcaagaggaaactggctcagaattgtggggtgaaagagagacagtgggcggacctgcagatgccaagggtcccacaaggatggaggtgcccacctcgaccaggatgcctgggcccatggcggagaagactggctctgggggtgtctcaggtttgttgggaggcagacagactacaggagtgtccatggctgtggggctgctggggtctgtgggggaggggaccatctttgagcatgtctctggcctgtctggaagaaggcagactgctgggaggcctgtggctgctagaggttccatggccgtgggagtgcccacagctcccgggcttccagggccaatggtaggggatacgggctctggggatgacggctcaggcatatggggaaggagactggccactgaggggcccacagctgccagggttcctggacctgtggagggggagacaggctctgaaggtgtctcaggcctgtggagaaggagacacggtggagccattcccgaggccgggagggtgcctctgcctctgggggtgcttgcagctgtaggagctcccatggcagggcgtgcgcctgctgcggtgtgggtgactgggtcctcaggagcagaagcggacgtgggtgtctcaggtctgaccgtgctgaggagacagtccacagggggagtgggggcttcagaggatgagacaggaggtgggaatattttgggactggccgggggcagccaggctgtggggacatctcacacctgtgtgcctggggccaggttatggagctgtccaaggtctttgggggaagaaacagcctat

SEQ ID NO: 30228 - DNA, 1208 bp, Artificial sequence
  DNA replication origin
ggagaggagatctgactcggaaagcctttgttgctttgtccccccagttaccttttctgccgtctaggctttacgggggcctgggactgggggcgggttcccgagactgggcgggggtgggatgggtgaggggctcggagggagaaaggctgcaaggccggagcggagtgtgtgagtgcgtgtgtggagcagcttagggagcgaggtgctaagacatcccccagggccgcggtagggaggaagggaactgccctggagctatgagccgggagactcgccgtggggccttgcccaggctgcgccggggagagcaggcggctaagatgccgggtcgctgcgtggggcccagcaggtcggggcggggggttcggcggccgtgggggaagagacggggcgcagggacgtcccgaggccgtggagcaaggcgccgggcgaagccctcggagtgggagacgcgctgtgtgagtgcagaaaggccacagggccgtcagcggccatgggggacgagacaagcggcggagacagccgacgccgccggggcgaatgaggctttgggagctcctgggaccccaggctccatcgaggctgcaagggaccctggggctgtgtgggtgaacggggctgtgggggagcccgaggtggtggggcttgccggggctgtgtgggtgaccgggtctggggaggaggagaccgaagatagaagtccccggggctgcgagagaaaaggtcgcccgggatctctgggccatgagagcattctgcacctgtggctgaaggtgcaggctatgagggccgcctcgggatgtggggaaggaagtagagtcgagctccatcccgtgcctgcaggagagggacctgtcgaaaggggtgttcctggccgagcttcctgggtagagacaagccgcggcggtcttacagggccctgggtgaaggaacaggcaagggggatccctcgggccccctcagggcccacagctctgggcttaggggcagcttacgagagagccttaggcttctgtggacagggacaggctgggagggtgcctcctgcgagtgtgcctggggctttggcgtcaagttctgaaatggccccgcacctgtggaggggagaagctgtgggggttcctgagactggggaggagataggctatgggtttgtctcaggcccttgtgaaaaagaacagactatgggcgagcctgggaccgtg

SEQ ID NO: 30229 - DNA, 830 bp, Artificial sequence
  DNA replication origin
tcatagcgggccattggcacgacgtgcagccgctactggaggagtgcacgtccggtcgccgcggttgggtcccgcgtaggcggggcgaggctgtttccgggtgggcaagagagggcggagcctgcggaagccagcgccgctaaagactacgggagcctctgacgaccacaatccatccgcatggctttttgctctagttcctcagatctttctgcgctagctgcactcccaagcccaggcttagatctaccctaatctagtcccagccccgacctcatggacactggctgcaaaacttaccgccttgcaacacctggatccttaaatagttcagggcctcaaaggctcccaagccgccctgcgcctgttgctatggcgactgggcaggcggccggaagcgcggccttgttgggggcccccgttgcccgcctcccagtagccgcgcctcaccctaggccaggtgggctcgggccggggctgggggggattctgggaagccgcatagagtcatggacttgggggagaggagatctgactcggaaagcctttgttgctttgtccccccagttaccttttctgccgtctaggctttacgggggcctgggactgggggcgggttcccgagactgggcgggggtgggatgggtgaggggctcggagggagaaaggctgcaaggccggagcggagtgtgtgagtgcgtgtgtggagcagcttagggagcgaggtgctaagacatcccccagggccgcggtagggaggaagggaactgccctggagctatgagccgggagactcgccgtggggccttgcccaggctgcgccggggaga

SEQ ID NO: 30230 - DNA, 1205 bp, Artificial sequence
  DNA replication origin
agcccagcgcttggcacagtcagtgaccacagggaggagaaagtgaaggcaggagcgcaccttcccacctgccgtccccgtcccctcagaaccgagtcctggggccacctgctcggcgcggtccctctctctctggctcagtccccccaccccgatacgtctcctcctctcagaggctccgaggaagggcgtgggcgctggagggagcagggctcagccgggtgcccctcccgccaggccccaccggggctgagcctcttctgtcgcccgcaggagacagaactcaaggtggaagtaccggagtacctggggccgctgatgtttgtgaaactgcgcaaacgtcacttccttcaggttctgcagctggatctccgtgtagggccccggagccggggacgaggtcaggttcccttgttaccgctgggtggaggtcgacggcgtcctgagcctgcctgaaggcaccagtaagcgcggggctgggggtgtcaggaggcctctggggtgcgagagaagctggggggatgcgcgtgtggagaagagggcgcaggatgggggtgctggaacctggagcgcagggctctttgggagtgtcgaaggggctgtggctgcagctggcacaaagtggctggagcctgggggaggggcgtgatgctgaagaggcaggggtcacacagaaggacggagtgatgaggctctcctggcaggggcgagaagaggcgctcaccaaaagtcactggccaagccctcctctggccttctaggccgtactgtgggcgacgaccctcgaggcctgttccagaaacaccaggaagaggagctggaagagagaaggaagttgtaccggtgagccctcctcccctgaccccacgtgagctgctgatgcttccagcacccacgcctgatttccttcctgccctacaggtggggaaacttgaaggatgggttaattctgaatgtggctggggcaaaactatgtgacctccctgtggatgagcaatttctggaagacaagagtgttgactttaaggtttcgctggccaaagggtgagagcaaggggaggctgggtgagagggaggtgtcctggtctagtggaagccaaggggcttatgggctgcactgcactgcactggaccggctcaaggtcggtgcctgtggctgtcatgttggagtctcagaatgatgctcaaaccctttgccccattct

SEQ ID NO: 30231 - DNA, 1038 bp, Artificial sequence
  DNA replication origin
ccattttagtaggcgctatagagaaatagaaaaggttgaccaggcgtggtggctcatacctgtaatcccagcactttgggaggccaaggtgggcggatcacgaggtcagaagttcgagaccagtctggccaatatggtgaaaccctgtctctactaaaaatacaaaaaattagcctgatatggtggtgtgcacctgtaatcccagctactcaggaggctgaggcaggagaatcgcatgaatccgggaggcggaggttgcagcgagcgagatcacgccattgcacgccagcccaagcaactgtgcgagactccatctcaaaacaacaacaacaacaaaaatgaaactaattaatccagaacaagattcccagcctgtgagaggttggtgctcaggacggaggcctgggcgagagagacatccgcagtcaggcagcggttgccatgtgagcgccggggcagtgtgcaaagtgagaagctaaggcggaggaaagaattctggggaccactgacatttgccgggtgtggggggagggggagagagagttcaggcttacggagaacaacagaggaaaaagttttgatgaggagggaattgtccccagagccaaatgctacggaaaggtcagagaaattgggggtcgagaagaagccattggattgggaaggggaaacagcacgaagttacattgggaaggacagatttggtgaggttgcagtgcaagggcagggaaaaacgatcaggacggggacgtgtgagcagcgagggtagagagctctttgaagagcctgggaaataaaatgaataatggcttagggtgtgcaggggtgggcaagaggcagagaaatgggagtccagttagggcagggggagatgagacatttttgttgacctaggcaagggaccaggaggagagggaaaagctaaagacttcaaggaggaagatgtaacccagggacttcccactgcttccttcccaccccctcaaactcgggctacctgggaccccccaggcttcctgtctgacgccaagctaaatg

SEQ ID NO: 30232 - DNA, 768 bp, Artificial sequence
  DNA replication origin
ccccaaaaggaagctgcagaatgagaggcaggcagaggagaggaaagaagaaaatcacagaggtggggatgtctttgcatccgtgtgtctccagtgcccaaaacagggcctcgcggagaagaggtgctcggcacctgtctgttgcctggcgggctgaatgaatacatgggcgactgtctcagtgtcgccttagttgtgtcccttcctctctagagctccgtttccctctgacctgggtcgggcgggcagctgcggctgctgaggctcggtggggcccctccaagacgcgtgtccgcatctgcccgccgggcgtctgcggggtgcagcgtccactggagcgcgacagcccctgggacagaggaggacagtggcctcgcttccctgtgcgatcgcccaggagctccgggccggagagtgcgagcggggaaaaggggtcctgcacctagagtggggcggacgtggcgaggaagccaggggggaccgggaagcgaggcccgcggtgcggagggcgcggggcgtggggggacacctctcggagagacaccggaggggcggaagtaaggagatggaaaggagagggagatcggggagatagacctgagagacccagaggcctgcagagagtttcatccgggacccttcagagcccaggaaagagcagatgcggacgcgggagggcgccttacgccaaagcgggcagcaccagtgaccaaaacacgccccgcttggcagccccgggacgcacctctgcctcggcagcgcaggaga

SEQ ID NO: 30233 - DNA, 953 bp, Artificial sequence
  DNA replication origin
cactggtgctgcccgctttggcgtaaggcgccctcccgcgtccgcatctgctctttcctgggctctgaagggtcccggatgaaactctctgcaggcctctgggtctctcaggtctatctccccgatctccctctcctttccatctccttacttccgcccctccggtgtctctccgagaggtgtccccccacgccccgcgccctccgcaccgcgggcctcgcttcccggtcccccctggcttcctcgccacgtccgccccactctaggtgcaggaccccttttccccgctcgcactctccggcccggagctcctgggcgatcgcacagggaagcgaggccactgtcctcctctgtcccaggggctgtcgcgctccagtggacgctgcaccccgcagacgcccggcgggcagatgcggacacgcgtcttggaggggccccaccgagcctcagcagccgcagctgcccgcccgacccaggtcagagggaaacggagctctagagaggaagggacacaactaaggcgacactgagacagtcgcccatgtattcattcagcccgccaggcaacagacaggtgccgagcacctcttctccgcgaggccctgttttgggcactggagacacacggatgcaaagacatccccacctctgtgattttcttctttcctctcctctgcctgcctctcattctgcagcttccttttggggagtctcatccatgctggtggcctaaccacagccggctccttagtgattaccatcctctgccttcaacccagccatgatgccagagtcccagatgtccagccttccgcagactggacgtgtctcggcccgaaaattcaacacatcctgaatcaagctcatgagttccttcctgtgacctgcacccaaggacatgcattctcccaagcccctcctgcaattgcctccctcctgtccttttccctttg

SEQ ID NO: 30234 - DNA, 1593 bp, Artificial sequence
  DNA replication origin
ctgtcaccccaaaagctccccatgcccctttgtaattcctccctcctgctccttcccatgccctgccccagcaatgtaagagctctgtagatcatccttattcttattagatgctgcctcactgttctgacttttggacccacacagggagtgtggggcaggtggtgtcatcatcatcacatgttcagtgcttaaggcctctggagatctagccctgggtatgaaatacagctccatgttttataatatgaaaataagtctatttttctatccccacaccttgaccctgtagtaaaagacatgtagtctctgccaacttcaccctccatgaggcttactgcctgcggttcctggtcctgtgtccggagtgtgaggagcctgtccccaaggaaaccatggaggagcactgcaagcttgagcaccagcaggtgaggaggcggcagggaggatggggtctgagagtcaaggtgagtgttcagtcctccctgcaggtgagatggggtctgagagttgggggacgagggtctagtcctccctgcaggtgagatggggtctgggagtcaaggcaagtgttcagtcctctctgcaggagagatggggtctgagagtcaaggcgagtgttcagtcctctctgcaggtgagatggggtctgagagtcaaggcaagtgttcagtcctctctgcaggtgagatggggtctgggagtcaaggcgagtgttcagtcctctctgcaggacagatggggtctgagagtcaaggcgagtgttcagtcctctctgcaggtgagatggggtctgggagtcaaggcgagtgttcagtcctccctgcaggtgagatggggtctgggaggggcaagtgttccatcttccctgcaggagagatggggtctgggagtcacagagtgggtccagtcctccctgcaggagagatggggtctgagagttgggggacgagggtctagtcctccctgcaggtgagatggggtctgggagtcaaggagagtgttcagtcctccctgcaggtgagatggggtctgggaggggcaagtgttccatcttccctgcaggagagatgggatctgggagtcacagagtgggtccagtcctccctgcaggagagatggggtctgagagttgggggacgagggtccagtcctccctgcaggtgagatggggtctgggaggggcaagtgttccatcctccctgcaagaaagaaggggtctgggagtcagggaatggctccagtcctccctgcaggagagatggggtccgggagttggggtgagggctggggacttaaggcaagggtccagtcccccaggcagagactcacttgagggccatgggaagtcatttagcccctccacacaaagcccatggaaaggaaatgttaatcctgcctttttcatgctaatctgagtctacctccagttttcctatttccaatcctttccctacaggcttatggatctggcataggcaagaggttctggtttcaggaaagactggctgttctcttgagatctgtaaagagaggatgtgaaaaaggaaggtcctggaaggcagtcagatggagccctgtttcccgcctttc

SEQ ID NO: 30235 - DNA, 1252 bp, Artificial sequence
  DNA replication origin
agaagacattttggctttttgagttgccaaagttcttgagctggttgattctcatttgtgtgggctgatgttcctttgatctttgaagttgctttcctttgcatggggttttttgagtttatattcttcgatgcccttgagggtttgagtgtggtacaacatgggttcagtcaactgtctttgtttaaagtatttcagggggccaagcctcagtttatcactcctggtctgcatgttctaaccctggggggctagtattgggctctagctttgttctctggcccttcgaggttagaaacttgctgcaataagaggggctaaggtgttcctggctcactggccataacactctgctggttgggtgctggccaaagtgctttgttgtggcagtggcagtgggatccgtgcttacatgtgtgtgccagcagccacagcagcacagtagggtgcctgcacatcagcagtggcagggcaccagtgggggtggggtggcagcattcatgcatgcactagcgctggtggtgatggcatggtgggatatgcatgcgtcagtgggaaccaggcactagtgggggtggggtggtggtgtctatatgcgtgcttgtgctggtggtgatggggtagcagggtgtgcacacatgtgctggcaggggaggggaggtgagatctgcccacactcatactgacaaagctgtgagcatgggctgtgggtgactgtgtgctggaaaagtggtgggaggaggctgcagtggggagaggctgcaaggtggttgattgcacaacagtggaaactggcctgctggagccagagttaggcatggtgagcaggtgaaggaattattatgacggcccttggaagcaccctggtttggcatctgagtctgtgctgcaagcagatgcagcagggctggagccccaggagaggctggtaaacaggggcacactcagatcaaactggtcccattccatgggcaagacctcccttctctgtctaggtctggcagccaccaaaggccaaagccacctagaggagctttcttccagcttcagttcagggtctgcgtcttccctctgtccactctcaatgccttccctctgaaggtctgcttggagtatggcagtcttccctatggtctggtgtctcagtgagtgatgctcttcctggctgcatctagtcagccatcattggctcctctctaaatttgcatttaatgtctgggaaaaaataggctgttaatctttgaggcataat

SEQ ID NO: 30236 - DNA, 1646 bp, Artificial sequence
  DNA replication origin
ggggcgggaaagggagatggggttgagcccagcccgggatcccagctgcggaccctgtccctaatcttgcccacctcgtcccagcttcgtggaagtcccagtccgcgaggtcgcgctgtcacctcgcccccagcctcccgccctcccgccgcgagcccagctcggcccgggcctgggcccggggtccccgctgccctagctcccctcgctccccgcgctgacctcgccccgcgcgggccgcagctgcagctccagctccgcctccccgcgcgtcccgaccagccaaagctgcacgcggttgtacgacccggagaagagccaggccccggtggccacgcggatgcggtagcggcccatggcgccccccagcagcttaggcgaggggagccgggtcctgtgcgattcccgggaccgcccagggctgccggcgcctcggggccacttccaacctttaaaggaccggtctgcggccccgccctcctcgcaagttttaggcgctcccaagtccccgccccagactagcccaaacctgcgagcagagcggtagagccggctgtggggactggctgtgcctcctggtcggagcgtagctgcaggatgataaaggggcccgagccagggtgaggccaacggggtgggtgcggcgggaccttcctggacctcccgggaaggcgggatcgaggtgggcctgagcccccgggttggagcgaacatagatgagaacacttcccgaggtctccaggtcttctggggagccaggaggaagtaggggatgagtccatcttccaaacggaggggaaggtctccgcttttctgggctgggacccggggaaggcagtgggccggcttctggaaggtcggcctgggaggccgtgctggggtctggggatgtcccgcggctagacccggcgcggcccatgtgtcctccagtacctgagctctgccgcccttgaacgctgtgcttccgtcaacgaccaggggttccccagggtacctagaacctggaaatgtagcagctcaacacccgctccccaccccgtttcaaatatctgggcgctggggtcccaatgtacaccaaatatcatgggccagacctttgagagaggcctgaggcagggcagtgaaaaactcattttgtccaacctccgaagcgggtacagacaatgttagggacccaggaacaccagtcggggtgttagggtgcgggatggaattgcttagggacctggcctacgtggccagttcccaagaactttgtcttttccaggtgagtgcagccccttccgctccagtaggttccagattaattttttatccccaagctctttcctgctccttcatgggtctcaggtctcctggaaatccaggaacagcaattagcccactgctatttagggcctttgtaaacattgaaggatgattcggagcttaggctttctctcccgtgtcaggaatcagtcagatgaagcctgctgcacgcgtccctgtctagatcttgattcaagtgattatatgcatttggatctccgtggatgcatctggtggcctgggctaggccagtgtaagttaaatctgctttcttgagccagtcctcagaaatgacttggtggcctagttgttggtagaggtaagtgagtgggagtttt

SEQ ID NO: 30237 - DNA, 1799 bp, Artificial sequence
  DNA replication origin
cgcacccaccccgttggcctcaccctggctcgggcccctttatcatcctgcagctacgctccgaccaggaggcacagccagtccccacagccggctctaccgctctgctcgcaggtttgggctagtctggggcggggacttgggagcgcctaaaacttgcgaggagggcggggccgcagaccggtcctttaaaggttggaagtggccccgaggcgccggcagccctgggcggtcccgggaatcgcacaggacccggctcccctcgcctaagctgctggggggcgccatgggccgctaccgcatccgcgtggccaccggggcctggctcttctccgggtcgtacaaccgcgtgcagctttggctggtcgggacgcgcggggaggcggagctggagctgcagctgcggcccgcgcggggcgaggtcagcgcggggagcgaggggagctagggcagcggggaccccgggcccaggcccgggccgagctgggctcgcggcgggagggcgggaggctgggggcgaggtgacagcgcgacctcgcggactgggacttccacgaagctgggacgaggtgggcaagattagggacagggtccgcagctgggatcccgggctgggctcaaccccatctccctttcccgcccctggtcccggcagcccccagctccttctcccagtgacccagagccaatgtaagtatgaggccagaggtcagacgtgaagctcctccaagaaccggcgcggggagagctcagttaatgggacccacgtgggcgatgctgctccagcatcagctccaggcgctgcgggccctcgtcctccacccgactccgggcgtctgagacccaaagagcaggttgtgcgggggcgggaacgaggcgatgctgtctttggaggccctgagaaactgaggttgcacaggagcgcggctctgtcctcgaaacggcctcagtcgggtccctcctactaagtctggcctgggtccggcctgcacaggaggaggagtttgatcatgacgttgcagaggacttggggctcctgcagttcgtgaggctgcgcaagcaccactggctggtggacgacgcgtggttctgcgaccgcatcacggtgcagggccctggagcctgcgcggaggtggccttcccgtgctaccgctgggtgcagggcgaggacatcctgagcctgcccgagggcaccggtgagcaggcggcgtcggggaaggaggcacaaggtctcgggaactgctgcggggctaggagggcagagttaaggacggtcggagcagacttagaggatgtatgggcccagggcaggtgaaatgtagggatcccagggtgctggacagaaaacgggaaggagttatgaattcccaaagttttacacaggctaagagaggctgcgtgtgaggctggaggcagggagtaagtgatctggagatcccatcttccaagaaggcaaagacagaaagtgggagttgcagcgatccaggaaaacagagaagcaaagtgaaagtaggaaggagatgtaaaggtgactcagaagtcaggtgaggggaccacatggaacaggagggggtgggtgacccgtgagagcagacagctaagggaagaaaacataggatgctggagagctggtttggttggaataacacggaagacacccgtgaaagacaagaagcacactggcccgcaggagacgaggaggaatgaggatggcaaatagtgaattttttttttttttttttttgagatggagtcttgctttgttgcccaggctggagtgcagtggtgcgatcttggct

SEQ ID NO: 30238 - DNA, 1234 bp, Artificial sequence
  DNA replication origin
gtagctgggattacaggcgcccgccaccatgcccagctaatttttatatttttagtagagatggggtttcactgtgttggccagactggtctcgaactcctgacctcatgatccacccacctcagcctcccaaagtgctgtatacccatgtcttaatatctgaaaatcccacatttgccccactttatggaagatgtgttggttctccagccctgtttccccctctaagacctgtgatctcctgtcccaggcagtgagcacaggtggagggggccatgtacagttgctccgtcgggcggcagctcagctgacctactgctccctctgtcctcctgacgacctggctgaccggggcctgctgggactcccaggtgctctctatgcccatgatgctttacggctctgggagatcattgccaggtgagtaaggaggagctgagaaatggtggggccggggggggggggggctctggcctgaggccagcatggggcaaaagcaagaaggtccagaaaggagaagcagagaactcaatcctggggagagatgaggaaaagtgaggacacagtgggtggctctgaaaatgaggagactgggatgaggcagagagaggaggtgaggggagctgtggggggagactgggggaggtgtctggaaaaatcaggattttctgacgatgtatgacagcaaccatgcgaattcctagaactaaggacccacatcttccatgagatgctagtgtgtttagagggctgaggatgtcccaaaggcgaggtgtcttcccagatactgtggaagcattgggcagatgccacagaaagaggaatagaggtcagaggcgggggctttctgccctcaagtgccttttccccctgggcaggtatgtggaggggatcgtccacctcttctaccaaagggatgacatagtgaagggggaccctgagctgcaggcctggtgtcgggagatcacggaggtggggctgtgccaggcccaggaccgaggtaagatccattctagagacagaagaagctcctgggagactctgccagggcgccttcccagccctgcccttctggggacaggaccccagcctctcatcacgcctcccttcctccctccacacgggaaagcatgtgtatcccattcccacctcctccgactcaggacaattctagagacccaaggactgtcctcctcagagaccctggccatcaacccctagtcccactacaccc

SEQ ID NO: 30239 - DNA, 1481 bp, Artificial sequence
  DNA replication origin
tgtgctagagagggtccgtgtctgtgaccgagtccaagcgcccgctctcagcgtccacgtcccagtccgggctcacgtaccccgcaggagaagagtcggccacgggatgcagctgcatcgtcagctccccgagcttcgtgaaggcggcgccggccgccgagaagatctctccgacctgggggcggggcagcgtcacggggggccggcgcccgccctccccgtcccgcccggagcccctagccccaccccaggctcggctcccgcccgccccccgcccggggcggaagagccgcgagccaagtggggggcccgccctcccgtggccgccagggagcgctgtccgcgagggaggtcgaacctttgtggacgctgacgtcatggccccgcgcgcctcctcacggagacgccgccgccgccgctacacgcgagccgggaccacggagagcagggagactgagcggctcgggcccccgcgcaggaagtcccgccctccccgcagcggataggctcaacccggcggctccccgccccatcagacgcagtcgcttagaccgctcggcgcgcccagtcgatggggaaagccttcgcctcacttccgcgccacacttcgctccacttccgctcagacatcgggactttccaggcagaggccgacctctagtctcagccccgtgctcgcccccactcaagcacagacacagggctgaagagagcagattctctttattgagatacgggacacagcgaagggtggagaaacggaacagccccccagcctcagccctctccacgggggccggatgccagagatgggagaagggattcagtctctcgcccgggaaacccagtcccgcagagggcgccggcaagggtgggacgcgacctgggtgacacggtgcagggagtctttaaatagaggaggggctggagcggggaaacgcgccggggccctagcgcaccatgtattccttgcgcttattgagccgaacttggcagaaagagaagcctccgaggaggaggtaaaggcctgcagcgatgaaacagttgtagctgacttgctcgtaaaggttgtatatgttctgggggccattcctgggggtgggaatgaagcaaaggggtcaaactttaataggagccaacattttctgagcactatgtgcccgacacctgtttaggcgctgttacgtgtattactttattcaatcttcttgaccatcctatggggtgagatctgtcatagccattttgcagaggtggactgagaagcacagaaaagtaaaatacctaaagaggtcacacctaaggtggtgggtttgggatggccgctgaggtctgactccctggctcctaaccacattctcaagaaagccgctctcctctccaagtcctctaacctaggggccctaagcaccgggcctcccagacgtaattctgaccctaggcctcgccacctcccacctgctcccagcccgcctccccca

SEQ ID NO: 30240 - DNA, 1011 bp, Artificial sequence
  DNA replication origin
ccgagcggtctaagcgactgcgtctgatggggcggggagccgccgggttgagcctatccgctgcggggagggcgggacttcctgcgcgggggcccgagccgctcagtctccctgctctccgtggtcccggctcgcgtgtagcggcggcggcggcgtctccgtgaggaggcgcgcggggccatgacgtcagcgtccacaaaggttcgacctccctcgcggacagcgctccctggcggccacgggagggcgggccccccacttggctcgcggctcttccgccccgggcggggggcgggcgggagccgagcctggggtggggctaggggctccgggcgggacggggagggcgggcgccggccccccgtgacgctgccccgcccccaggtcggagagatcttctcggcggccggcgccgccttcacgaagctcggggagctgacgatgcagctgcatcccgtggccgactcttctcctgcggggtacgtgagcccggactgggacgtggacgctgagagcgggcgcttggactcggtcacagacacggaccctctctagcacagggacagacattagtttccctttgtgcgtggcacagcacagagtcggtgttaataaatgatcgttgggtgagggaatgaatgacagataaaaatacagacaggcccatagcccagactcctgtttcacagttctccctgctgcgaacgggtcgaccacaaaccaccgccactcccaaccaccccagttcatggaattcccccagacggctgcaggctgtgttggtgggtctgttttgaaaagcccttcctggcgagttggtttcagtgtgctgtgtacagcagccgtttaacgttgatggtggaaaggggtgtctaaggtggaggtggttgtgatttcttgtgattggggtcctcccggttcccgcagggcctcaagagctttccgcctccccttacggaggacctctttatgcatccgtggaaggggtcccagaaatcggaaggaggcggc

SEQ ID NO: 30241 - DNA, 1119 bp, Artificial sequence
  DNA replication origin
cggtctggaagccaggtgtcctggaccctagcccccgagcggtggggggggcctggagagacggggaggaggaaggagggagtgacttccaaaattggcatcgggacagagcagggctggcgggaggcaggcaaaagacggaattttcctgaaaaaacgggggtatctgaggaccccaaatttggggagctagtccaggaccgtcctcccaacatcctagatttttttgggattttttggggaccccgggacccctctagatggggtgaggaatgtagtgttgggtgaatctgactggggcattgcagctgcctctcccgccgagttggagacggatgggctgggacgggttttgggggggtgtccccaattctgactgggagtggaggaacccctcctgagatctcttgtgggggtgccccctccccagggcactccccagtccctgagccagccgagaggaaggaggccagcgatgcgactggggcggctcctttctcctgcaccccaaatgtgagggatgcaccctaaattttgctcttttcaaaataggggaccaggatctcaggggagagtagctgaggtaagtggggagggaagtgtcctctgttttcaggagagacgtggcggttgggggggaggtttggaggtgcgtgctggggtggggttggctttgtcagtcttggaattggggggatgattggagaggctttctcttatacccctaaactgcagccccccagacggaaaccaaaggctgagaccagagagccccccaacatccccagccgttaggatagtgtttaatttctctttcaccccccacaaaggctctgccgaggtaggagctgggggcaactgttagtttgggggctatggagggtggtggaggagcaggaggccttggcaagatttgatggagggcagataggggtgtccgggaggggtctggcatcttcgggggcctaaaaagactgcttacatacaccaccttggatctttcagattgctaagagttttggggggtgtgtcggaagagggggtggtaaaagatgcgatgggatataggaagataacttctggattttagggggtcatattttgatttgcaaaaggagt

SEQ ID NO: 30242 - DNA, 1439 bp, Artificial sequence
  DNA replication origin
cggagagggcggatatgatttctagttggtttccttccattgtcctgcgaccggacggctccgccagctgcttcccctcgaggaggtggggaaagccccgaggtgggggtggaggggcgagagacgctcgggagacctaggcgtccggcctctctcgctcccgactctcttctgggtccttgtagggatccagagagatggactcccgcccaaagcccgcttgctttcccccaatcccagctcacgagggcctcgggcacccgcccgtcggctacgcttggaggctggcgggacgccggggtccagcgcggcaagtaggcaaggctcggcaatgtgcggctccttccacgagggggcggccgagcactggcctcgcctcgcccctcgtctccacccggcctggggtgcgctcagacccgggcgcaggatccatttggtctgggcggctgaaacctttagcctcctcccctttgcgcgggtttattttgcacctctgtctcctaggaggggactagggctgggcggagggagctagagttaggagaccgaggggactttcccctcaggctggggttcctacccgaggtgagaaatcgcgggctttaggagccaggggaatgggtgggacaagaagcgggacctgagcctgggaactccgggttttcttttcgaattaagctagacactgctacccagatgtctttggaggtgacttttaattgaacattaaaattgggtggggtaaacgagaagggaaaacaaggaggagggagagagggcaggagggggcttaaccaccctaatttgaagtccctgatctgagagatgggcatggatcacaccctcatattttgtttcgggagacattgcgggcaggcaaggcaaagctcatttggagaaggggtgctagagctgaatccagctgcaaggcagaagctccccggatttgggctggggagagtgtacagttggccaggaatggccgaccatggtccacggggctggatatcaggcccggggccctccccttcagaccggagtgtgtctttatttgaatgcatgaaagaacagctgagaaaccgggaactgggaaattcaggacgatgaggtggctttgacatgtgagggttatttaggtctctgcccagcttggagatgagaattagactaggggctctccctttggcatcaggatggagtattatttgatcagttgtggggtgtctgtttattatggggtgttgatttgattgtgagcaccggtggctgcattcagcctttgaggcctatatggtaagtttcaggtatggggctgacttggaagttacattagttctgggggttctgacacccacaatttggagattgtgctcacctgtgtcatcttggactatcagcagaaccaaagtactcatgctgatttgggggtgcagtctatt

SEQ ID NO: 30243 - DNA, 610 bp, Artificial sequence
  DNA replication origin
gcggcttctcttcttaaggggggcggggtctctctcccctcttggcctcggctcctttatctggccgggatgtcgggggcgggggtggaggtggggtgaacgcctgggtctgtatccttccttcctccctcgctctccagatggcgagtccagggcggggtctccgtctcgagggcgggacctcagaaacaaggggtggtcgtaacgtagggggtcttgggtcactgcaagtggacacgaggacggggatattggaattggggaggaggttagggatatcgaggttggcaatacgggagtctgagtcgtcggaaggcctgggccagtgaaaattggtgtgttggcttttgggagggtttgccaggagccaacctttgctgcaggacaaagtgcatacggcaaccccctctccctctcttgtactgtgttaagggagaaaagggggagcccaacgagacagcaggtttgggcagacgacagtgggctcccgtagggtctcagacggggagggtgtggtgtgaatgacaggctactctacccgggcctacaaaaaggggggctctggccgggcggggtacggagagggcggatatgatttctagttggtttc

SEQ ID NO: 30244 - DNA, 1088 bp, Artificial sequence
  DNA replication origin
ctggcccgcgctggccgggccagagtctcccgggggcgtggttccgcgagctcggagctgagctagttcaagccggggccggatcggtcccggttcggtgttcggctgggagccagagggtggaactgagtttgggccccacccctggagcgcgccagtttccgtgtagatgatctattttatcactggggtgtccgggccgggccaccctggagctcgccaatgaggacgcggggctcccgggcaggggcggaacgagaagggcagggcgggatttaggcattgttggggaccagcagtgaatgggcgcatgcgtaaggaggggcgttaggaggctgactaggtagggccccacgtgacgcggggactgccaggaagcttccgtctcctcttcacctagcgggccaagtcatccccgtttcagcacccagagccacacggaagggttagtggtgggtaaactgggtctggagaggagaggactctcttgctttaatgaggggtccaggaattgcaaggccctgttgggggtaggggaggggttaggagatgagactcaaacgaagtgtttggcgcagcgcctgaagccactaacacgcagccctaggcacgcagacctagaagcctggatccctgagaagttcaacggctaagggaagagagaaggggaatgagttggactcctggcgttcatttctgtagtgggaactcgttcctgtcacttctgttcccactaacaggaaacctacaggtcacagagaccaaaaataactgaggagaggaagggcggctgtaagctcacacagggccccaccaacaccacctacctcttcctcactggggctggaaccttttcctctgccctctagtaacaaccacttcctaaccaccttttttgatctgatggtggggtagactaaagagacaaactatgaccctggccactggagcagtcagccccctcttacccaagtagtcctcaggcccctagcaaacactccccagtccttcccagtctccataacaccaatggcttggatttcctgttccttcattataagccatacttcccaggaccctgaccttga

SEQ ID NO: 30245 - DNA, 1434 bp, Artificial sequence
  DNA replication origin
gcggtgaagtctcctgtctcatcccttaggaagcctgaggagatgggtaagggcatttagaagcctcgaaccccaggggcagaggatagttgtaggcagatctgtgagctcaggtccttacctgacaggggagggcccaggagccccccgaggctcatcagcatcatcaccagccctgtggcctgcaccacacctccgacgcccaccagcccggggagtacaccgaaaaccagcggggcgtaactccccgcgctcagcccataggccacagccgcggccagcaggggacccccccagctctcttcgccgcccaccacgggcaccagccccaccacccacagccccagcccagtcagagccccgaatacggccagcagccgcgggaggggcacccagccttggtctgccagccacccgcagaccagccgggcgcccgcatcccccatcgcagccacggccaccaccagcgctgctccgtatccccccaggccccggtctaaagcgtggggagccaagtgcacgtaaggaacgaagtacccgcccccaaccagggctgtgcctagagcaaagattgagaaggcccggcgtgtgaacagactcaggccgagggcagctaggggactacgcggtggggctggggggtctccaggaaggaccaggggtagcagcagggcgccacagggggtgaggtggagggtgatcgcgccgaggaggagcagagcgccccgccagccgaaagtatcgagaagaagctgcaaggcgggcgccaggagcagcgaggaggccccgttgccggtgagcgccagccccaccgccaagactcgacggcgggagaagtaacgcgagagggtgcctagggcgggggcgaacaccagggcccaaccaaagcctgcgaatgaataggaggggatgggggccggcactggggacgcccgccccagcattcccagcccggctctccgcaccaggcccccgcctcgttcgctaccccagatcccaacaagctcctgtcacctccttcaccctgaatgacccgggcatcccacttccctcaccagcgaggaggcccaggccgaggtagagatgcagcagatcgctggcgaaagccgagaagacgaagcccagcgaggcgaggacgcccccaaccatcaccacggggcgggccccccagcgcgtgctcagggcgctgcccacggggcctgaaagggggcggagtcaacggaagacacgcccccgggcccccaaactctctccaacacttctcattggctgtttgcctccctcgaactaatggttcttctccttgacctcaagatgcactcttttctagagccggttgccctttctcaggttgtcgggtaatcaggtgggtctcccatccctccactcacggctcctcctccccgttcctgtctcccgcctcagggcccccct

SEQ ID NO: 30246 - DNA, 1054 bp, Artificial sequence
  DNA replication origin
cagggcgctgatccacgcagtgtcctgggcgcttcggtcaaagtgctcggcaaggtcagggaaggcaaggcccagcgagcgcagcagcccgtaggacagcccgtttatcgcgaaggctgcggccgccaccacccagccccagcccccatccgggggtccggcgggctggggggtcatcgccgtctgcggggtggggaaacatctgtgagagaagcctccacgcctgtgcttccgctggggagctggcatccctgagatccagcctctggctgctcgcccggggtgggcccgtcactccgagcgcgatggcgcggggcggagggagccggagcctggcctagggctggaactcccgggtccgcgcgaggtacggggacggggacagccagatccccaggcccgaggttccccgtcccacgcacactccttcccccttacccgacctctccgggcggtgcggggaggggaagggtgaggaagggctgggcccggctttctctctgcttcccaggcgggcgggggccccgaaggggagcgagggcagcgatggagcccaacttggacgggctctctcggtaaacagagatcaccacaggggcctgagccacctgggacgcggggtgtacggagggcgggggcgagctgaaacagccaatccggcaagccgcgcgtgaggccagacgccagtcccacggggattgaattatgtacacacacaacccccaggcccgggggaggggggagcggcgagaaatgaatgcagaggggccctgccctactcacacgcatgcacctgccgcctgctgcgcgcaggggagacacgtggattgcaaaccccagcgagcccagggtccaccgccaacgcgtggaaatagggatggtccccaaaacctgaggggatgagtagttttgttctcaggaacgttgccgaggaccaggtaaatctcggatatcaatcagatcacagacctccaccaagtgccagctctgtgcttagaataacagacccccaggccgggcgcggtgcaagcctgtaatcccagcactttgggag

SEQ ID NO: 30247 - DNA, 1714 bp, Artificial sequence
  DNA replication origin
gggacccctcatatcgctatcacgtgggtccccaggggtgtgaggggcctgtgtgactgaggacttgtgctggtccctgaagtcaaaggcctgggcatcccccaccccaaaatcctccttgtccaaccctcccctggagtcccctgtgcccagccctcctcactagacagctccctgggccctctccttctcccgtctccggtgtctggaccctcctcatcctgacactctctcctcttgcagggccacttcctctccagtccctcctgcagcgtctctgctctgggccctgccatctcctgctgtccctgggcctcggcctcctgctgctggtcatcatctgtgtggttggattccaaagtgagggtcacaggggtggacagggaagagagaaataatggggtagaagataaataatggggtgctacagtagggcagtggtggggcgatggtgaggtccacagtaggagcaatgcagggcacagtgttgggggcagctgtggagataacaatggggcatggtgagggcagtgctaccaacagtcatgggggtcacaacagagccactgaagcactgatggggcactgatggagtgattgatgggaatggaggagagggcactgatggagtgattgatggtaacggtaggggggcactgatggagtgattgatggggacggtggtgggggcacagacggagtgatttatgggaatggtggggggcattgatggagtgattgatgggaatggttgggggtcactgatggagtcattgatgggaatggtgggggggcactgatggagtgattgataggaacggtggggggtcactgatggggtgattgatgggaatggtggtgggggtcactgatggagtgattgttgggaatggtggggggcactgatgcagtgatcgatgggaatggtgatgggagcactgatggggtgactgatgggaatagtggggggcactgatggagtgattgatgagaacagtggtcggagcactgatggagtgattgatgggaatggtgatgggggcactgatggagtgattgatgggaatggtgggggggcactgatggagtgattgatggggacggtggtgggggtagtgatggagagagttgacggacccatagtcaggatggctgctggctttgtcactgagtagttgggttatgtactcaaattacttcacctctctgaggcttagtttcctcatcggcaatattgaacaataatagtgcctgccccactgggttgccgtgaggacccaataaggcaatgcttatggagggccctgctcggtgctggtacagaggacctgatgaatcccagcactgaccttcccatccacctgtttagattccaaatttcagagggacctggtgaccctgagaacagattttagcaacttcacctcaaacactgtggcggagatccaggcactgacttcccagggtgagtctggtttggatggggctctgggctggggccaggccagggaggaggaagttgacccctaagccaagtctccgtgtcctccaggcagcagcttggaagaaacgatagcatctctgaaagctgaggtggagggtttcaagcaggaacggcaggcaggtgagagaccctccgagtatgggtgtggggggctaggcgctcagacacagtggaggtgggaacagactcctggtgctgaactgccctccc

SEQ ID NO: 30248 - DNA, 1405 bp, Artificial sequence
  DNA replication origin
atagattagactggtgtccacgagacactgtgaagcggaacaggcactatgtaatgacataatattgcatctactcatgtacacaggaagggctctggcaggggacacaggaaagagttgactctggggagacggaggaggactgagaggacactcgtgtgcgtgcgtgtgtgtgtgtcatttaaaacatttttttactaatagaatgtattacttctgtactttaaaaatttaaaaatatggggccgggccccgtggctcatgcctataatcccagcactttggaaggcagaggcgggcggatcacccgaggtcaggagttcaagatcagcctggccaacatggcgaaacgctgtttctactaaaaatacaaaaattagctgggtgtggtggcgcatgcctgtaatcccagctactcgggaggctgaggcagaagaatcgcttgaacccgggaggtggaggttgcagtgagccaagaccgcaccattgcactccagcctgggcaacacagcaagactccaacttaaataaataatataaccgctgaatagtctttttaaggtcagtttcagaatgttcttggagcgggaagtttgcccactgtggagattgttggtgacaccctgtgttgaagatatgtctagatccgcttggggtcaaaaagacagagccacggtggtgagaaagtgacttacccatcctcctcctcgtcgtgaccattttccttgaaggctgagagtggagctggggtatgccctgcgacccggtctggggagaacccaaccgcagagaaagatgtttcctttgggagccctggtgtgtccggaattggtgggttcttggtctcactgacttcaagaatgaagccgcggaccctcgcggtgagtgttacagttcttaaaggcggcgtgtctggagtttgttccttctgatgttcagatgtcttcagagtttcttccttctggtaggttcatggtctcactggctcaggagtgaagctgcggaacttcgtggtgagtgttacagctcttaaggcagtgtggacccaaagagtgagcagcagcaagatttattgcaaagagcgaaagaacaaagcttccacagtgtggcaggggacccgagtgggttgccgctgctggctggggcagcctgcttttattctcttatctggcctgattggtgcgtttacaatccctgagctaggcacaaaggttctcgacttcccgaccagagtagctagatacagagtgtcaattggtgcattcacaaaccctgagctagacacagggtgctgattggtgtgtttacaaaccttgagctagatacagagtgccaattggtgcatttacaatcccttagctagacataaaggttcttcaagtccccaccagactcaggagccccg

SEQ ID NO: 30249 - DNA, 1798 bp, Artificial sequence
  DNA replication origin
cagactccacgtagctagatcataatggggccctgggcagtgggtccaagcttagaagctcccgggcctgacagatctcaggaaatgacagctacacatagaagcgagagctaccaggggccaatgtacttgagaggccagtgaaactgagatcttcagtgggtctggggtctggggggcagtaagagcagggaccagggtcgggatcccaggagttcgaggctgtgggcagaagacagggagagaaccggaacttgggtagagccataagctgggaatgaagggggacaccggcccagggctgtgaacaggggacagtggccactaactcaggtacaggattggctctctggctctgcaactccctgcaaaatgtggtcactgcagtgcccatcttagagagcttctgaggattaaatgagatcatctttgcacagacagcacgaagtctagcctagcaaatgtgcactgaacagtagctagagtgacggaagaaaaagctaggaagcagtcttgtcgggagctggtgcttcagcctgagggcagatcaggctggggaaggctgagaggggccacagttccatgcctgcatggagggaggagaaaggcacaagagactagaaatttcctgtttgcctgtgtttccagaaattcattgtacaacacacgaaccccttcaatacctggataggtctcacggacagtgatggctcttggaaatgggtggatggcacagactataggcacaactacaagtaagtggcctcttccctcatctccttgttagatttctctggggacagccccctggcctttcactccaagctaccctgactcgtccctcagggaccaaattccccaatcctctcctccccagactccaacccctccaaagctgtgctcttctgggctgggggtgagggttgctgggactgggcataggaaacatctttctctgcggttgggttctccccagactgggtagcagggcacaccccagctccactctcggccttcaaggaaaatggtcatgaagaggaggaggatgggtaagtcgctttctcaccaccgtggcagagtccgagttttctcttgcctccttaggaactgggctgtcactcagccagataattggcacgggcacgagctgggtggaagtgaagactgtgttgaagtccagccggatggccgctggaacgatgacttctgcctgcaggtgtaccgctgggtgtgtgagaaaaggcggaatgccaccggcgaggtggcctgaccccagcacacctctggctaacccataccccacacctgcccagctctggcttctctgttgaggattttgaggaaaggaagaaacactgagacaggggtatggggaagagctgagcaaagagagaaaggaggtagtttaagagtccctgaccctggaggactgagatcccacctccttctgtaattcattgtaattattataatcgtcagcctcttcaatggcgtaggaaagaagaaacaaatgcttgaatctctgtgtggcctggttattgggaactgagaaacagcatgcaaagaggagggagaggggagggcatggaagacgcaaggcgcgcatcctagacagctgctccttggtccctaatcccgagggacattggtcagggaaacgggaaaggggcttggagcagacaggcttagtggctggcactggtgggaaaggggtcggccgggctgtggctggagggtccgcctggctcccagtgagaggtgacagcgtgctggcagtcctcacagccctcgctcgctc

SEQ ID NO: 30250 - DNA, 952 bp, Artificial sequence
  DNA replication origin
ataggagggaggcaggtggggacggacgaggttagtgccaggtggagaggttggatctgcgacacccggaggtgaggaaggcaccatgtcttgggcctgtgagcaaatcgagtgtggcaggcccatcggaggggcaggcaggtaaggggtggccagagagaggtggggaggggcccggccacgcaggtgagccgtgctgacagagcgaggctttattttgagaaaatggggacccattgaagggactgaagcaggagagtggcctgagccactgtggcagtgcagggagcctgggtgtggtccaggaagccaggaggtggacgcctgcatcgcccaggacgaggcgctggcccccggtcccccagcagcatgaggacggagggaggctcagcggggaaacagctggctttccgcttccaggaggcagcgtgggtgacaagatcacatccctaggagccaagctggagaaacagcagcaggacctgaaagcaggtcagagagcctccggggtgtgtgcgcatgtgcgtgcatgtgtacgtgtgcggtgtgtgtagtgtgtacgtgtgcggtgtgtgtagtgtgcacgtgtgcgtgcgtgcgtgtgtgtgcctgcaagcatgtgtatctgtgtctctctccgtatgtgtggtgtgatatgtcatggatctgtgtgtggtgtgtagtgtggtgtatatgtgtgtgttgtgtgtgtatgcatgtgtggtggtgtgtgtgagatgagtctgtgtgtgtgcggtatggtatatgtgtgtgtacgcatgtgatgtgtgtggtgtgtctcttggtgtgtttgtgtgtgtgtgatggatctgtgtgtggtgtggtctatgtgtggtgtacatgtctgtggtgtgtgtgtggtatggtgtgtggtgtggtctatgcatggtgtacgtgtctgtgggtgtatatgcttccccagccacaggct

SEQ ID NO: 30251 - DNA, 1483 bp, Artificial sequence
  DNA replication origin
aaggggcaggagaggtacctgtgagatgacctcgggctgaggggagcaaatttagtgtggaacgaggtttctagggaagcgagggcaaagggcgctggggaggaggccttgcgtggtgggggatgaggacaacaggtgggacctggagggttgtgcttggagagtgggctatggtggaatgacccagatttaaggatctcaatggaattttggcaggggagggactgttccagtatggattttaggaagaacacagggcccagcttctggagtctccaatctgaggggacaggagccttagaagagctgagactaaggcccgaggtgatctggaggcctctgccactggctggatgggaggaaaaccattcacagatcccccttctcaggatgtgtgcctaggcagggccgggtctgcccccccgccccctgtgcgtctcccagtcccccagctccaggatccgggctttgcacacagctgatgtgaatatcctgagtcgtgtgcatgggtgtgtgtgcaccagattagctgcgtgtgtatatttatacatggtaatatgggtgcgagtgtgtaagagtgtgtgtgtaatgctcaaatgctggggtcaaagcctatgatgacccccccccatggccccaaccaatccccccgcccaggttatgcctcctcaggcttcggtgccctgtctttaccctccggctccccacacccaggctgccggctcctgatgcccctctcccacagggccacctcctgcccagcccctggcacagcgtctctgctccatggtctgcttcagtctgcttgccctgagcttcaacatcctgctgctggtggtcatctgtgtgactgggtcccaaagtgagggtcacgggggccagcagggatgggcaaggggtagggaaagagacatgggcagtggcgggcagcgatcggggcgatgggaggggaagggatggaggcggggtggagcacaagctggggcaaatgcggggacattgaggggccagtcacatggacagtgatggggacacggcccctctgcctcatcctgcccccactaccacctgacaaggtgcacagctgcaagccgagctgcggagcctgaaggaagctttcagcaacttctcctcgagcaccctgacggaggtccaggcaatcagcacccacggtgaggggctggacggctgggttctcatttatccgcacaggtttgctgggctcagtgccgagtctgcaacagggctgtgtggggtgccgtgggggtgcaggctgggcaaggcgtccaggggccctgggggatgtataggagggaggcaggtggggacggacgaggttagtgccaggtggagaggttggatctgcgacacccggaggtgaggaaggcaccatgtcttgggcctgtgagcaaatcgagtgtggcaggcccatcggaggggcaggcaggtaaggggtggccagagagaggtggggaggggcccg

SEQ ID NO: 30252 - DNA, 1677 bp, Artificial sequence
  DNA replication origin
ggactctcagctccatctcctcaacgtggggagtctcttgggctctgcctggacttccctttcctggcctgtaacctgcagactctctccaaacagtaagctggggtgatcggagggttcctgttgtttgcttcttatccctcagggatctttactcctccttgcctgatgtccagagtcttgaaagctgccatgttctatagttgtctgtttttgttttgattgtttctggggagagaagaactcttcccatcttgggcagaccctgtcttttatgttcaaacttttgcctaagaagcacattacatattttaactcatctaattatccgagcaatccaatcgggtagctacgactgtgatctccattttacacacgagaaaatggaagcatggagaaattgaatgctggtgcatgatctcagagctacctggaggcacagctgggctaccctgtgggcagtctggtttcagggtggatatacagacacgttgctgggctgacccagcattgggagttgataagtcggactgggaagcaggacaggaccctctgagtggagggtgctgaagacagcagtcagggactcagccatggagggccagcttggtggggaacaccgtggtcatggagcgcttctggatggagaggaatgcaaaggccttggaggaaggggtgggggcagtgagagggagggtggggctgtgctcagagcgggagtgggcagtggaggtgtcagaggcctccctgggtcaaatggggtcctgagtgtggctgcagtggggaaggtggaagtcactggtgtgaaaaagatgaagagttatggacagtcacttacaggggcagtgtctgactcaggacagtggcaggaagtgacctggggaggaagattctgggcccctgactgagcctccccaggatgtggtcctgctgggtcggggggtgataggaatgagaagacaaggaagtccacagagtcagggtccaaggcctagaaggtgttctgtttgcaggtggatgctgcaaagagaggagctcagggctgggacaactggagctgctctgggtctggaggcagcagagagggagcccagctctgtgtgcaggaagacgtgggtgtgtgagtgtacgtgtgtgggtgtgtcaggtgtgtgtgtgtgggagggagtatgaatgtgtgcattagcatgcatatgcacatgtgagagtgggtacagcagagcgtggtcatgagtgtgtgcaaatgtgtgtttttgagtgaagtgagcaatgtgtgagtgtgtgagtgtgtgtgagtttgtgagggcatgtgaatgtgtgtgtcagtgctgtcagggtgcagatggatcaaggggcaggagaggtacctgtgagatgacctcgggctgaggggagcaaatttagtgtggaacgaggtttctagggaagcgagggcaaagggcgctggggaggaggccttgcgtggtgggggatgaggacaacaggtgggacctggagggttgtgcttggagagtgggctatggtggaatgacccagatttaaggatctcaatggaattttggcaggggagggactgttccagtatggattttaggaagaacacagggcccagcttctggagtctccaatctgaggggacaggagccttagaagagctgagactaaggcccgaggtga

SEQ ID NO: 30253 - DNA, 1308 bp, Artificial sequence
  DNA replication origin
gtgtattgtgtgagtgtatgtatgtttgtgtgttgtgtgagtgttgtgtatgttgtgcgtgtgtgtatgttgtgcgagtgtgtgtgttgtgtgtgtatgttgtgagtgtgttatgtatgttgtgtgtgtgagtgtgttgcgtgagtgtgtgtgttagtgtgtgtatgtgattgtatgtgtgtgtgtgtgtgtgtgtagaggtggggtgagttgggatgggtgggggacgtgagcacagagagatcctggaagatccctgctcctctcatctcccaagacccttccctggatccttctgtaataaatcttgactgaaggacctaagtatcttggacattttttttttagagacaggagtgtagtggcaggatcatagctcactgcaacctcgaactcctgggctcaagccatcctcccacctcagcctcccaagtagttaggacttacaggtgtgcaccactgtgcctggcaaattaaaaaaaattttttagagaaatggggtcttgctatgttgcccaggctggtgggaaaagattttaaggtgagagagatctgagcagtgctaggcagaagggcaagagccaggaatggaggagtgtcaggtgtgtgggtgctggtggtggagccgggttccatggaggcaggaggagcaggggcttggagcttaggaaggggattggttagctgggctggaatgagggactcctcattcctgaggctggccaaccgagggagggccggtgctgggcagggcagggcaggggacaggagggataggaggtccctcccgaggaccactcaggaacaccagtagcatctcctctctctgtagggggctggctggacttcccaccaggcggtgtccccacaggcagaggccctgtccgcctcactctcctctgcaactccagtgcccacacggcacccggtacatagtgaacactcagagagaatacgggatgctgctgaatcttctgagggtgacagaatttagagtttgagcaggaggcttggagagaggccaggatttctgaaattaatgggagagtgagctcacgcgaatgggctgagggacaccagtgagggaccgtctgaagggatgtagcaaagtcaccgcatttccctccagcagcccgggtggtgggggctgggggaacgtcatcatgggagctgacactgatcagctgctcaccggggcccatcttccacttgtctcagcacttgatttttttctgctaccccctttttcttttaaagatttcaattatgcatgtattaagggtcccacagctcactcattctctttcc

SEQ ID NO: 30254 - DNA, 2976 bp, Artificial sequence
  DNA replication origin
tggttcctcctagactactagggccgccttagcttgctacccttttaggaccctggagctgtgccagggtcccctctgtccccgcgctcctgacaccccctcctcttgcagggccacctcctccccagcccctcctgcagcgtctctgctccggacctcgcctcctcctgctctccctgggcctcagcctcctgctgcttgtggttgtctgtgtgatcggatcccaaagtgggtgccccaggggtgggaagggggcaacattggggggtgttgacgggggaccgtggcaagggagtggtgggtgcagtggtggcggacacagcgatcccgttttcttctctctgcacgctgtcctggccagactcccagctgcaggaggagctgcggggcctgagagagacgttcagcaacttcacagcgagcacggaggcccaggtcaagggcttgagcacccagggtgagggcgctggggcggggctggggctggggctggggctggggggctgtcgggaacgctgagcgagcctctcccgcaggaggcaatgtgggaagaaagatgaagtcgctagagtcccagctggagaaacagcagaaggacctgagtgaaggtcagagagggagtgtgtgtgtgtgtgtgtgtgtgtgaaagagagtgagaatgtgtggatgtgtgtgagaaagtgtgagtgtgtgtggatgtgtgtgagaatgagagggagtgtgtgtgtgtgtgagtctgtgtgtgagaatgagggggagtgtgttttgggtgtgtgtatgagagccttgtgtggatgtgagaatgagagggagtgtgtatgtctgtgagtgtgagaatgagatggagtgtgtgtgagtctgtgtgtgagaatgaggtgtgtgtgtgtgagaatgagatggtgtgtgtgtgggaatgagagggggtgtgtgtctgagtgtgagaatgagatagagtgtgtgtgagacagtctgtgggaatgagagggagtgtgtgtgagagtgtgagaatgacggagtgtgtctgtgagtgtgataatgaggtgtgtgtgagtctgagtgtaagaatgagatggggtgtgtgtgtctgtgagtgtgagagtgtgagaatgaggggtgtttgtgtctgagtgtgagtctgtgagtgtgagaatgagatggggtgtgtgagtgagtgtgagaatgagatggggtgtgtgtgtctgtgagtgtgtgtgtgtttgtgagtgtgagaatgagatggggtgtgtgtgagtgtgagaatgagatggggtgtgtgtctgtgtgtgagaatgagatgggtgtgtgtgtgacagagtctgagtgtgagaatgagagggagtgtgtgtgagtgtgagaatgagaaggagtggatgggtgtgtgagtctgtgtgaatgagggagtgggtgtgtgtacgagtgtgagtctgtgtttatgtgtgagaatgtgtcagtgtatgtgtgtgagaacgtgtgtatgtgtgttagtgtgtgttgcgtgtgtgggggaatgagagggattgtgtctgtgagtgtgagaatgagatggagtgtctgtgagactgtgtgtgaggagtgggagtgtgtgtgagaatgagatgggtgtgtgtgtctgagtgtgtgtctgtgagaatgagagggagtgtgtgtgtgtgtgagagcctgtgtgaaaatgagaaggagtgtggatgggtgtttgtgagtgggagagtctgtgtgtttatgtgtgtgagaatgagggagtgtgggtgtgtgtgcgaatgtgagtctgtgtttatgtgtgtgagaatgtgtcagtgtatgtgagaacgtgtgtgttagtgtgttgcgtgtgtgagaatgtaagtatatgtgtaagtgcatgtgagtgtgtgtatgtgcgtgttgtgtgaatgtgcattgtgtgtgcatgtgtgaaagagtatatgtgtgttgtgggtgagtgtgtgtggtgtgtgtagtgggtgagggtgtgttgtatgtgtgggtgtgcgttgtgtgaatgtgtgtatgtgggtgagggtgtgtgtgcctgtgtgagggtgtgttgtggtttttgtgtgtgtttgggtgagggtgtgttgtgtgtgtgtgtgggtgaaggtgtgttgtgtgtgtcgtgggtgaaggtgtgttgtgtgtgtagtgactgtagattagggtgtgttccgtgtgtgtgtgtgagggtgtatgttgtgggtgttttgtgtgtgagtgggtgtgtaagggtgtgttgtgtgtatgtgggttaaggtgtgttatgcgtgagggtgtattgtgtgtgtgttttgtgtgtgttgtgtgtatgtgggttagggtgtgttgtgtgtttgtgtgttttgtgtgttgtctgtgtatgtgggttacggtgtgttgtgcgtgtgagggtgtgttgtgtatggtgtgttgtgtgtgttgtgtgagtgtgtatgtgagttagggtgtgttgtgtctatgtatgtgtgtgtaagggtgtgttgtgtgtctgtgggtgtgttttgtgtatgtgggttagggtgtgttgtgtgttctgtattgtgtgttttatgtgttgtctgtatgtgggttatgtgtgttgtgtgtgttgtggatgtatgtgggttagggtgtgttgtgtgtctctgtgtgttgtctgcgtttgtgtctgtgggttagggtgtgttgtatgtgttgtgttttgtgtgttgtccgtgtgtgtgtatgtgggttaggttgtgtgtgtgtgtgttgtatattgtctgtgtgtgtgtgttaggatgtgttgtgtgtctgtgtgagtgtgtgtgtaagggtgtgttgtgtgtgtaggagtgtgtgtgtgtgtgtgtatgggggtctctcaggccaactccgctgctgtttgtggcaatgcgacgggtgttcgggtcccagcaggaggatgtagggctgacctcgtttcccgtttccctccccgtggtttccgcatctcctcccgctcccctccgcccggtctcccca

SEQ ID NO: 30255 - DNA, 1756 bp, Artificial sequence
  DNA replication origin
gagaaccaccccccacccccctgccacccgcaaccgccccagccaggtgtggctactccagggacatctacggagcttcatccttccagccttcagccccagagatgggattcggactccaattcccaacagccctagaggccctgactcgccccagctggtatgccccaggggctgctgggaaatgtagtcctgtctagccaaggcaggagaggaggggaaagacccgattcccccacatcctctgggttccagggatccccctcaggggctgctgaaaccgctgtccagggttctgaagggagagttgaacgcagacgccttgtgaggcccagggccacaggtgttgggggagcaaaggggaggcccccaggaccatactcacagcacattctccagggagcgggggcggatgaagatggcgatggggtgcaggtgggccgcctgcagccgccgcacggcattggccgagacatcgaggatgcagtgcttcccctgggggcaggcagggtgggcggaggggggccagcgggtggcgagaaaggacagagagcagtgccggagggacacggacggggagaggtggggaatgggaagttggccgaaggggagtgacatggatgtcaagaaacacgggggcagagagtcaggcaggaagcgggtatggacagagtaaaagacagagggaaaggaaagggaagatggagagcacgggagagggcagggacaggacagaatggaggaagggaggagcaccaggcaggcagggacccaagagatggtggcagagccggggcagcagcgagtggggcggggtgtgcaaggcagaggtgacacaggcgggaaggaaagccaagaaaaaggagaaaggaagtaggatagagggaggagggaggggaggacggacagaggacagacagatggaaggaacaaggagacagatgggagggagtgaggcagatggagaaaggaaccgtggagggagggagggagggcagggtgaggagcagcggggaaaggaaaggagttagcagaggagtgggagaggggagccgggccccagaaaagggtgaggcaggggagagggccagcggggagtcaggaaaaagggagggacccagtggggaaggccaagccaccaaagacaaggccatgggaagagaggagaaatggggcaaggagaagggagtggggagagaaagaggccagatggtggtggggaatttggggtcaggaagtgagggaggtgggagagagagcaggggcagagagcaggcagtcagacagagttgcccaagaggagaaggaggtggaggagcggagtggagacccagcagggaaagagacagagagagagagagttagagaaagctggagggaggcagtggggtggggagaggggagaaggaagaggaccgggtgcccgccaggtcctacctgctctgccacctctcgcacggactggacgctggtcccatagaggtggctgttgtactggccggcctcaatgaacttgtgcgcctgaatgtccttctccattttctcccgggacgacacaaagtggtaatcccggccatctatctcatactcccgcttgggccgtgtcgtatctgccaggaagtcaccccaccccccaaagatctaaccaccatccctctagcttaaatcctgcctacttcaatcaaatccccatagtgcccagctggtcctttggtgaaagggagctgccagggagaccaagactgcagagggccag

SEQ ID NO: 30256 - DNA, 989 bp, Artificial sequence
  DNA replication origin
tcggttgccctggcaattggggaagcccctaggaccgggctaaagcgggccccgcctgggagtctagagaccaggcgattgacgtcagggacctgggcacgccccactttaaccctttcccgaatgaagtggggggagggagtagatgagcgggataggacccggatgtctttcaccactcccagttcctgacgtcctttgcactgcgtagggtgaggggcgtaggggagcgaggaaggcaggttattcaggatgcgctgcgcccacaaacctcttcagcccggcctcctctcggcctggctaacgtggggcggggcccagggcaggagaggcggggctagcggatcccttctgcgctcaggagtttggtcggccccaggccacgccccacccccctgttgtcctgacgacagggcctcctggaggtgggtctccccgggtcttgactggtcctagataccgttgctaggcaacacggtccttagaggaaggggtggattggacggctggttggtgagaccgagggaggggcctgcagctggggaaccccggattcccggggtgcagggtttagggcaaatgtctgtgaaagtgaggggcaagtctaggggagggttatgaaaatatctgggtagatatggggggttggggggatggggcaggaaatggggaccaggacccggtggacatgatccctggggtgtccatgtgtagcacataaggcatgtaacaccctgtggtgttacatccggtgagaagctcccttcccccaagcctacccccctctccccactctttgccatctgctgctcccctctccgtctggctgtctcccttcccgcttctcctacacctccttccacatgcagggggccccgggctgggcagagttagatccttgcgcgtgtgcatctgtgcgtgtgtgtgcgcgtgcgcatgtgcacgcgtgtgcgtgtgtgtgatgtggattgaggctgggcccttgagca

SEQ ID NO: 30257 - DNA, 2008 bp, Artificial sequence
  DNA replication origin
gctttgctccactcctgagttctcttccccctctgcagcctttcctccctgctggctggctggctggctggctcttgatgctgtctctctcttcctcccacgcattctcctctccctctccctgatccccagcccaggccgctggggcctgatcagtcctttccctcatcagtcctctccctccatcagccagctcccctttcccatgttccctcttgcctattcatcttcaccttccctcttttcctcctcccctctctcatcctcttgggttctcacctctgccatatcttctttctatccccctctgccccctccatcatcccccaccacctgtttccctttctcctctctgctcacagcgtcctcctctctccagtcccgggaggcctggtttctgggaccttccattctccagtccactttccatcttccccttcctccatctcctcttctggggacacaggatggggaggactggagagcaccaggcaagctgtgagattgaggggacactgtggggtcagggtggggattctaggatgttgtgggatgctctgggaagggggaggttgctgacatttcaccaagaagatggggaggaggtctctgagcctagggagcgggcaagcaggttctggagttagaactggcaagagaggagttgggggataggaagggtaagaggtcctgggtcaggggccagatagggataagactgtgagatcagggcagtgaatgaggctgacagagcaaggaaaggaaggccctggagacagggatggtacagagtgtttgtgcgaattctgtggatgctaggagtgagggaaagaagactagagatgctttgtgcaaggcagggccattaaatccctgagcagggggaagaggaggtagggagcctgaggggtggtagttagtacagagctgctgctgatcagagctcaggagcagaagggggtggagggagagagtgttggaggccataagcatggggtggaggtctcaggacaaggcctcacctggggaacaggagaagccccaattttcagaagagaggggagttgattgagaagtgtaagattgttacttgagaataatcttgagggtatgaaggtagggtaagggagaatggtgataaactctctggggaatcagaaattgagatggagtagctgggtggggtggcatgtgcctgtagctactcaggaggctgaggtgggaggactgcttgagcccaggagttcaaggccgcagtgagctatgatcacaccactgcactccagcctgggtgacacagcgagaccttgtctctggaaaaaaagaaattgggatggaggatgaggccacattggtaagggatggggctggagggtgcgacagggccagggaagcggatggagaatggaggctggggttggaagatggatgttgaagggcgagacagggatggagatggagcatgtgggatgcgggcagagatagggatgggaagcaaatgaatgtcgtagtggatgaaggtgggtgtgctgggaaggaggttccaggatagggatggggatggggattgaggatgggctatgggatggaggacgggctatgggatggaggacgggctgcgggatgggggacgggctgcgggatgggggacgggctgcgggatgggggacgggctgcgggatgggggacgggctgtgggatgggggacgggctgtgggatgggggatgaacacgtggatgagattttggcagtcagtgactgttggttggacaacagcatttgctgatatgtgaagggttggagggtggtgttaatagatttatgggtgtgaaatctgtgatacagcttgaaaatggtcggtagtttgtaggcttgagaaatagcagtaggagaggggagggacccctttggacggggagagcgggaaggagactggggaatccttgcgcttgggcgactgcaaatacatgtttctttaaggaggaagtaggttggggaccccggaag

SEQ ID NO: 30258 - DNA, 814 bp, Artificial sequence
  DNA replication origin
tggccctgccttgcacaaagcatctctagtcttctttccctcactcctagcatccacagaattcgcacaaacactctgtaccatccctgtctccagggccttcctttccttgctctgtcagcctcattcactgccctgatctcacagtcttatccctatctggcccctgacccaggacctcttacccttcctatcccccaactcctctcttgccagttctaactccagaacctgcttgcccgctccctaggctcagagacctcctccccatcttcttggtgaaatgtcagcaacctcccccttcccagagcatcccacaacatcctagaatccccaccctgaccccacagtgtcccctcaatctcacagcttgcctggtgctctccagtcctccccatcctgtgtccccagaagaggagatggaggaaggggaagatggaaagtggactggagaatggaaggtcccagaaaccaggcctcccgggactggagagaggaggacgctgtgagcagagaggagaaagggaaacaggtggtgggggatgatggagggggcagagggggatagaaagaagatatggcagaggtgagaacccaagaggatgagagaggggaggaggaaaagagggaaggtgaagatgaataggcaagagggaacatgggaaaggggagctggctgatggagggagaggactgatgagggaaaggactgatcaggccccagcggcctgggctggggatcagggagagggagaggagaatgcgtgggaggaagagagagacagcatcaagagccagccagccagccagccag

SEQ ID NO: 30259 - DNA, 961 bp, Artificial sequence
  DNA replication origin
agtcctccccatcctgtgtccccagaagaggagatggaggaaggggaagatggaaagtggactggagaatggaaggtcccagaaaccaggcctcccgggactggagagaggaggacgctgtgagcagagaggagaaagggaaacaggtggtgggggatgatggagggggcagagggggatagaaagaagatatggcagaggtgagaacccaagaggatgagagaggggaggaggaaaagagggaaggtgaagatgaataggcaagagggaacatgggaaaggggagctggctgatggagggagaggactgatgagggaaaggactgatcaggccccagcggcctgggctggggatcagggagagggagaggagaatgcgtgggaggaagagagagacagcatcaagagccagccagccagccagccagcagggaggaaaggctgcagagggggaagagaactcaggagtggagcaaagctggggcaggggacgaggcagcaaggccccaccatgtgaagtctcaggccagacagatggaaagagctggagacttggggacagggcgagccaggcccagaggcggaggtagggggaggaggcggggaagggacaagagcaaatgagggcagcaggcgcttggaacagagctctggacacagaaaatggaaatggaggttgggggtgtgaaggaatgaagaggtcccaggcgtgggggcctcttgggggatgcacacacctcaacacacacgcatacagcacacgcacaggcacacaaacggcgcacgcacgcacacacacacacagcacacacacaggcacgcatgcatgcacacacgcacaggcacacacacagcacacgcgcacaggcacgcgcgcacacacacattcttgctttaggctttacatccactcccattggcctggcctgtttctcctctgtgggaccaaggtgtttccagc

SEQ ID NO: 30260 - DNA, 853 bp, Artificial sequence
  DNA replication origin
tgggatggcagctgattaactgggcagggagtcaggggtcatgttgggcctttcaccccaaaagagcagagggagaccagaaattcactctgaggctcagcatgctaccctcctccccaaccagggaggctggcacccattcttgcccctgtcctgagccctgctgtctctgttcttccccttcctcccccagcccatgcccttatagcataaccggattagctggctgggctgtgggctgttgcaggggtagggccagactcccggggcccctctgttgactgcttggaaaccagcaagggcagtgaactggacaggcttagccttgtcctgtctcgggggctgataccaagtaccttctggtggaaggggtgacttcagtccttgcctaaggagtgcaaggtaaaggagagccaatcacctgtggggtagaggctgcaatggggagactgaggccatggaggtggggcgcggggaggatgccatgcagagtaggagcagccagaggggtaggggaggggaggctagaacaagagtgagtctgagatggtgagagaagcaaggaagttggggactggaggcagagaatggagatgtgagtgtcggggctagagctctgagaagctggagggactcgaagatgaaggtggtggggaaaggggtgaagacacagatgccagaggggctatgcccaccagaaggccagtgtcccaggatgtgaggagtaggagttgggggatgggattgggacctggggattgatgagaggtgctgaggccctggcgggagagggggctgttgggagagtggagagaggggagccaatgggctagaggagagggagggggaggag

SEQ ID NO: 30261 - DNA, 1650 bp, Artificial sequence
  DNA replication origin
aaatgctggatggggtagggagtgctcaggctttgcggtcgttgagctccccagctctgcctgagtcttccatctttcattgcctatatttagactcctgccgcagtaatttaaggaacatttattgaaagcctactgcgtgctaggccctgtgttgtgtgcaaactccactctacagcgatcactttgtctttcttggtgcctttatctctgccagaatctctcgtctctgagcatctctttctcccactccgcccccgtccctccccctttccccgcgctgctgccgccgttgccatggtaaccggcgacgactgaagctgcgtggcggactggagggccgggcgagggtggcggaaggcggagcagaacaagtgggggtggggatacagtgggggaaagactgaggctatttgccagagccccaggagcgaagcggttaaaccctccgggtggtccttattgggcaaagccgagatgccgggggcggggcagtgtggccgacggcctcattcattggccgtcaggggcgtggcggagggacagtgtgggcgaggcagggggagcgaacgggcgggaagtggacggaggcgtggcctcccgggcaggtgggtggggtctggcttactctatcgagggaggcagcaaccttcggaaaggggaggaaccttggggctgggttacctgaccgaaatgagggcggggctgacctgggatgggcgtggcgtggccccccgtgcgtaaaggagacagggtttgaggagctattgtccaagtaacttcagggcgcgggggtctttggaaaggagaatccgggggttgggaagtctgacgtctcaattttcctaagatggaggtctgttcagatttcatcagagcacccctcctacctcagctctgtgttcccaggagacggttgctaggcgacggcaaagtccttgattgctgcgttgccaggcaacagagaaacggaaaatggagggaaaagggaaatgggggatggggaagggtctttatgggccatggcgcccactggtggataagcagggcctgcaggttttctattctagaaggaaatttgagtccagccccttccgcactgactccttggatcctctggtgatccaagccttcctaccagatatgaaactaggacattgggggtcatcttgggggcgcatgtaacagatgccgatcaacggggtcaatctcgcttgggtgagattctagggaagtcgtcatttctaccatgtatgggcattttatagaagtcagccgatttgaggagacccctcactgggttttaagagctggaagggtgggcgttcaatgggagaatatttggaagagaggctttcaggttaagttgtttgggagaaaatggaaatctctgaagagacctgaaggaggcggttgggagtgttctggacgatttgtgggtcattgcagattgccggccgtatctttggtgtgtattttttgaggcctgagtgtggagaagatatatttgggagcaatcttccgacaaagttggaattcagaatcgtggaggggatgttctgggcagacagaaaagggtgtaatctatgaacctcaggggtaaagaaaaggagaggaggtgccgggtgcggtggctcacacctgtaatcc

SEQ ID NO: 30262 - DNA, 1806 bp, Artificial sequence
  DNA replication origin
tggggagccccttttagggcccccttcccctccctcccacgctcccctccccttcccttctccaaccccctccttcccctctcacccctccccccatcctggccccccctgcaaaagtggggtgcggaggggggaggggtgagaacccacggaggggaggaacgaaactccgatgaagtcagagccccttacccgccgccgcggccaggccccccaacatggactgtctctgtatagtgacaaccaaggtaagcatgatgggggggctataaactggggggagggtatgagtttgtggggaggggttagtaggccttatctgggactggcgcccctggagtggcagcatcagaagtaagatgtatttgggggtcttaatttagttttggggttcacatctgagaaaatgcaggatttggccacaggtgccccctggagtgatccctttgtacctgtagggatatggaaaatttaggatattccatggttcggggggcctggcgggtttgggggttcatcagcgctgtttgagggagacttatttaaggagaagcctggctcataagggagtcctgctggtgtatgtgggaaggtgggctatgttggggggttcctctttcctccccagggaaaagctggcttccaagggccttgtccagttttggggggctcctggcatggggtaaaggttattggttgtgagtgcctgactgatctgggggtgtcagctggcagggaaggggtgggccttcagactctagaacaagcatctcgtggtggctgcatttagggatgctctctcaatttgagggaactgttaatttagggttcagtcatatagaatggaggtagttggaagttgtcagagggctggggccctggcatgggatcacctgagggaatggaccaggtgaggcaaggatttgggggtactcccataggaggcagaagattgcagcagccgagcttgccagcccctgaggaggaggatgagaggcttagggagagaggggatttgaggagggggaccgggtgggtggtgcacaatttgggggtggcccaaaggcaggtgcccaatatccccatctcctcccacactgtatctagccctgatcaagagagagggagaagagcagatgtggggactgttccagatacccctgacgcttgggatcaaggtgggggaggacacctggatttaagggtccctgagggcttatgaccgaagttactgaggttactggggtgaaaaggtgtaggaggagggcagggctggcagcgatggggatctgtgcaagagtgtccctctggttggagcctggcaaaggcaggagatctcggatggagcacaggcgagctcctggtgggatgcagatacctaggctctccttggagactctgggactggagagctggatgcctggtgtgtggagggaggcttgggcgggtggcaggcagctgggggctggggggtgggacaggaagtgggggccgggggaggcggggtccgggtgagtcacaggctggggagggggttatatttagtgggaactgcagcttttcatgggagggagctgaggacacacatgttccctgccacaaactcacacatgtgtgtacacatgcattgtgcacgtgtgaggatggttggaagagattgggggctgaggacctttagatctggagcccccaccctctctccaccagggcgactttcttgtccttcattctgtgggtttcgggctttctcccaggctgcctcttccccacatcccctgtagtttcggtggatttttatgcctcagt

SEQ ID NO: 30263 - DNA, 1199 bp, Artificial sequence
  DNA replication origin
gtccatgttggggggcctggccgcggcggcgggtaaggggctctgacttcatcggagtttcgttcctcccctccgtgggttctcacccctcccccctccgcaccccacttttgcagggggggccaggatggggggaggggtgagaggggaaggagggggttggagaagggaaggggaggggagcgtgggagggaggggaagggggccctaaaaggggctccccagtggaggggagggggcttggggagcacaccccgattctcaggaggggcgggggcaccgggggctggcagccccggagttcgggggctggggcatgagctggggtgggggaggggaactggatttcggggagccccggggtaggggggggtcttgccaaacggccaggggctaggggccgtggcgggggagtggggtgggggggttggaaacggcagcggccgagggagccgtggagccgaagagggaaggggagagaggaggagagaggaagcagggggagggagggagggagctaggagccagaatggggggggtgccttggcagagttaactccttctgtgctggcaggaacccggataatgggaaaggagatagaagcagaagcacagaggcccctgaggcaaacatggagacctggccagccaccagcgatgacagcaaagacgatgaggctggatttcatttcttagagaaggaagcatctatagttgggctgggagcacccacggttatttgaatacgggagggaggcctctcggcaggcggtagggggtcgggtgtgagggaggagctgaaggaggcaatccctgggggcctagttctccctcaggtttctcagggggaaacctaaaaagttaagccctagactctttagtgcctgaaactggggcagccaaagaaaacgaggaagaaagggagagtgggtacaggaccacagagagtgcattctcggtgccccaagtccctgggccactgactcaggcttttgtcagcagggcccccaagattccaggtaatattagtgatatttggctcacccctccagccctgcctgcccctcaggaagttaggcgctcgcccccacctccttacctgactctctgagagggaagcctcataatagtccaggatgtctgtcacaggaacagaactgagttacctccccaccccaggcctctccaggcacatcacc

SEQ ID NO: 30264 - DNA, 928 bp, Artificial sequence
  DNA replication origin
tctcggccaacacaaaagggagggtacagtggtggggggcacccaagctagggtgtgagtaccctaagtgtattcttctgagatgtaggccattcactaactcttggaacagctacagtttcacagtaggaagacccccccagattcactgcccctcccttagtaaagcctctgagaccttcctgaacattcccttctgtctttgccctctgttccttccagagaccatgtgcccaggcagatggattcctcccgggcctgagaggaactgcaggaattctcctgcctcttacccgtaaaaccccaacttctctagccctagggcaggaagtcccaaacaatttctacccctttttctgcaattctcattggggtgagaggaggcccaggaggagagagagctgggctcagcttctttttgagctgctggagccctctgtgaggaggccctctttgctggcttctcaggagagcgtggctaggttctgcctgcctatgggaagagggggccagggtgtgtggagcaagatggtggcggtgctggtgccttgggacctgggggaatgggacagctggtcggctcagagacggcctactttactcacagctggaatttagtggggagaagcagctcaactccaatcctggaggattagggagattaaagtgagagaagagagagatgtcccagagaccaagaggtgaaaaacagggctccttgtggaggggaggtctgggagcgaagtggggggctggggctcggagatccttctccccaaatctttccgtaggggctggggtgaagggcacagtctggggagatgaagtgacagtgtgttcatcttcctgtgttggcatcttccctgtcccaattctccttgcatctcactagctcccaggtcagccctctggctcctggcacccccac

SEQ ID NO: 30265 - DNA, 794 bp, Artificial sequence
  DNA replication origin
ggatggacaaggttatgcttggatagattgaggcacacggacagactaggatatcctaaaccagattagacaagattaggctttactggaataggtgggggcatactggtttatgttggagtattctagtctgtactgagtaaattgatccattgtctggttgtttagtacgttctcaggagtcctgtaacgcctgtaatcccagcactttgggaggctgaggcgggcggatcacgaggtcaggagatcgaggccatcctggctaacacggtgaaaccccatctctactaactaaaaatacaaaaaattagccgggcgtgggggcacgcgcctgtagtcccagctacttgggtggctgaagcagggagaatctcttgaacctgggaggcggaggttgcagtgagccgagatcgcgccactgcactccagcctgggcgacagtgcgagactccgtctcagaaaaaaaacaaaaaacacttgggccattatggactctactgggttgtattggttaatcctggtttctcttggggcaagacttggttttattggagcactcggtataggggcagacaaggctgttggggcctgtgctagcacaggcagccgtattgggatgttccaatctagactggtgcagacagctgcgtgtgggggcattgtaggctgtgctagaatagattgggctatcctagggtaatttgggacattcagggctatcttggactagattggcgtgtaaataatgcagagaaagcccttttgtgtttatggtctttggggctgagccttct

SEQ ID NO: 30266 - DNA, 1103 bp, Artificial sequence
  DNA replication origin
ccctgcacgcacactcctgcgggtcagagttgcttcgtgctccatcgtgggtggggtaaagcggggtgggagccgatggtccgtttcctgaaggcacaggccagcttagcctgggtgctcagaggacctcggctggggtacacgtttgggggctgggagaccgttgctgaaggcagcgatcatgtggcgggggcactaggcggagtcagacggtcacgtgattgggaggggatcacgtgacggagggcggctgaggagcgcggggtggctgcctttaagtcacgtgacatgaggagaggtgggcgggtacctggaggaagctcgcggcgtcggtggcggtggcgcgcggcggccgctgagaccggggctttgagtcgcaccccgcggcccgccccccgccgccaccctcgcagatccgtgctttttcccctttgcttctctcccgtactgggtcagtcctgtccgcgctcgcgcgtcggtttgcgggtgtgcgcaggcgcggcaggggccattagccctttgggtgggcggtggagcccgggagcgcgcgggcgagaccatggcgggtagcagcactgggggcggtggggttggggagacgaaggtgatttaccacctggatgaggaagagactccctacctggtgaagatccctgtccccgccgagcgcatcaccctcggcgatttcaagagcgtcctgcagcggcccgcgggcgccaagtactttttcaagtctatggatcaggatttcgggtgagcgcaaggcctagataggaccggcgggggctttgctagagtggattgggcgacatggaggggcacacgtctactttgggccacactgggattttctggcctatggtggagcagattgtactatgctgaggtaggttgactatcccaggatggacaaggttatgcttggatagattgaggcacacggacagactaggatatcctaaaccagattagacaagattaggctttactggaataggtgggggcatactggtttatgttggagtattctagtctgtactgagtaaattgatccattgtctggttgtttagtacgttctcaggagtcctgtaacgcctgtaat

SEQ ID NO: 30267 - DNA, 1504 bp, Artificial sequence
  DNA replication origin
gggggggggggggcaggtgggggccgcgtccgggttagagctcccgggtctgtcccggccgtgaagtagcgttggatgcgtgtgcctgtgtgtgtctggggtgggggtgaggggcgcgccgggccgcgtgctcgagtagaaggggccggagggcggggagcggttcggcgtggtcatcctggaccctgggggctggcgggcggcgtgtgcggtctcggagggcccgaggcggtggagcgcggccgggtaggaactcggggctccgggcgcgtgtgaaggacgggggcggctggcggcggcccggacgcggccccgggagcggtacggtggggtggggcgctgagggatccgagtagactggagtcgagagagaccgtgagttgggggggcggggcgccgggcctccggttgggggaaggggagcgctatagcgaggcctcagagggcgccgcgcccaggctccgcccctcgcggggcggaagggggagccggggcggatccaacacagctgggggcctgctggcctggcagagggacctgggagagcagggggttcacttaggaacaacggggtttagagggggagttttacacagattgttcctagtgtcttgactcagcttttattgcttttccagatccacctccgacccttaagccagagactcaggtgaggtttgccttacctttgcagcctagtagccctgcctgacaacgccccccgccccccttttctagacctcacttagggactgtgtttctgggaatgccattcttaaactgtgtggctttgcatgtgatccatatctccttcctttcagccaccagagaaacggcggagaacaattgaggatttcaacaaattctgcagttttgttttggcatatgctggttacattccccctagcaaagaggtaggggcaagagaattactgacttgaggctggtgtggtgggactatagagtgactgttgttcaaacagaactgtattgctttatagaaggaggcccttagaaattatatgtaagaccagggaagttggagactcttagggctgtggtaggaaagctggtatgcggggagtggatggccgggatagctagcttgaacagcagtgaaaaggaagggggatttggagtcgctggttgagattttggcatagtcttgaggtgctgtgaatggaaggtgtttatggataaattttagggagatgaaaatggtaacaaatgaggctatacagaaaaagagctaaggacataacggctccggtctgggtgatacagtgttccacaggccctgggcaggggcagcggtgaggtgtcagacttgagggtagaggtaacacggactggtcaagaggacatgctgatgggaattggggtggggagaagtttttggagtacagtgggatttagtggttgaggtaggacattttggggtaaatccagtcactccttttcaagctgggtttgtggaggggctgagatgacactggggttctgc

SEQ ID NO: 30268 - DNA, 1338 bp, Artificial sequence
  DNA replication origin
cttctttcttggtcccgcccagcctacatctcccaggggcctgcgcgcgcacttccgctctcccctccggctcctggtctccccgccgctccccgggggaggggagcggcttggtgcgcctgcgccagcctgtggctttctgggaatcaaagttccggaggttcatgcggtcccttttccgctgttcccggacggactacaaaacccttggtgcactgcgcctcggcgccggcggggggaggagggagagaagaggagggagggaggagagaggaggtggaggaggaggaggagggagcaggcggccggcggcgcggggggagggggcccggtccgggagtgcgggaggcagtggtagagggaggtggcggcagcggctagcggactcgagtctcaaccgggctgaggcggacacttctgtggagcgaagcagtgggagcatcgagcactagaggcggcaccgggatccccggctccggggaggggggcgccggaccgggaggaggggagggggcgatgctggaagccatggcggagcccagtcccgaaggtgagctctcgaccggtgcagagcgctgagccggcggggggcgggcgaggaatcaattggcaaacttggaggtcgagccccggagcccagcgggggagttcggggagggggtcgggaggctggccctggaggtgggagagcgacgagttgagagaccttggagaaagaggagtgggaaactgggctggggtagttggagatcagacggtgtgggggtgcgggggataggagcttgaaacccggagcctcgggggttagggcccgaaagggccaccggcagattggggccctggaactggaaggttaggggaatccagtggccggagagttgctcaggagggaggacgtagaagaggctgagtgaggggcccggtagttcgccgaggtggggtagtttgtggcggtggtaccggagctccgagtagttgccgccggagaatgcccggtgattgtcggagaggtgggcaggtagttgtggggagaagagggggtctgggtattgtctacggcagacggacctgtaccggggggtagttgtggagagagcgagccaggaagcgaggcgagctgggtagttgtagggggtggtggggcggggtggggggggttaagaccggcgacttgtcgggcgggggggtagggttggtccgcgagggttaagagcctgggagttgctgagggtgaggggggcatcggcggcagcagcggtggctgctgtggagagagagagagagtggctggttggggggaaggggccagagttgaggggtccatagcctagtaactgg

SEQ ID NO: 30269 - DNA, 1077 bp, Artificial sequence
  DNA replication origin
aacttggagaaccaagtctcgtatgatgattaccatcttttactcctcttcagccccagcttccttgaggggacggttggggaataggtttagagtaattttcgatgagcaaaagccaaccgtctttgctacgtcgcctgcgtagcccacaaattgattccaaagcgattacgctaatggcgtgagggggccggtcagttggtggtgctacgctagcagcgttagcgccgctgaggtagtggcgtatcttagcggggggggcagtccccgatagtcgggggcggggttggtgaatagggaagtggcgcaaattcgtggatcgctccgctgaatccgcccgcgcgtcgccgccgtcgtcgccgccccccgtcccggcccccctgggttccctcagcccagccctgtccagcccggttcccgggaggatgaagttcgtgtacaaagaagagcatccgttcgagaagcgccgctctgagggcgagaagatccgaaagaaatacccggaccgggtgccggtgaggacagtagccagggccgagggcgcgggacgcttacgctgacgccacagcctggccttggatcgggacaggcagcgcagggatcaggctgctggctgtggtggggttggcagcgagcctgaaactgctgtccttgggacccaggatgaaaggagtggggtagtggtggatgtggggttgagagggatgtggacaggagagagaaaccttagcatttgaggccttagagagtttgacagcctgagcttcaaatggtcatccccccagctagctaaggttgcgagattgaatcactagtcgacccaaacaagtcacctccgtctgattaagatagttgtttatggtgacgccctattgggggatggatcctggatatttaaatgagctccagtcagtgaggtcaggatctctgggactcagtgctgcaccgcgtgtacaaagacaaagagatgaatctggggtagatttaggtgctaggaatattgtttcttgagttcttgacaggtgcagcttcggggctgcattccttctgtctcctaattttcatctctttatcagg

SEQ ID NO: 30270 - DNA, 909 bp, Artificial sequence
  DNA replication origin
ttttccctagccccctcccccactgccccctcccccaattatccttccccttccctccaggtctcggaggaccccatcctagccctacctgtctcggcccgcaacctccccgaagccgtcggtgccactcccagcccatgtgggcccccgcgggctgcccacgcctgtcccccagctccccgttccgctgggctttaccctcgccaggggtggctttctgagccgcccgctccgtgcccctctctgcagcctctcctgccactcggggcccccgttccccctcccggcggcggggggctgcccccggggggctggcggagctgggccgcgggggccccggggccggcggtgccggggtcatcgggatgatgcggacgcagtgtctgctggggctgcgcacgttcgtggccttcgccgccaagctctggagcttcttcatttaccttctgcggaggcagatccgcacggtgagccagggtgggcgctggcggtgttggggacgtctggcggtgttggggacatctgtccgtggtgctcaggggttttcggagtgtcgggcctctgtttgggcctaggaagggaatcctggctggggcttttctcgccagagaattgggcaccctaagcggggcgaggtgggagacccttgtaatagaaccttgcccttgggggttttgatggggctagatgggacaggatttggcaactcttgggggctaaggtggtgggtggggcgctctttaagaaagctggagttgttgctaaagaaaccaagaggcggggaacacctgtttgatgacagccggatctgtggatgtgggcttgggaaagaccctatttggaacctcggtgtgtgtttggtcctataacaaggaagagacagacttgtgtgtcaagggtggaggtggg

SEQ ID NO: 30271 - DNA, 1370 bp, Artificial sequence
  DNA replication origin
ggactccctcttcctgtctttccccctcctcttcccctttgacactacttccggtggtgacgtgtattcgcttcaccgggactaagttcctcctgcgcggtctatggcgggtaggtataaggaaagccaaaagcactccaagcgaggctgcagtattgcgcacgcgcagaaggtggccgcggggcggggcctgaggcgaagcaggccccgcctcaaactgcgtgggcggggagagtgacgtcacttggcccgcgcttagggccctcgcggggggcttgtgggtcctcctccccctcccactgacaactgccccaactgctcttcccgccccggtcacagtgaaaatgtagacggggtcgttgtccgtacgactgtgcgccagggctcggggaggggcgccctccgcgtgagcgcccccctgggaatattgaacataatcacctctcattccagactatgttaggtcttaatggtgggaggacgcccgagtgctcggcccgtttcaccccgaggaggaaggacactgggtcatgacgccatcagagggcgccagagcagggaccggacgcgagttggagatgttggactcgctgttggccttgggcggcctggtgctgcttcggggtgagagccagaggcacggtggcggggcggggggtgcggttcgggcctggctgaggggacggaagtgggcaggaagggccaggggtcacaggctaggtgtggaaatcgcgacgggttcgcgaaggcggtaatcccagcgctctcataccctttatccgtccctcgctctgcagattccgtggagtgggaggggcgcagtctcttgaaggcgcttgtcaagaaatctgcactgtggtgagtatcccacagtgtctccccggcctaccctggatagggcacctgtgcccactctttgacaatcccttctcatctctgccttagtggggagcaagtgcatatcctgggctgtgaagtgagcgaggaagagtttcgtgaaggttttgactctgatatcaacaatcggtaagtaccagttggaagagatttgattaaatttgagacctataatgctaaggaaatttctttacaacaagcgcagaacctggtatgtagtagcagttccttaaatattcattgaagaattggatatggatctttcaggaggcaagaattaataagaggagtgatgagtatttggggagtccaaagcaaagatcatagaagtcgagagagaaatagcctggaaatagggagaacatgtgggaagggtattgcagtaatccgttaatccggcttcactctttaaggtacatatgtaccgagcaccaactatcaaccaggtgctgtgcaagatactggagacggca

SEQ ID NO: 30272 - DNA, 1310 bp, Artificial sequence
  DNA replication origin
tatgtttagcgaataaacgaaggaaagacagagaaatgtttgagagggcaaaacaaagataaaaaacgtgagagagttgaggtaaaaaatggagagaggaaaatgaaatgagagagagccagaataagcagggtatgtgagaatctgagaagtatgaggaggttggagggtagtaggaagattgggaggaaactgggcagggtgggtggggaaagtgcagtgtgcacctaagaagaggaaagaaagattaattgctgatgctgggttccaaggagactggagacaaggcgcaaaggtaaacgaaaagacaaggagtgggctgggtgcggtggctcacgcctgtaatcctgcactttaggaggtgggggcagggggattgcttcagttcaagtgttcaagaccagcctgagcaacatggtgaaaacccttctctaccaaaaatacaaaaactttagctgggcgtggtggtgtgcacccgcggtcccagctactggggacgctgaggcggggtgatcgcttgagcccaggaggcgaggctgcagtgagccgagattgcacctctgcactccagcctgggtaacacagacttcctcctctcaaacaacaacaaaaaaaagacaaggagtgaaacaggaagctccaaagcaggaaaggcaggaaggggagatgaccaaagatgaaggaggaaggagcaaaaggctggaaggggtgccgggaggaaggagggagcaatgctttggggagagatagcaggactgcagggtgagggaccatggacgaccaccttagagagccagattatagggaggacggaacagtgaggcgtgacagagtgcacagcaattggcagtccaagcccaggcccgggagggaaagagaaacgggcgagtgtgggggaggggtgggaaaggtggaggataggtctgaaaagactctaagggaggggaacgatgggtgtggccaagactctgacctagccctcaccctgctccccaccctcggccggctttaggtcccagtggtttcttcctccagttaggagccttgatgccggaggggacagtggtaggtggggaggttgagtgcaaagggttcaggctgtaagtcatgttgggttggaatgggggcacaggaaggtggggctgttggggagccacgctaagccgggtgtctgtagcagagccagagaaccgggacactgaagagggtgctgaagggggcgactctcagggatcgagccagggcccccgaaggtgggatcgaccagggtaggagacaggaaaaaaaaggagagcagcgggtgggggcga

SEQ ID NO: 30273 - DNA, 789 bp, Artificial sequence
  DNA replication origin
gctgggattacaggcatgagacatcgcgcagggctgagacttgttcttcagggccctgaacttcaaccttctttcactttttcccttcccattaaaacctcaatcacacccctcagttcacatctacaagctggtaggatggctccaggcagcaagtgggggatgggttggggggggcatggccatcatgggcaatcatgggcttgattgcctctgtgggggcttcctggtgggaggcggcacctgccagggggggacccagcaggctgcatggaagagggtggtggcagggccagggcaggggaggggaggagccaaaggatagagtaggaaagaaaaaggagcaggtgggggagggagctggtctcagccttttctttcatcccacatctgaggtcctcacctcaggggctgcgggctgccgggggccaggggcctgctgggggccaggggcctgctgccgtctccgctggaagtaggggcggtttcgtgggcgctggggctcaggccgggaaccatcagcgggaccttggctgggcttggtctcaccatccccaccttctgtggtaggctgctggcgtggcctggggcggaaaggcctaaggcaaggaacaaggctctgaggggaccagggaatactccctccccagggctcacccagctgccccaccccacctccaggagccaggcttccagcccatgagcactgcctccccgcaaggcacctgtctcgccaggagcccaggctctgcctagagcttcacccttccatcctcctgtcccttgccc

SEQ ID NO: 30274 - DNA, 1642 bp, Artificial sequence
  DNA replication origin
gaggcggggtcggcgtgcggtccgggggtgctgctgggctgggattggcccgtggtcgggaggcggggtctgcgcgagcggcggcagcgggctgccattggcctcggctccgggcccgctgccggcgtgtgggcgaggctcggggcgcgaggaccgagcagggcggtgggttcgcgagccggggggaggggccggggcggtggcggctgtggccggtactggacccggcgggatgagcgaggtggaggcggcagcgggggctacagcggtccccgcggcgacggtgcccgcgacggcggcaggggtggtagcggtggtggtaccggtgcccgcaggggagccgcagaaaggcggcggggcgggcggcgggggcggagccgcctcgggccccgctgctgggaccccctcggcgccgggctcccgcacccctggcaatccggcgacggcggtctcgggaacccccgcccccccggcccggagtcaggcggacaagccggtgctgggtgaggggcaggcgcgcacagggcggctctgaggggtcggcgggctgggggaggggcagtgtggagcccggcaggatccggaaaaccaaaggcggcctggcccgcaggcccagagcgctaactgggctgggagctgcgcaccaaagtggattcccctggtgggaaatcctgccgtaccttcctgggagagagggcggggccggcaggttcagctaaggtcttggggtggagaataaagccccagggtccggccacgcccccgggcgggacacagtgcctagttgactgggttagaactaggcaaacctctgagcctggcaagcaggtgcactggggacccttgcattgggagggctagaaaaaccctcagttatgacctgggggcggcactttgcagaccaggtgagtacccagttctaggtgaaggggctggatttgtaggatgtggggaacgtgacttagagttggaaggctttttgaaagcctgagtccctgtgtgggtgatttcatttggtggactagggtaggaataccttgaagctactagtgaaacctggttggcttgaaggtaacctgaataggtaataaggcagtaggctagatttttttttgttttggagtgtctcaaaactgagttcaactccatctcttccccccatctcactgtccccactgcatctctgcctggcagcaatccaagtcctgggcactgtcaaatggttcaacgtccggaatggttacggattcatcaacaggtatccaaggaacccagggcgggggtggaatgggtgtcttcccagctggcctgtgggactggacacccgcccaacctcatcgacccctgcggaggcacatggttgcaatgtccagctgatgctggttgaaagcctttaaccgcagcacaaatgtgtgcttcgtgacaagaggaagcctcctccgcatcttcaagggtagcggaggattaatgattcaggaacttggcaaacctggctctgaccctgccagcttctcatctcaccttctggaattgcttcattacttttactctgacatgcctttggggcagaatgtattatagggttctctgtgcctcagggcccccggctggaatcctcaactgatttcctgttatggcagca

SEQ ID NO: 30275 - DNA, 1124 bp, Artificial sequence
  DNA replication origin
gcgggcagctggcggcgaaggagacgcggaggacgccagcccttgggaagcgcacgtggggcttgcccagcagcgcctgggggcacgtgtgctgccccggggcgcgctgccctggctaaaaatacaacgcgcacccgcgtcctccctggtgggggaggcggccctagggaggagatactgctggagcctcgtttttctgggattacaggcgtgagccaccgcgcccggcccattttcttaatcttcccaggctcccgagaaacctggtacaagcctcgcactgcccctcagtcctctcatctgtggaatgggggccgttcatgtattcgataaatattgaacgtgtacgttgtaccaggcactgctgcaggcgtccagcttaactacaaggctcttactgctgtggagtttacagcccactgtgtgcagggaaataaaataagcaaatggtcaggatcatgtcatattttcaaaaatgccattagaaaaataaggaatggtgtgatggcgaagagtggcacgtaagctgctgcttggagagagccacctggagacacgaaggcgcgttttcggcagaggaaaccgcatgtgcaaaaggcctcgagtccgctggagcttgacgcctggccggagaccacagcccccggcatacagacgtgagagaccccaaagccagtctagggcggtagacatcagagctgcagcggtcggtatgggccacatgggtggacacattgatcaaaactcagcgaaggccgggcacggtggcttaccctgtcatcccaacactttgggaggctgaggcgggcggatcaccagaggtcaggagttcgagaccagcctggccaatatggtgaaaccccatctctactaaaaatacagaaattagccaggttgtggtggcgcaagcctgtaattccaggtactcaggaggctgaggagggagaatcgcttgaacccgggaggcagaggctgcagtgagcccagatcgcgcactgcgctccagcccgggcgacagagggagaccttgtgtcaaaacaaacaaacaaacaaactcagcgaagaagaattgcgcattgtactacttgtaaaccttgtttccaatacaaacataggtaggggca

SEQ ID NO: 30276 - DNA, 939 bp, Artificial sequence
  DNA replication origin
ctgtaaactccacagcagtaagagccttgtagttaagctggacgcctgcagcagtgcctggtacaacgtacacgttcaatatttatcgaatacatgaacggcccccattccacagatgagaggactgaggggcagtgcgaggcttgtaccaggtttctcgggagcctgggaagattaagaaaatgggccgggcgcggtggctcacgcctgtaatcccagaaaaacgaggctccagcagtatctcctccctagggccgcctcccccaccagggaggacgcgggtgcgcgttgtatttttagccagggcagcgcgccccggggcagcacacgtgcccccaggcgctgctgggcaagccccacgtgcgcttcccaagggctggcgtcctccgcgtctccttcgccgccagctgcccgcagcagccgcagtcgcctctcccggtcccggcgcgccctctgccggccgctcccggaggccgccggattccgcttcctcgctgaccctccacttgctatctatcgcccgccgcacccctccggccctttcagagttgaagattcggatttccggggcatcgggcacagtggacagaaaaagagaagagacaagaaaacaactaagtagcaagacgaggccgtgaagcatacaagaatgaccactggccttagactgttaaggaccgacttacccgtgcctagccctgagctcaagaaattggagaagcctaagaccaagactggggaaggcaggcaagaaacctcacagtgtgaccgctgcagcaaaagaatcacatggaaggcggagctcaggagtgggcccgttagctacaggctggagggtgagaagagaggacctaggaagggaagctgaacctttttgtagtaagattaagaaaatggccagatgtggtggctcacacctgtaatcccagcattttggga

SEQ ID NO: 30277 - DNA, 1302 bp, Artificial sequence
  DNA replication origin
ttctcctgtcccagcctcccgagtagctgggattacaggcatgcgccgccacgcccggctaattttgtatttttagtagagacggggtttctccatgttggtcaggctggtctcgaactcccgacctcaggtgatccgcccgcctcggcctcccagagtgctgagattacaggtgtcagccaccgcgcccggcccaccactcatttttatagacaattttttctaagggacctcgtagacaatactttggggaaccgcagagcacagttggggaaaacacagtaataccatctaagtttctttactgaggacctcagagccgaatggcctctatggatgccatagagaccaatacggactgagggtttaaagaagatggtgtccgccgcaggaccgctctatcttctcgggtgaactctatggcagagcataggcattcgatttagagaagtgaagccgagatgggtgggaacccgaccacactagcgcgctagaagagtggggcggaaagacatctcccgcgcatgtgtggaactggggggactgattccaagacaaggcgcccaccccacagagcaagttttctgaaacgtgtgagtcgtttaagtccagttaaagccgaggtggggcgtatcctgagacgcatgcgttctagacgagacaagtgatctagcggcgtggtcttttcaacgcctggcgtactgacggcgtctgaggtggaaggggttgtttaggattccgaacacgcatgcgttctgagacccaggcgtttcctttagagggtgtggagtgcagggctccttattgcgcaggcgcaaggactgcccggtaggacgagcggtctatcaaggggagggaagatgaggttgaagagattaaaaaaccgggtgcgcctgcgcgttgcagattagttgaaaacgctcagggtttgtgaggggcggggtcacgtatgcgcgtcattggacgggtcggtgggagggagggtggagatgggtagggtgtgtgcgcttgcgcagtgcgggggtggagggcggaggagatagatagcacgcttgcgcggctgtcatagggctgcttggttggtcagtggggagtcggcgcctgcgtactaagacccgtgtgcagcagcggcggcggcggtagaggcggcggcggcggcggcagcgggctcggaggcagcggttgggctcgcggcgagcggacggggtcgagtcagtgcgttcgcgcgaggtgagagcgggcagggcgcgtgtgcgcggtaccttggcttgggcccgggagaagatggaactgcgcgggggt

SEQ ID NO: 30278 - DNA, 1234 bp, Artificial sequence
  DNA replication origin
gcgcgcgccccggttggcgcgcggggtgacggttggggttggcccggtgacgttggagcgacgcagggcgggggacggcgagccgcgaggcagccacgcgggagaggccgccaggcggccacgccggggcgagggccaggggccagatcggcccaccggggcaagggtacctgggccgttgaggacccggctcagcgcggccacgtgaggtgggggagggggctattcggtgagagggcatgatggggggggttggcggacggccggggggaggggaggcggcgtggctccggcctggcgcagtctctgaggagggggcggccgcggcaccggaagtgccccccacgggaggctgccctcggggtcgcaggccgcatggccaagcgtggaccggggccgcatggcagcgcggggacccctccccccaggtcccggccaccggaagcccggaacggccacatggtcggcaggagccggcagcccctagcgcggggagctagtcctcgcgggggttccgagggggcctgagattttgaggagtggaagccggaggctcgggtcctaatcaccccggagggcctgctgcaggcatatgttagcgcttcccaacctcaagggccccaggagctttcctgaaaaaccctcctgtgaagtgtggcggtcagccaggtgtaagtggcaccccttcgagctgggaggccggagaaatggggaaacagggcgtttggacaggagcccaacttttctgtcggcctgggtggacagcgcctaaaagcctcaggcagatgagtttcccaccgtgataggcgttcttcaccttgtcactgtcttcctgttgtaactggtttgggagttccacggtttcgaagtccttaactctactagcctagtatgattttctactactcactactaccaaccttttgctttcattttattgtcattcaccaccccccacctctcccactttctactgactgtactggcccggcctgaaaagccgacaggacagatgcatcctgggaaaagtgggagggccttccaggagaggctgggttcctgggttctctttgggaaccaagatcgaggtgtttggcagggggatcatttcggaaacaactttgctttctcccccttggcttgttgcaagtgcatgttggcgaggcgggaatcccccaaagaggccttgtggtttcctgtagcagtgactggtttgtgtgtggatggggggggg

SEQ ID NO: 30279 - DNA, 933 bp, Artificial sequence
  DNA replication origin
cgggtaggaagggcagtcgtccgcgctggctgggcagggagcggcagcagcgagccggggaccccggcgccgcccgcgcgcggtgggactggggctgcggtcccggccgggtggcgggctcctgggacacgtgaccggggcggcgagcgggccgggcggacgggcttccgcctgggccgggcgcggccccctctgagcgcccgcctccccgcaggccccgtctgaggtctggcagtcagagacagccgggcgcccacggcccgagcgcccacggcagcaccatgcccgcactcctggagcgccccaagctttccaacgccatggccagggcgctgcaccggcacattatgatggagcgggagcgcaagcggcagggtgagccggggccatagcagggggacgcacggcccagaatggctcctgtacctcaaggctggcctcaacccaccggccaaccagcgcgcccgctgccgagcgcagaggagggaaggaatagccccgttgtggtgggatttaagcgtcctgttccacgctccagaacccttgagatgggaaggaccttggagagcacctgataaagcctttccgttccctattgccgcgatggggagcttgtcccctcgaggcaaagagcatacaggcgtgttgggatgactgggttttgctggtcttcaatctgtaacgttggaattgttttcactaccctgcctcttcttcattctgcctgattctccagaggaagaagaggtggataagatgatggaacagaagatgaaggaagaacaggagagaaggaagaaaaaggagatggaagagagaatgtcattagaggagaccaaggaacaagtaagcagtcccttgaactttcccagctttgatttcttcgtttgactctccctgccttcatcttcttttcccaccccatcccagatt

SEQ ID NO: 30280 - DNA, 823 bp, Artificial sequence
  DNA replication origin
ctctgggccggggctttcggtggggctgggactgggggctgtacctcatcctcctgcttctctttggtgcttggcctccctgtgtttgactttctcccctcattctccctgtccactcccacacccccgtaccttcctgccacaggagtggcaacccccttgacgcccccagtggtgtatggtgtggtggacttgtacgggatggcagtgaaggtgaccatcgtccacaataacaaccacagtgaccgtctccgccgaaacaacgccatcctgcgggcgctgtcccccgagggtgctctccgccgtgctgcccctgccgcccaggcagaacctgagcgcctgctcttccaccccaactgtgggcagaaggcagccatcacccacgagggacgcactgccctgaggccccagtatggcccatggggtggggagaagcctgaagaagggattctaatgggggggggggggcggggcaaggaagtggaaggcagagggagcctggcgggggcagcttcctggaggttgagctttagttctttggcttggggcagtgagtgttggcaggcattgctgggctaagccttggcacattgagagcgtgtgttggggatctgactctccacttgctgtgccctcagtgccaccgatgacttcaatcacggcgtggtgctgagcagcagagccctgcgggatggagaggtgttccaggtgcgcatcgacaagatggtggacaaatgggctggctccattgaaattggtgtcaccacccacaaccctgcctacctccagttgccctccaccatgaccaacttgcgctctggtg

SEQ ID NO: 30281 - DNA, 1597 bp, Artificial sequence
  DNA replication origin
ctgcggtgggcgtgtctttctcccactgtcgcaaaagctccctgcccaggtcttcgtccccctcggagccgctccgtcacctcgctatgccgtaaagcgaggctcccgaccccgtgtccttctgttctcatcgtggtcgtccccagctcctagcgcgggctgcttcattgcccggcagtgccgtaaagcatacctggcctcagccccccggtcgtatccctcggactgtctgcccgacgcggttgccacggtgccgccaagcgcggctgtcgcgctgccccggtgtcagcggagatggcggcagggtcgggtgggagtgggggctctgggggaggccctggaccggggccgggcgggggtgggggccccagcgggagcggctcaggaccggggtccaacgggggtctgggcagcggcggggaactgcacccgcgcactgggcgcttggtgagcctgtcggcctgtgggcgtacggcgcggcggcagcagccgggccaggagtttaaccacgggctggtgttgagccgagaacccttgcgcgatggacgcgtcttcaccgtccgcatcgaccgcaaggtgcagcgctggtaccgcggaacagagatgtggagggtggtgggaggcgtctagagggagacggggtaggacagccagggtagcccacattgccgggcaccgagagggaacagaaagaccatagagcaccagggggcggtcaggaagacagcatgaagcagaaacattgagtttgaagatgacattaagagcttgagttttctcaagatccagaaccagggaagggacacgagggctaacccactagaatggctgggaacagacctcctggtacaatttcttgggcatggaggatggagagatgtcagagatgtgatggcaagtgaagaaagatgccaaggaacgaacaaacgtaatcccagcactttgggagtccgaggcgggcggatcactagagtcaggggtttgagaccagcctggtgaacgtggtgaaaccccgtctttactaaaaatacaaaaattggccaggcatggtggcgtgcgcctgtaatcccagctactctggaggctgaggcaggagaatggcttgaacccgggaggcagaggttgcagtgagctgagatcatgccattgcactccagcctgggcaatagagtgagtgagactccgtctcaaaaaaacagaacaaaccattgaaggacagaggctgtgccagaaagataggtgaggagaaagatccagggtgagggaggtgtgtgtgattcagtgaagaggccaggctcacagaaaaagaacttggaaggagattgaatctgggtagagcctgatctttggagagaattaggccaggggaaaggaatgaatgatacacaagagcaagaggtgtgggtataggaagtaggagaatttggatggttggagagccatagagacaaggaaagttagaggaggcaggaggttggaaccaaggaatttgtgcttggcttggaaaggagtggtttagtaaacactgagtagagagcagagttgctaaaggaaagcccaaataattaccaagacggagtccagaaaatcactgtct

SEQ ID NO: 30282 - DNA, 1139 bp, Artificial sequence
  DNA replication origin
tcaacaccagcccgtggttaaactcctggcccggctgctgccgccgcgccgtacgcccacaggccgacaggctcaccaagcgcccagtgcgcgggtgcagttccccgccgctgcccagacccccgttggaccccggtcctgagccgctcccgctggggcccccacccccgcccggccccggtccagggcctcccccagagcccccactcccacccgaccctgccgccatctccgctgacaccggggcagcgcgacagccgcgcttggcggcaccgtggcaaccgcgtcgggcagacagtccgagggatacgaccggggggctgaggccaggtatgctttacggcactgccgggcaatgaagcagcccgcgctaggagctggggacgaccacgatgagaacagaaggacacggggtcgggagcctcgctttacggcatagcgaggtgacggagcggctccgagggggacgaagacctgggcagggagcttttgcgacagtgggagaaagacacgcccaccgcaggcatctttacgacggtggggtgctggagcccaaacactttctgctttgcgacagcggcaccgacgaccccgccctcgctagggggcggtgacaccttgaagcactcgctttacggcaagagggggtgtctcccctcgggatgcaggctccaaagcagcgtgagccgagtctggaggacccagagaagcggtagtgaaagtctcttcccgccacccgactgaggacgaagtgtcttgcaacagtgcggcagtccttccactttgcctcacacctcttctgattggctgagctagccgactggcgggggtgggggaagctcgctgatagttcaagtcaagcccagcttcaactccaactcaaccaaactattccatgttaagaccacaaagagtctaaagaagtcccgacaggccgtttcaagcgacagcgttgatgaccccaaaagatctcccttagagctattaacaagccccctgcccaactccccgaagctcaagctcaggctggaggaccgtgaggtcacagtcgaagctcctggcctggccccctgactgggattggctggtttggatgagggtggtgatggagaagggcgggaacaaattgcccagacaaa

SEQ ID NO: 30283 - DNA, 694 bp, Artificial sequence
  DNA replication origin
ggggaatgggggacccctggagcagaagagggaagactgcgtgcttctcccctcccacaggcaggagaaggaggcctggattcacgctaaatacgtggagaagaagttcctgaccaagctgcctgagattcgagggcgaagaggtggccgggggcgcccaagggggcagcctcctgtgcccccaaagccttccatcaggccccggccagggagcttgagatccaagccaggtatagggttggttgggcattcattgagcatctgctgtgtgctcggcatcgtgccaggtagcgccgggaggcacagagtgtgaagcccaggccttccgctggacaatgtcggagggaccggactgccgtttcaggggttacggtggagtgtgacattaagaatgagaaggaatgtggggctgggcgtgggcagggagggtaaggggtgccaacagcacaagaaaaggagagagagagggggtgggtttggctggagcgtcaggggttgagagctgaggccaagtgtggttggaccagatgaggtgatgatgccgtctctcccccacaccctagggactcgtacacatgcatacgcatacttacacatacccacacttgcatcactctattccctccacagtcccaagctccccatcatttagaagagacctgtcccattatagcattgggacactgctgagggt

SEQ ID NO: 30284 - DNA, 1037 bp, Artificial sequence
  DNA replication origin
cgcacgcctgtagtcccagctactcaggggaggctgagacaggagaatcgcttgaacccgggaggcgggggttgcagtgagccgagatcgcgcccctgcactctagcctgggcgacagagtgagactccgtctcaaaaaaaaaaaaaaagactatcctcacctcccccacaacttcccatcctttgagctgggttgcgttccgttcatctgcccccacccccggggtcacgtctagtgctaaaaagatgcctgacagcaatgttgatgggcgaattacgcctctcagggtgggccaagcatccttgcaccctgcccgccctcccgcctgccttctactccacgtcccagtgcacacttcgcgcagcctttctcgagcctggccccggcgctggcccagcccctttccgaggccccacagcacaggcttctgtttcggcgtcagccccgcccgcccgcccgaacgtgggtgggcgggggtggggggagtcccagcgccagccccgccccttcaggcattcttacagggtgacgatgtcagcgttggctgtttccatggcgatggtcagagggtccctgccttcagagtctcgagcccccagatcagctccccgtttcaggaacaggcaggcgagcctggagagaagagccagggtcagccggccgcccaacttctcccagccttcctccccatgccatcatccctaccccgtgtggccaagaatggttgcgtggtgcagcgggccccggcccgcactgtccgcttggttcacgttcgccccgttctggaggagaaactcacaggccagaagagaattctgcatggagaagtcgagaaggggggttgagggtggcatccctagtggtggatttcaagatgtcttagggtggcgccagttcagagaatgggagggtggagtgtggtaatcaggagtgtggaaggggttacagctaactgtaaccaagctaggcttggctctagctctttgcatgtattcatatataaatccatagtacaagcttttgaggtatgttacta

SEQ ID NO: 30285 - DNA, 1080 bp, Artificial sequence
  DNA replication origin
ctcctggccccccagtccacagcggctgcagccccagtctcccatactccacctcggggagttccacggggcggggggcccactccagatgaaaatgtgggctcccctctgccctatccccactggccacaccaaatcgggcccgcaaagcacctagacactcagagtcggtgcagaaaaggttggctcggaaggtgtccacctggacggagctcagctcatagtgatggggtccccggcgagcagagaagtgcaccaggcgggggctgacatctacatctgcgtggagcagggcagctgtgggtgcaggggtcccctgagaggcctccagttcccgcagcgcgtccaggaggggccggatctggtagaagtcagcctctgccctgagcagcgctgtctctccgtacccacggggcaggtccaggcggcccagcctcaggaaattgaggatgtgccggaaggccttgccatcccggtcgatgaagtagtggccgcctccttgggaattgaggttggggggcatgggggtgccggccctaaacatggcccccagcatagagtctgggaagcgggtcagggtctccaaagtggtggaatatagtgtgccccccacattcagggtcacggggcccccaaaggaggggggcgaagagggcacaggaggaggagaaattttgggaagtacaggagacaccgaaagaaaagaaaaggcagaacttcctgggtgtgtgcagaattgggtcgaagctgtcagattcgctgggttggaggcacaggtggagcacacccagtaaggtttggggctcaccccggctactttggtggtggatggggaggtggtgtcaggacacagaaatccccaaaaggttgagagaagagatgaaaagagcagagggcagccagagaggggaagggagcttgaggtctggacgtatccgatttggggtggtcagcgacacccctctgtggtcttcagacagtgggtttccggaatccaaccagcaggtgacggtggcgagcacagggccgactctgaagggatggcctccgagaccccgggcagatcgctgccgccgtgga

SEQ ID NO: 30286 - DNA, 961 bp, Artificial sequence
  DNA replication origin
ggcccccaagcacagatccttgctggcagcctgagagtcactcggtctaacttggtttcaaggcaactccaccagcctttattaaataaggctctgggtctctgggtactggctgcctgctcacactttcccttacagacatctggacccctcccttaccccacattataagcaaggaggaagaagaggacccgaggctgggaaacgtggaggtggcagttgggatcaaacatcctacatgtttaccaagaccaggagggcttttccctccaagggacccttgggacagcagctgctatgttcacgcgtccttccttgggacaggggacagactagatgtcctaagactggcagcttcctctctgggacccctgagagaagcggagacaaatggtcctcctcagggccttcttcaaggtcctggacttagtcccagtggccacaggctaggtagcagtgtgcagggccctgagttctgcagagcttgcatggagagcaggcgttacgctggaaggaagcccaggagtgtcagtaatggggaagcgtgccctgaggcatggaatgctgccggtgatcaacaacagcttcaactgtagactctgtctaggccagggccaactctccgtaccagcatcaacatctctctgccctggccccattccagggttcattaagtaaagcctgctaggaagctctgaaccccctgccatggggcaggaactgtgtcctatttagccttatattccctgtgcgtggacaggatagctctatcgggcgcttattcatgtaagaggtagggtcctggctgagaggtgaaggatttggcgagagggcatgggggacagagacagaggagtgaagtctggggagggctgggaagctattcggagaaggctggaaagacgtgaaggaagacgagcagaggagaagggaagggggcttctcacagtcggggcgatct

SEQ ID NO: 30287 - DNA, 2054 bp, Artificial sequence
  DNA replication origin
aggtgtttggaggcagtgaactgccatgtcccatggatgtgacacgtatgtacaaggaacatctcatggaaggacacagatgagcctgggcgttttgtggccgcatgctgaaatgtctcagcgttaagacgacatatatcggccgggcgcagtggctcacgcctgtaatcccagcactttgggtggccgaggcgggcggatcacgaggtcaggagttcaagaccagcctggccaatatggtgaaaccccatctctactaaaaatacaaaaaatagccgggcatggtggcacgcgcctgtagtcccagctacttgggaggctgaggcagaagaattgcttgaacccgggaggcggaggttgcagcgagctgagatcacgccactgcattccagcctagatgacagagcgagactccgtctcaaaaaaaaaaaaaaagaggacatgtatttgggagtctcggccatgttttgcagtatatctgtaggtctcagtgtgtgtgtgtggcagcatgtgggaggcagtgtaccttcgtgtgtgtgcgtgctctacctacatgtctgaggtatggtgtggttgtcatatctgagcatctccagtgtgtgtggtaggcaaacatgtctcatgttggaggaagggagatgtctcatgttggaggaagggagatgtcgtctcaggtgtgtatgagtgagtttgtgccactgcgtagctcaggtctaaaagggcagtgtttctgggtgtccgggtgtgtgatgtgccgtgatatttcagagtcaggatggtaacatacctggagtctgtagtaggagcaggcagtatgctaaaattgcaggtgtgagcagggcaggttactcagcggtgaagggacagagtacccggatgcctgggcacggggaacattctatctgggatttgtgtgcgtgagtggcagggatcctggctgtctctgctgtgtccctgcctctgtacctgagtgtttctaatgacttgcaggtggagctggagacctggtctctctagggcctaccctgagctcaccatctgaaggagagtgccatcatccttaggaactccttctccagacatgcttcctgaggctggctccctgtggctactgaagctgctccgggacatccagttggcccagttttactggcccatccttgaggagcttaatgtcactcggccagagcacttcgactttgtaaagcctgaggacctggacggcattggcatgggccggcctggtgagggacccctgccccgaggccctggtctctctgtccacagcctatcagttgccttcccccaccacaaccctcttccagcccttttcttccctgtaagtctctccgcactcttccccacacccacctccactccagccctgattctggcctcccacagcccagcgcagactgtccgaagctctgaaaaggctacgttctgggcctaagtctaagaactgggtctacaaggtgtgtgttgtaggtgggcagcttgggcctgggaatgaggtggcttgaggggcagggaggggggcgcagggctctgcataccggatttcccatccctgtttcagatccttggaggttttgcccctgagcacaaggagcccaccctgccctcggacagcccacggcacctccctgagccagaggggggcctcaagtgtctgatcccagagggtgctgtttgcagaggggagctgctgggttcaggctgcttcggtgtggtgcaccgagggctgtggacgctgcccagtggcaagagtgtgagtgtccagggagcccgcttcatccaggccagctgccccctctgttcttcatgcccgcaatgcctaaaggcgcttccccccacctccaggtcccagtggctgtcaagtccctccgggtaggtcccgaaggcccgatgggcacagaactgggggacttcctgcgagaggtatcggtcatgatgaacttggagcacccacacgtgctgcgtctgcacggccttgtactgggccagcctctgcagatggtgagcagatccagccgctggttcccgggacagcc

SEQ ID NO: 30288 - DNA, 886 bp, Artificial sequence
  DNA replication origin
tgatgaacttggagcacccacacgtgctgcgtctgcacggccttgtactgggccagcctctgcagatggtgagcagatccagccgctggttcccgggacagccgtgcggcaggagcgtgggcggccagggtccaatgggtccggctcacgcggcgcggtgttccctcctgcaggtgatggagctggcgccactgggctccctgcacgcgcgcctaacggccccggccccgacacccccgctgctcgtggccctgctctgcctcttcctgcggcagctggcgggagccatggcgtacctgggggcccgcgggctggtgcaccgagacctcgctacgcgcaacctactgctggcgtcgccgcgcaccatcaaggtggctgacttcgggctggtgcggcctctgggcggtgcccggggccgctacgtcatgggcgggccccgccctatcccctacgcctggtgagagcgggtccgcgggcggtcgggctctgagccgggcggatccggagggcagcagccgagggagatcggagggggccgggcttctgagggaggcttggaccagaagggttatcctcctaggcaaagaggacttttgtgaaagatgggtgcactcgggggtgctccgtggagggtgggcctccaaggagcacgtgtcccgcccctttcagctccacttccttcggcaggtgtgccccagagagcctgcgccacggagccttctcgtctgcctcggacgtgtggatgtttggggtgacgctgtgggagatgttctccgggggcgaggaaccctgggccggggtcccaccgtacctcatcctgcagcggctggaggacagagcccggctgcctaggcctcccctctgctccagggccctctactccctc

SEQ ID NO: 30289 - DNA, 1256 bp, Artificial sequence
  DNA replication origin
tatcctcctaggcaaagaggacttttgtgaaagatgggtgcactcgggggtgctccgtggagggtgggcctccaaggagcacgtgtcccgcccctttcagctccacttccttcggcaggtgtgccccagagagcctgcgccacggagccttctcgtctgcctcggacgtgtggatgtttggggtgacgctgtgggagatgttctccgggggcgaggaaccctgggccggggtcccaccgtacctcatcctgcagcggctggaggacagagcccggctgcctaggcctcccctctgctccagggccctctactccctcgccttgcgctgctgggccccccaccctgccgaccggcctagcttttcccacctggaggggctgctgcaagaggtgggaacccccgacctcaccagatacacagtccctcttccctccattcgctctcccagggttccatgcgaagactaacacatctagatgtctgtgctgggctctgggactcagctctgagcaaaacagatgcagtccctacctgcagggagatcagagccctggggaggcagcttggggctacacagatgcagactgaaaggctggggtctgtgtctgggccaggaaaggggcatagaggagacagcactcagttgcagtcgtgttgacacgcagaggaagagaagggctcagcgtgggaggggaaaatagaaataatgaagccgcaggccgggcgcggtggctcacgtctctaatcccagcactttgggaggcggaggtgggcagatcacctgaggtcgggagttcaagaccagcctgaccaacatggagaaaccccgtctctactaaaaaatacaaaattagctgggtctggtggtgcatgcctgtaatcccagctactcgggaggctgaggcaggagaatcgcttgaacctgggaggcagaggttgcggtgagccgagatcacaccatcgcactccagcctgggcaaaaagagcgaactccgtctcaaaaaaaaaaaaaagaagaagaagaagaagtaatgaggccacagagagagcaggagctgtgtcatggagggctttgcaaggcgtgttaagctaacacgtagagcacttgacctgtgcaggacactgcactgtgcactttacatgggcgcttatgcagattcgctcatttaatgctctcaaccactggatgaggtaattattattagtagtattttattttgagacagtcttgctctgtcaccctagctggagtgcag

SEQ ID NO: 30290 - DNA, 1044 bp, Artificial sequence
  DNA replication origin
cgaattcctggtgcaggtgagtgggaaggagggagggaggatgactgggaggggacttgggcgtccagatgggccagctgatgtgcgcgccgcccctctctttccagattgatcagattttgattcaccagaaggctgagcgagtggaaagtaagtagaaggagtgggaggttggacctcatgatggtggcccggatggtgggctcctgggcgcgcgaggctctacgagtctccccgtgtcacctcgggcagcgttcctaggctgggagacctgtaatcggtatgaactgcgctctggggccgggcagcccctgggtcaggcggccgaggagagcaactgctgcgcccgtctgtgctgtggcgcccgccggccgctgcgtgtccgcctggccgaccccggggaccgtgaggtgctgcgtttgctccgcccgctgcactgtggctgcagctgctgcccctgtggcctccaggaggtgggcggagggagggggccgggagggcgggccttggtggggcgggacaatgatgaggtccacctgagatgaggcctggatcaggtgggagtgggcaggtggggatgggaggtttagtgagggccaaatagacagatgatagagctgggacccctgcctccgcagtgaccctgtctgcttcccactcccagatggaagtacaggctccaccaggcaccaccattggccacgtgctacagacctggcatcccttcctccccaagttctccatccaggatgccgatcgccagacagtcttgcgagtggtggggccctgctggacctgtggctgtggcacagacaccaactttgaggtatcaggaatactagaggctcttgggaccttcgtaaaccaagatgatgcttccatgaggcaggatagttaacattaaggtcaagaccctgagctcatcaatccaaatccactgtgactccgaccgcatttgtagcattcctccatttggaaataggatggccctgtgctcttataaaagcataacaacgaggatttcatcttaaggagcaatgctga

SEQ ID NO: 30291 - DNA, 1036 bp, Artificial sequence
  DNA replication origin
cagcacagacgggcgcagcagttgctctcctcggccgcctgacccaggggctgcccggccccagagcgcagttcataccgattacaggtctcccagcctaggaacgctgcccgaggtgacacggggagactcgtagagcctcgcgcgcccaggagcccaccatccgggccaccatcatgaggtccaacctcccactccttctacttactttccactcgctcagccttctggtgaatcaaaatctgatcaatctggaaagagaggggcggcgcgcacatcagctggcccatctggacgcccaagtcccctcccagtcatcctccctccctccttcccactcacctgcaccaggaattcgaggccagaaggcacccctggcagtggcaagaagggggcagcagaccccaaggccacggggccaggcgaggggaagagggcgaagccgggagctggggcaggtacctgggcgggcactggcgcctgcccgggcccaggatgtagcgccggctccgggtacccaggggtgacagggtagggaggtgggggcgaaggggcgtagcctttggggggcaagtagcctgtaaagcggtgggagcaggatagattagaaagggactcaaggcctcatccccttattcctcagcccatgggccgcgaggcttcgggggaaacgtggtggcaagaggcagagaaagatggggcaggggagcagggtggaggttccccggaaggaagggaggggccccacccagccagtccgagcacattccgggaggatgtgttcaaacccggctcccaagtccgtgggggggataacggagacccccagacttgcgcgcacttacctgccatgggagaagggctggggttttcgagatgatggtgtctgggtggcttagttctggaagcggaggcaaactcggagatagccagacagacacagagacagacacaaagacggagaggcagctgcgcccggcgccggcccagggtctcttgggcggcgcctctgactcggggagaaacccaagtgtca

SEQ ID NO: 30292 - DNA, 811 bp, Artificial sequence
  DNA replication origin
cctcctgggcggtgcgtttgcgccgggaggaaggcagccgtccgctgccccgggaagccgatcgtgggctttgctcctcggcgtcgccgacgttcccgccccttccgctcggactgcagatgcccagagagtaggagcgcctggagaaggcggcggctggtcccgggccccgcgaacgccgccaggccggcggcgtgcgtgctcagcgccctgggtgggaggcgagggcggcccgggccgcgctggcccctgggctcctcctcccaagggcagtcgggcctcgctgacgcagcggaacacccttcacactcactcattggcttccaggactggctcctggctcgccttctgcctcccaggggcgacctcgccgtcttctctccctggcacagcggtgacccacacgggcacctcgcagcgacagcagtttctgcaggtgccccagccacgcgggtgacaggccgccaaacggtgtcagtgagcgtgctcaggccgcctagagggccagaggaggaagcgcggtcagaaaagacccccgagatgagtgtcttcgactggatcctgagccaggaccagtcctgccttgggggccactggctgagtggcgcaagagatgagtttagaaacggagtgcagtccacatacagggcgggttgtgtggaagctgcgatttggccccacgagcagcgaggagtccaccgagacatttttagaacaaagaaggtcaaatgtgtgttttagaaagatcgtggcggggcgcggtggctcacgcctgtaattccagcactttgggaggccgaggtgggcggat

SEQ ID NO: 30293 - DNA, 1092 bp, Artificial sequence
  DNA replication origin
cacggcccggattgggcgcctgtgaaccttatttgcatgggcggtcgggattggctggcctcttgggtggcctgggcggcgttggtccggtgcgtcctgttctacagctatggccgggccagctgcagctttccgccgcttgggcgccttgtccggagctgcggccttaggcttcgcttcctacggggcgcacggtcagggggctggggacgaagatgggactgtacttggggcgtcctctggggtctgctgcaagggcgtaacctatgggaggtgcccggcctctcgtttatcagacagtccgcggagccctaaaccttttaaagtcccccagctgggtccaattggttcccagtactgcccgagcgtgttcccaccaatcggaagcttcctggggcgggggggggggtgccctttctcgccaatgtccacctgggtccccccggattgggggcggtcagggctggcactaggaccgctaacctttgcttcttttctccacaggcgcccaattcccagatgcctacgggaaggaggtgaagtaactgcgctggggctccctgactcgtgggtctacgaaggcacaaagtctggggtccctgggggaagtgggcggggagagggtggggcgagccgcggatctctggagcagcaaaggccaaaggctctgtaagccaaaggcctgggatcaagctgggacttcaagggtggggtgggggaaggaactttggtcccttgtgtcatcaggggatctcagtacctgtattgcctacgacatcccttcgtttctgtttttcttacagctgtttgacaaggccaacaaacaccacttcttacacagcctggccctgttaggggtgccccattgcagaaagccactctgggtaatctttccctgcgcctaaccctgaccaagccccacacactccctctcagcctgccctgttcttaacaatcctgttttctgtgctgtgtctccttcaggctgggttattgctagcttccggaacgaccttattctgcaccagcttttactaccaggctctgagtggagaccccagcatccagactttggcccctgcgggagggacc

SEQ ID NO: 30294 - DNA, 1397 bp, Artificial sequence
  DNA replication origin
cctaaggatcgggtgctggaggaggagtccacgttaatccccaggggcccggggcccgggagcgcaggatccgcggtgcaggggcagggatccagccggaatcctcggggagggggagggatctagtcgatcccgagggcgggcgtgagggggaggtccggggagtcagaggagggcgggagccgagtccagagccccggggcgggggtcagcgcggatcctaggagggaaggcgggggtgaggggaggcttcgagggacgctcagcagccgggaggcccggactcctggctccgcgcgccagggccggcccgccccgcgtccatcccagcccgagagtgatgatccgccggcggagcagccgcagcagccccgcgcgtcaccgcgcggccgcctcccccgccccctgccgagagagcggcgcacaccccccgctcgcaccccccgctcgcacccgcctgcccgcccgccctccggagaatggggggattggagatggtgggaagaggcgggagcggacagacggacagatggacgtagcgggccagggcagggtggagacattcccccggatctcccaccctcggggctctcgcggtctcggagggctggcgggggggagaatatcttaactacagggggcggggcatcatacaaagaaggcggagccttcagacatgggggaggggccatttgtgcagtgggcggggtttactggcaataggtggggctttgctatctttcgggccgcctctttttggtagtgggtttgatttgaagctgaacaggaggagcctgtggaaaaaggggcggaactttgagagaagaccgggatctttggaaattggccggagcatgggggtggggggttcgaagaggcgatcaacttggaaagtgggccaatccttgacgcaaatccccctagtcccgccctcaaccccgcccccccactgcttagctcctctgttcctaattggtgctggtttctccgcccgccagacgtcttcgccactctgcagcggttttacaaaggcgggtgaagagcgcaatgctgaaatgaacacggcccggattgggcgcctgtgaaccttatttgcatgggcggtcgggattggctggcctcttgggtggcctgggcggcgttggtccggtgcgtcctgttctacagctatggccgggccagctgcagctttccgccgcttgggcgccttgtccggagctgcggccttaggcttcgcttcctacggggcgcacggtcagggggctggggacgaagatgggactgtacttggggcgtcctctggggtctgctgcaagggcgtaacctatgggaggtgcccggcctctcgtttatcagacagtccgcggagccctaaaccttttaaagtcccccagctg

SEQ ID NO: 30295 - DNA, 1418 bp, Artificial sequence
  DNA replication origin
gggatcgactagatccctccccctccccgaggattccggctggatccctgcccctgcaccgcggatcctgcgctcccgggccccgggcccctggggattaacgtggactcctcctccagcacccgatccttaggatcctccgcctggaccgccttctggtccctcgaagccggcccacggaaccagcggatcctcaatctagtcctgtcccgttgccccctcctttctctatcgtccctactgcggggttccctgttctcgggctccccctgatcccatcccctagctctccttttcccggggatcgactggatcccggccccgccccccggggctggggcgatccccctcccccgccgggtgaggcgctgcgggcgggggctgggcctgcggggccgcgggggctcagaggccgccgccccctcccgaaggcctttcgccccccactcggagccctggatggaggcaccacggccccagggctgagccaggtaggacctaagccgggtcggtggagggggctgcgtggcggtccactggggtctccctctccccatctccctccctgcgcctggtttcccccagcctgctctgtctgcgtgtctccgcctagggatgctctcgccgtgtctctgcgtcttggtctctttgtctctgcctctctccagtccatgaatgatcctttgaatgggcccacagaccccgtgtgttcccatctccccctccccctccttctccccttcccagccaagccattttcaccactgcaggaagggggggcctgcggcctgagcccccgtccctcaactctccccggctgggggagtcaggcctgggcaggaatggagagagaaggcagagggatagggagaaggaggagggagcaagatgtggcagacagagatgaggagagaaaatgggggagacagtgatggggaaagacaggagagagagacagaaggcttaagggggaaatttggggaaggcatttggagagagagaaagaaatgagaaacaccaaggagagagatacagaagagaaagatgtaaaaagaccgagggtgagagactgaaggcaagagctggggcaagctggaagaggcccacaaaagatgctcccagggagcactacggagaggagagagatgggggggcctccagtgggagggaaggagggagcggagctggtgggaggaggccaggggcccagagtaccctcaagaggagagggtgactgaggcagatcttgttgtggggagggggagggggcagcaaggccatggtagctgagcccagtctggcacaggaaaaggagatcctgggggaatcagccccgagccacctccaggtgatggaggaatagaggagccttagagaagctgaaaggcagggggcatgactgggtgtgtgtggtaagg

SEQ ID NO: 30296 - DNA, 1818 bp, Artificial sequence
  DNA replication origin
gggcggcagggtggtggcgttgcgcacgccgggccacgaggcgggcgcctcaggcggctggaagcggcgggcgcccaggggcggcgtggcgtagggcacgcccaagaactgcacgacggggcccaggatctcgttgttgagctcgcgccgcacaccgcgcactcgcccgtaggccgtgttcaccaccgggaagcgctcctcgccgaggctgccgaggcccaggccggggccgcccggggcgccgccgccgggaccccctcccccgcgttgagcccccgccagccccaccagacacagcgccaggagccacatgctgatcgggggaccccccctccctccctgggacccccccccctcggagagagagagaagggggggagagggagggaggcccccctcgccccaggagggaggaggggcggggggaaaggagggaggagggggttggggagggacctgggttagactggacagagaaggggtctgttcctctccatggagggggcacggggtggggaaggggaaggaaatgggagaaggtgaaggcaggcccgacctgcggggggtggagcgagaggggcagggaggcaggatacagacagacggacagacagaaaaatacagaggtggaagagggcaagggaaattggatggggcagacagaaaggaatggggaaacagaagagacaagtggttagtgacctggaattcagaccaagttgcccccttctcccacccacaggccccctgacacctccccactcccacccagcagcccttctcccctcagcagacgcctaggttgggggtggggcccagatgtggttcaagtccaggacccagccagaggagaggcgggtcagctctccagacccagcatgctcccttccagctgatgtatccctcccaggcaggttctcctcagggactcaggagtcccagctcccacctccctgggagggaatgaggtagacaaggaagagaaaacaaaaataccaagtcattaattagctggaagaggcaggtttgtttatatgtgttaattactcctgagctgtaatttcatggcgctgaacccccaccccaggccagactcaggcctttcttgggactgcacaaacctagcaccttatccccacttcaacacaccattcgctaaggatttgtgctgcctgcgacccctctctccccagactctctccatttcctccgtcagaagttggggtaccttgaggctggggttagagtagggaggggacgctggaggggcaaatccagggacagatgcgtgatcctgcagccggttgccgggtgacgggatgctgccccgcaatgttacctcggcaacgggctgcagctttaaccctggaggggggttctggaggaagacgggaaggggctggcttggtttggtggtccattcagggcatgaaggggagggcaaaggcgtgagtcagaatgcaagagttccccccaaccttaacatagaggaagaagtatatatgttgagaggagggggagattgggggcaccaagaacgctaaaagccctgcctgttggccaatcaaagcctagccttagtgaccaggcctctggcttgggagagggggtgctgaggtgggcttgaagagacatcacaggagcctactgactgcccccctccagcaatttcaagcaaccttggaccccaccaccttttcatctttgcaagccattgtgacccatgtcctgggggcaacactgagctttcttctcttcccatcccaacccatccattcacctacccttccccttgccaccccccctacagttgctgct

SEQ ID NO: 30297 - DNA, 2548 bp, Artificial sequence
  DNA replication origin
cacagatagggaacgaggaacacagtgccctgagccagcctggcacacaggtgccagcaggtaccgggagcaccaggttcgcccagtgtcagggcttcttccagattacggggttggtcaggggcgagctggagcccagaggcctgggggttccccgaggctgattggtttttcctcaatggcacagggactggcacgtgggtcaaggccaaggatgggtcaaggccaaggcaagctctggaaggcgtctcctaagtggcagtgatggccccatggggacccgctgggaacagggcctcttctttgtgagaggatggggtggggacaaagtgagcaaggcacgtgtgcacgtgagtctatgaagcgcgtgtgtgtgtgcgcgcgcgcgcctgagtcaacctcttcctcccagagctggtgtgaagattcagtgagatcacctgaatgtgtcaggccccaggcaggtctgcaatcagcagtggctaaaaatacagaaggtgtgggcaagggtggtgtgggggcaggggtggacaactgtgtggaggtgttggggtggacagtccattggtgacaagtgctgggtggatgtttcacatggaaggtgacgagacagcacccatgagggggccctggggtgtgcagagcctgtgtgagagtagggagtgctgggatgggcagcccacatggaggtgctgaggtgaaggactcatgatggggcaggcgctgggatggcagaggagtgtggtgtgcacagctcttctgtggagggcattgtactggggggcacgtggggcatgtactgggataaatggcttatggggaactagggtgcttcaaatttgaataggattagagtagatgacgctctgtgcattgtgtgtatgggttgtggggaggcgtggtttatatggagaggggtatggctgggatgggggatacagggtgaatggtccatttgcgaggtattgggatggacatgggtgggtggaggtgcatgagatgttccgtgtttggcagggggggattctgagtgcagggggcatggtgttggagtacttgtttggtgagtagggtgcaagcttgccggatgtgttttcaccacctgaggtccggtgcagatgatctctaggtaggagtggggtaaacaatgattgaggagtgttggggatgttggggactgtgatgtgaggggcctgctgagcacacggcccaggcgcgcaggttactggatgtgtggatgttcttaaggcacgtgatctatatccagggatgctggggagcacaggtgtgtgtgggtgacatggtacatagtttcagagatgtactgggggtgtgtgtgatatgaaagtactgggaattgtgattgtggggtgctggagcacaaggtcagtgtacaggttggttgggtgatgatttaattgtggagtagttgggatttgccatctgttttgggacttgagcacatgccgtggaggtgctgggtatgtacagggtacattaggagctcctgggtaccaggcctatgtgtaaggttgctggaaacatggactgtgggaagcgtggtggcagcggatggtctatacgcagacgctgccatgttttggagtggtaagatgggtgtcagaagagccatgcggggtgcaggggggtgtttgtgaggctggtctgctgagatggctggaatccacctattgcaccctgttcacactctggaaggtgttctgattagtcttggagtgctgaggatggagggtggagaactgtccagaaggaatgtgccaggggctatgagcagtcctgtagtgaacaagagttcattaagaacagaaattcaagagccccagggaagacgggtgggctgtgctggccctcagcaaggagcttccctgatccttcaggggcgtacaggggtcaagggagaagagaaggacatcggtaccactgccaaggtgctcagctcaggcaaggggctctggacatgatgtgatagatggaaggcagccctcaccagccagggggagagggagagcctgcgttgtccttggggtgcagatgtagctaacctgggtattctgccaggaacaagcccaggtctggcggcgggaggcggggcaaggttggagtgggtgtctgagcagaggatggatcacctgattccccctccgtggccaggttgagattagctggcagactgtgcctctttggggagacagtgggtgagcctagtccagtgcctgccatccctaccatggccccccatgggcgtaaagaacttatggagaggctgtctgcagagtgtgtgcctgggactgcctggaggcacccttacaatcctcagggggcacgtagaggttgcagggacactccgtccctcactgcccccacaaaggcccagctctgagccctagagcggtgccagtgcctgagggtctgcatgtgcgtttgtgggctgtgtccacggggtgcccggctttgtgcccgcgcccttaccgtcctcggtgggcacgtagaggttgaggtacaggcagtcctcgctctggttctgcac

SEQ ID NO: 30298 - DNA, 996 bp, Artificial sequence
  DNA replication origin
aggccggtactcacagcctggcctgaggtctgcctgtcccgccagggctgttccagaaggccatcgcccagagtggcaccgccatttccagctggtctgtcaactaccagccgctcaagtacacgcggctgctggcagccaaggtgggctgtgaccgagaggacagcgctgaagctgtggagtgtctgcgccggaagccctcccgggagctggtggaccaggacgtgcagcctgcccggtatggggtgggagagggctgggtccaggccttcaaggttccaaggaggctgaggtgagaggtgcctgtgggcataccatttggcaaggagggatgggcttctggcccccagtaagtggcctcctcttgcaagccttccttcagtggaggtgctcaatcagagcaggtgagcacagggtgccatgaagtgctttgggatgacttccagagaggccagatctcccaaaggacccactggaggatttcaagtagggaagaagggtcttgcaggtagagggaagcatctgcgtgtgggcttagcaggccacaggccaagaggaggccagtgagcaggtggtgagaccctgaccccttctccccagctaccacatcgcctttgggcccgtggtggatggcgacgtggtccccgatgaccctgagatcctcatgcagcagggagaattcctcaactacgacatgctcatcggcgtcaaccagggagagggcctcaagttcgtggaggactctgcagagagcgaggacggtgtgtctgccagcgcctttgacttcactgtctccaactttgtggacaacctgtatggctacccggaaggcaaggatgtgcttcgggagaccatcaagtttatgtacacagactgggccgaccgggacaatggcgaaatgcgccgcaaaaccctgctggcgctctttactgaccaccaatgggtggcaccagctgtggccactgccaagctgcacgccgactaccagtctcccgt

SEQ ID NO: 30299 - DNA, 1601 bp, Artificial sequence
  DNA replication origin
gttgccaagtcctcctccctgccttcggagtggccgggccagggagggccggggaggagggcctccccacccaccccctatacccgagtggtggagtgggggtggggtagcgtgttgttgtggctggtggcggtgggagggggcggggggaagggcccgaagggatgaagggaggggggcggtgggggtggcggtggccccaggccactgggcagcagggtcagggccccgggggccaagagaggcacatcgtccggtgcccggcgcagggccagggtgtagtcgggcgggcaggcagggcgcagagcctcggcagggtccgccccgacgccaccaccccgcttcagctgcagtgacaccagctcctcctctggtggcagctcacggcccgcggcggggagcagggggcccccaccaggcacgccagagcctgagccgccaggtgggctaagccgcctgcaccgcagctcctgccgccggtcccgcttgtagtagagggcagcaaaggccaggatgttgaggaagaggagggaggcacccacggccacggtgacgctcagctccgtggagtagtcccgtgagtccccggggaagcggtcataggcccttgggccgggctcgggctcgggctcgggaggcagggtggcaggcggcgggggccggcgtgtgcccggggcgccagcggggggacgaggcggccagcgcgtggcgtagggaggcaggcgcgtggtggtggtgaagagctccgtgtgcaggttgtgcaggtggggcacgagctccagccagaaggccaccttgttggcgcggtagttgtcacgcacgcgtggcttcaggcctatgtgcagatactgcttctccttgctgttgaatttgctccacaccacctcctcgaagcgattgggcttggtgtggatgaacttggtatcctgcggcaccggctggttggggtccctgtgggcacaggagggcagggaaaggaggagtgagggcaaggctctgaaggagggtggatggcagtgggcagggagacagacagagatgcagagagacagggggacagcaagaaagccagagaaaaagtcacagaggcagagagacacagatggatatgaagagacagagaaactgcctgtctcttcaggcaaataggcaaatagggatggagacagactggcagagacagccagaaatgcgggcagaggggcagggacacacacagagatagccagggagaagcagaagctgagcctgaatgaaacacagacagggtcaaagacacgggagggacagccagagacagatacacagccaggctgaaatcagccggcagccagagaaagcgaaaagtaagcagacaaaagagagcagcagagggaggtggagagctgtcagtggattttcagagagacagagacagaagtagagacacacaaactcttacacacactcagacacacacacctgagcagtcagccagagatgcagagccctaggggggtcgggcaggggggatcaggcaaggaggagggagagacagacgccaagccaaagccactgagtgggcccccaactccccagaaaggacagcggcttctctgtct

SEQ ID NO: 30300 - DNA, 2229 bp, Artificial sequence
  DNA replication origin
aggcggcttagcccacctggcggctcaggctctggcgtgcctggtgggggccccctgctccccgccgcgggccgtgagctgccaccagaggaggagctggtgtcactgcagctgaagcggggtggtggcgtcggggcggaccctgccgaggctctgcgccctgcctgcccgcccgactacaccctggccctgcgccgggcaccggacgatgtgcctctcttggcccccggggccctgaccctgctgcccagtggcctggggccaccgccacccccaccgcccccctcccttcatcccttcgggcccttccccccgccccctcccaccgccaccagccacaacaacacgctaccccacccccactccaccactcgggtatagggggtgggtggggaggccctcctccccggccctccctggcccggccactccgaaggcagggaggaggacttggcaactggcttttctcctgtggagtcgtcacacgccatccagcagcgctaaggtggacatgggattcctccctgcgatgcgtgtctttcccacgcagagaagcccagtctcttctctggatctgggcctttgaacaactggggggcgttttctcccccccattgggacaccagtcttcggtgtgtggaatgtggtattttcccgcgtggaggtgtgctttctcacaacggggtgtgttttcccatgtgcagggtgaggtttttttttgccaccctggacacatgttggccccctcaaagaatttctgtggggatttgtaccccagaatcctgttcccccatcccttctcccacctcctcccctctccctccccctggagaccctggaagtggtgtgttcacatacagtgacccttggccaccagaccacagaggatggagcctgggaagcagcgaggaaatcacagccccctcgcccctgcctcccttgcccctaccccggcgaagcatgttccccccgacgccccccttggcacaagtcagatgaagcacgttctgccggggaggccctcaccttccagagaggacagacacagatttcctgctgggggagggaggagtccacgcatcctgatgctgcctggaagcttattttcccgtggccaggacgcatttctctgagtggaaacaggttcttgcatgtggatgtgtgtttccccaggcagacggcccctctcttcccagcacttccctgcctcccccaggcctcaggcccagcacccagttcctcctcacatggcaggtgagcacagacttctagttggcaggagctgaggagggtgaacaaaccccgagggaggcccggcccttgctcccgagttggggggagggggtgtggcaacgtgccccccgcagaggccacgcatgtttgaccaaagccctcattgtggtccgaggacagccttttccccaggcctcagagcattgctcatccgtgccaaactgggtaggtggatttgagcggaaagactcccaaaatgtgccaagaatttcccagtcccaggcagggcaggggaaactaagggcaagcaggatacagggcgagggatgtggcaggtgagggggctcccgcctgtgccccttctcctcaccatgtctcccccaccctgcctcagttctccgttccccttcatctccgtccccctctttgaagctgtccccatctcagtgtcagaccagccttctcctcagctgaccaccctcctctgacccacgccccctccttgtctgaaagaaaggagccttgaatggtggagggaggcagtggggagaaaggtctcaccggacaggttgggagaatgaggtcagcggtgctggggaacagatggagggggcagtggggacagggcttgggcagacaccagcaggaataatttgaaatgtgtgaggtgactccccggagggccttgggcttgggcatttgggaaaagaatgatgtctggaagggcttaagggacacagtggacgaggggagagtcctcatctgctggcattttgtggggtgttagtgccaaacttgaataggggctggggtgctgtcttccactgacacccaaatccagaatccctggtcttgagtccccagaactttgcctcttgactgtcccttctcttcctacctccatccatggaaaattagttattttctgatcctttcccctgcctggtctagctcctctccaaacagccatgccctccaaatgctagagacctgggc

SEQ ID NO: 30301 - DNA, 1716 bp, Artificial sequence
  DNA replication origin
tcttctgcacctgccgcttcagctccaggctgtcgtacacctggtagttggcattgccccctggattccggctgagtgggacaaacatggtcgggggaggggcagggtccgcagcctggactttgggccagggctgggaggaatgggggaccagcactgagcttggagctggggtccgttgatgggaggcctcgtccaacaccgtgagggaggcagaggtagtcagaggacgccaggcgggcagagcctcagcccagtcagctgcccgacgccgcacctcacgggggtcctgggagctgtagcccaagggttccgtggatgggtggggactgcggtgggactggccataggcgtgaccaagcaggctctgctggtgggactgtggggagtggtgctcccggcagccctgggcctcaggccgggcgttccgggacaccgaggcaggggggcgctcaaagccctccgtgccacgacgccgctgatcccaggagtcatacagcatccagcccactgaggggtaagggctgtgccccacggggacccaagaggggttagggggcagccggtggggaggtggtggagacgaggcccactgctcagcctccacattgccccacagtcgggattgggaaccgtggcgcccataggactgcagcctcagctcagacctggcctctacacgcttgggcatgcagcgcagctcaggtgacaggtagagagagggtggtggcagactggccaggataccaccctggtggccccacagccccacattggagggcaggcccgctctctgataaaacccgccccagccgcgacgtgggtacttgggatacgggaagggcaggttgtcctcctcctccaggtaggaatccgggtcctcctgatcaaagaaaggcactcggtgtagttgtgacatcttttggctgcgatgtgggttacggaagactgagtggctatgggggatttgtctgtagttctgcggccgctgctggtggttgcagcagcgacggcgacaacggcggtggcggcggcggcggcgacgaacacagcgaagaagactgctactgtgatggttggagaaatggtggcaggagaaagaggagtactgcgtgggtcgggacatcttcacctgcacagggtccaggatgcagtggatgtggacatcctgagccttgtctgggggaccacttgggggactttcactggcctgaatttcatctggggaaggcaagagtccatgaagtcagggcaattgtcagaagagctcaaggttgggaacactggggcctgggtttctagggccattgtcaggggtggggatgggggtcccctacctctccagcagccacacttacttttctgagtagcccaatcaatcatcttgtctaaggcgttctggagtccatgccacatctggggcagggtggaagagagtgaaggccaggccctccgcgcccagcaccaccacccctgcccccgccccaatctagaccgcacctgcaggtggagatgtaggctgcagctggctcccacccttggccctgttcacccccagaggtagtccacaatcatcactgaccatagttgccacgttgatgccaatgttgacaagaacgatgaggcccagcagcaggagtaagatgtcctcggcatcgtgggggctttcttggtattgattgcaacatctcacggtgttatgccatagctggtttt

SEQ ID NO: 30302 - DNA, 859 bp, Artificial sequence
  DNA replication origin
caccggctgccccctaacccctcttgggtccccgtggggcacagcccttacccctcagtgggctggatgctgtatgactcctgggatcagcggcgtcgtggcacggagggctttgagcgcccccctgcctcggtgtcccggaacgcccggcctgaggcccagggctgccgggagcaccactccccacagtcccaccagcagagcctgcttggtcacgcctatggccagtcccaccgcagtccccacccatccacggaacccttgggctacagctcccaggacccccgtgaggtgcggcgtcgggcagctgactgggctgaggctctgcccgcctggcgtcctctgactacctctgcctccctcacggtgttggacgaggcctcccatcaacggaccccagctccaagctcagtgctggtcccccattcctcccagccctggcccaaagtccaggctgcggaccctgcccctcccccgaccatgtttgtcccactcagccggaatccagggggcaatgccaactaccaggtgtacgacagcctggagctgaagcggcaggtgcagaagagcagagccaggtccagctcactgccaccggcttccacctccaccttgaggccctctctgcacaggagccagaccgagaaactcaactgaccagcaggcggatgtggggtgtggggcagggcatggagggagaggaataaagagaaacagagtccaggaaacactgtggtggtctgtagcgtgggagtgccactccttcggccagcctgggtccctgcccttggcttcctgaaatgagaaaccagtgtccccttcttggtgtgaggcaccccttggcttagtggccacgcgg

SEQ ID NO: 30303 - DNA, 1730 bp, Artificial sequence
  DNA replication origin
aaggcctctgatggttggtgggttgaggagggacaaaggatctgggaggaacgagaggcagggaaagagtgaacggtggaggaagggtgcacactgagctctgggcagtggttgcagaatgaaagcaagtcttggcacatgcagtatcccgggagtaggcaaggaatttggggtagaatggagcctgggagtctgtgttcttctcagaactgcaaggatggaagctgcagtaaggggaagtcttggtctgggggaacttatctttggcatcatctgagttcttccattccatattcctcaactccaggtagcccagtatggatcctgcaggaagcttggcactatccccactgcattgctttgtttgctcagatatgccagaactcaccaggtcctgaccctcttggggcctgaagagggtagccaagtcttttcttgaatactcagggttctgggggctggacatatggaagaaattctgcttttccctgcgggcatcatagaccacatggccagtggagaggtcatggctgaaggcaggtggggtagagggtataggagttatgataggggcaggggtggtggcagggacaggatcagggacaggagtggtagtcagggccatgaccagtgctggagcagggctgggggcagaggctgggacaggggctggtgttggagctaggacaggagtagtggctggggcaagagttccgggaggagctggggcagaggttgggacaggaacggagctgcggactagatgagagtggtctgggatatacgctggggcatgggctgaggtgtactcaggggcatgggcctgggggtgggctgggacaggcataggagcctgggctggggagtgggctgaggtgtgttcagggctgtgggcctgggagtgagtatactcaggggtgtggggcggagagtgggtttgggcctgggctgacgtatgggctttagtgtgagctgaggccttggccggtgtaggggctggggtgtgagcttggatgtgggctggcgtctgagctggggtaggggctgaggtgtgggcttgggcctgggctgaggtgtcctgggcctgggagtgggtgccctcaggggtgcgggctttggagtgggtccaggagtgggcaggggtgtgcacagcggtgtggtccgtggagcgggtccaggggtgggttggggtgcacacaggagtgtgggttggggagtggacctgggcctgagctggggcctcggctggggcacagtctggggtcttagtcttgctctcttggggcaggtggcatggacccgtgtccaacttgctcatctttgggaactgggaagatgtctctggcctggagagcaaggaggcttgagcctttgaggctgtgacctgaggggcttctcccccgcccatcatccccgccttgtacagtccccgtgcagactccctgggaacgccggcatgtccacatttagggggcacgcagcagcacgcagaaaccttctcatcgttcgtgtctggtatccaggagtcaaggtggttaacgcgcctgagcaggaagcctgggcgaggatggacgcgggaagagacttttgagcacaggttcttgggatccacggaggagcaaatacatatgggatggctgccgctgggctgcttgtctgcagggagaggtaggatggggacaatgcccgggttccctagggactaagaactgggccagggataggagaaa

SEQ ID NO: 30304 - DNA, 1120 bp, Artificial sequence
  DNA replication origin
aaggcctgcggtactacagactcctggatcttggacattgcctgtattcttgtgacctccagaatctttagaagagcctaggttcttttggtggtcagttgcttgggagagatcttgatttttgtagatcacagtctcttggtttggttcaagattcctatagattccagagtcttgtgtaaagcctgagctcctctgaagatcagaagtttgggtaaatggtgttttcttgtggaggccaggggattgggtgagacatgggctcctaaggataccagcttcttgagtcagacctgtgttcttttgggggtgggaatcttgagtaatgcctgaattcttgtgaagaccaaagtcttgagaagggcttggattctggcagagataagaatcttggggaaggcctgggaactcatgtaggccttgatttggagcaagacctgggttctcgtggaggcctggatcttgggtaaggcctgggttcttgtagaggtctgggttttgggcaaggtccagattcctgggaactctggagtcttttgaagggcctggggtcctttgaaggccagaatcttgggtaaggcctagactctcatgacattcagggcattggggttggatcaggggttgggaaatggtggcgaacagggaagggatggggaattgggaagtgaggatggactgaggagacttggaggttggaagaacagtaggggtttgtattaaggtggaaggcctctgatggttggtgggttgaggagggacaaaggatctgggaggaacgagaggcagggaaagagtgaacggtggaggaagggtgcacactgagctctgggcagtggttgcagaatgaaagcaagtcttggcacatgcagtatcccgggagtaggcaaggaatttggggtagaatggagcctgggagtctgtgttcttctcagaactgcaaggatggaagctgcagtaaggggaagtcttggtctgggggaacttatctttggcatcatctgagttcttccattccatattcctcaactccaggtagcccagtatggatcctgcaggaagcttggcactatccccactgcattgctttgtttgctcagatatgccagaactcaccagg

SEQ ID NO: 30305 - DNA, 1390 bp, Artificial sequence
  DNA replication origin
ctccgagcagcgcagcggagtcgtcccccgtacggagctgtcggccgttcagaaaatagtgaggcaacgtcccggcctcgagcactcggccgagctcgtctagcagcccgaggcagcaggcgcccgcattttctggccgcgccaggtagagcgcaggcagccgctcgcacgcccagtacagcagcgtccgcaggaggtagggcgccgccgcccgggtcccggccaccagcgggcgcagtagcgcctgggccgccgcgtgcgcctgcagcagcggcgctggtatgcgcgctttgagcgccagctcctggcgggcaaaacagagctgccaggcggaggcgcacggccgctcggtgccgccaccgggcaccaggtagaaggaagccgactcagaggccagcggaccggcccacgagtggctccgagccccctcgggccagcccgccacggacaccactgggatcaggtcgaagagcaggaggcggcgagggggctcaggggtagccaggaggacggtggtgaaacccgcgtggcgagctgcgtgcaccagacgcggagcacccgggacagggatcagagactcggcgaccgccgccagcgtagcaaagaaccaggcagccacctgggcggaacataatgtgggccacgcttcccgagcctccgacggctttgggactgggctttcgacggctgccttggtgacgtcactactcattgttttcaaaggtgcggtagagccaaggtcgacgacgtcatgctgaggcgactcggacgctgaaacgtcactaggcgatttttccaaagacaccggcgcctcgtgctcagtgacgtagctgtgcggctggtctacagagctttgccagtccttggaactttcttcgctctccgttcggtggatcgaatcacgtgctcctgggactgggggtcctaagcaatcctgccacatctcccggatgggggttccgcacaccatctctgggaggcagacctgtgcgtaacaggattccaggtccagttgcagttcagtgccgtccagtgaaaacatgggcactaggagtgtgaagccggcatcgtagtgaggtccccgggcgtagggacccaggggtgcatgccccagatccagggagccctcgcgaatcccaccacgaagcagcaagagctctgcctggggaggaaagcgagggtcccggcggtgaactagacctaaaaaaagggaacggatcgtgagggcgtcgcccaaagccggggcgggggcgggggcgtggtgaggctgagagctgtgagttcccaaaggcaagtagggttacttaccaagcaaagagaagacaaagtccttggcccggaggagatcggctcccggcttgggcccgtcactccagctctcctgcacacc

SEQ ID NO: 30306 - DNA, 1187 bp, Artificial sequence
  DNA replication origin
taaccagccccccaagagaggagtgcacccacgttgtcaccagtccccagatgtgaacaggccccctacaagtcagagcggatcacagcttcctgctacagggcttcctcgtcctccccgggattgcctatagcaccccctcttccttttcccgacgcccctcaacctgtcctgtcctgttgatccggcgacgggtggcgctggcttcggctccaggctcctccctccctgtcccccgcaaacggagcttccccccacgcccggctaggcgtcccggaccctcgggaaggagtgagggtgtctctgcagagctccccggtccggcgaagtcagagcactgggccggtggctggaccaggcagagcggcggcagcggcagcggctgtgggaagctgaggcggcggcggcggcggcgacagcagttccccctcctcggagagccggcccgggggcggggcagggggcggagacgctgggaaataggagggtgaagccgggcaggaggaaccccggggttccttggaggtagagagtgcggactgtgtcttacaagcaggcaaagccgaggcaaggccgcacgtctcagccttcagaggaggagggacaggaaggcctcctgaacgcacccctgggtaggaaggagaggttgggcctaagggagatggaatggcggacgctgggagaagggagagagaccctactggccgggatgttagtgaagaaagaaccgcacgagtaaagtgggggaagaactggagagatggaggatggggggtggtgagatccagccttgggcgaaatccggcctccttcatatctctgccgttgtgtgagccaaattgatcagaccctggtctccataactccttttcgcgtttggtcagcaaatatgtttctcccatttctattggcccttaagagaaatgaccaaaagaactggggacagacggtttctggaagctgcccctgggcggagtgctggccacagatgtggagaatagcgaggctggaatggggcaacttgtgcgggggcaggcgggtgggcgtagaggaggaaccaacagggaggtcttccagaaggggggcttcaggcccagggcacacagtcagtccccctggcgaggggcgagcagggccccccacgtcccgctcgcccacagaggcactttccactggtaggaacagcg

SEQ ID NO: 30307 - DNA, 1467 bp, Artificial sequence
  DNA replication origin
gcggttctttcttcactaacatcccggccagtagggtctctctcccttctcccagcgtccgccattccatctcccttaggcccaacctctccttcctacccaggggtgcgttcaggaggccttcctgtccctcctcctctgaaggctgagacgtgcggccttgcctcggctttgcctgcttgtaagacacagtccgcactctctacctccaaggaaccccggggttcctcctgcccggcttcaccctcctatttcccagcgtctccgccccctgccccgcccccgggccggctctccgaggagggggaactgctgtcgccgccgccgccgccgcctcagcttcccacagccgctgccgctgccgccgctctgcctggtccagccaccggcccagtgctctgacttcgccggaccggggagctctgcagagacaccctcactccttcccgagggtccgggacgcctagccgggcgtggggggaagctccgtttgcgggggacagggagggaggagcctggagccgaagccagcgccacccgtcgccggatcaacaggacaggacaggttgaggggcgtcgggaaaaggaagagggggtgctataggcaatcccggggaggacgaggaagccctgtagcaggaagctgtgatccgctctgacttgtagggggcctgttcacatctggggactggtgacaacgtgggtgcactcctctcttggggggctggttagattggagggcgtgggatctaaacagcaccagctgtccccaagaaaatttaaggggcagccaggggagaaaaaaacaaaaacaaaaacaaacacggatgctcctcattttgaggtggcggaaggccctccagtcaactacctggtgtatccactaggaagggtggatttggaggtgacttcaaaaggagcggagggtgtgaaggtgaagaaagggtcttggccgctagaattctatgctactagacatgggggggacttggtgaaaaaggtattatccagccagagggtctgggagccctgtcttactgaacctgggcaacctggatattctgagacatattttggggggatttcagtgaaaaaagtgggggatcccctccatttagagtgtagcaaaggaaaaaacaccaaggttgggttccttcctgacattggcagtgccccagtaggggtgggatgagcgaatattcccaaagctaaagtcccacaccctgtagattacaagagtggatttggcaggagtgtgccccaaaatacagtggaaaggtgcctgaagatatttaaaccacgtcttggaaatttagtgggtcttggctttgggataggtgaagtgaggacagacactggagaggagggaaaggggacgttttcaataggaggcaaaactcgagggtgggatccactgaggagtacataggctgctggatctggtggagccagcactgggcccacggg

SEQ ID NO: 30308 - DNA, 1342 bp, Artificial sequence
  DNA replication origin
ctcaaccagaagggggaaggagtgggggaggagggaggggagagatatatcaaaaggcagggacagagggagaccagcaggggtactgaaggggcagcgtgtttgcgaaggtgggggatcttggcagcagcaaattgaccacagggtaggggctctccctcaggagtgggggtgggactgggcctgacgctgactcagcacctgctgcggctgccgctagcttggcgagagccttgccttggcccagcgccggcctgtctgacactgacccatctgtctgtctgtctgtctgtctgtcagtccgctggctcccgggggcccagttctccctgaggctcagcctctccccttcggccaggtaactcgcctggggtaagggggaccttaccaaggatatggggggtgggagctgaggagatggagaggcaggctgagtcacgtgggggcccggtcctactcagagggtgggctgcggattgtaccactatgggcagccggtggcgcggggaggagggcgcgaggtggctacccttaggggagctgggagcgggcgggagcagggccagagggactccctgactgtcgtacatggacggggaccaattctaactctcacaactctcctcccccatcgcttgctctctgccgacttccctgtccccccttgtaggtggtacgacccccgagtcggcgcccatctctagccgtgaactgtgtctgagttcctgccagcgtagggtcccctgagcctacgggacccgatttcggagtggcgcgggggttatgggaggggtgcccagctccgttcttgaagcgcaggtcacaggaggagggcgcatagagggctggctggcgaggtagctgcaaggacacccgagggagagctggggagattggctcggagccagcagagctcgaccaggaggaaccgagcccaggcgtggaggagcgggagaaccggggcaggcgggggctgggggggggcgtgcggctggagctgcagaaatccttggggtgacccaggcatctggaaacccccgggcccctccgctccagattgaaagaatcgcgagaaccggcacgtaggcggaggacgatgggggtggggactgctgtgttgggaaggggggacgagcaggaactacgaggctttcggggcgccaggcagcccctcaagccttccccttgacctcgaaaataaggagactccgggttatggacaaaagagaagggaaactgaggcacagtctggcagggactttgtcgtcctggcccacccccttccactttcggggagcccctcagccgggccctattcttcagagtccctggcctcaatctc

SEQ ID NO: 30309 - DNA, 837 bp, Artificial sequence
  DNA replication origin
gcagaagtggccctggcgagggtgtccagtgttccagaatgtgtccagaccaaggtagaaggtagagtagggaaagaaggacacatgaatcctgagctccagtgaatctagaaatggctcagtggcaatgaaaaggggcacaggactccaggaactggctgagccggggtgggaagtgtttatgccctggctgtccatgtgggaactcccagcgccatctcaggaaaaggcatggcgttgtgtgagtgtggaaagaaagaagtgatcagccaggaccatcttcagacatccccctctctgactccctcctaggcccaaagatctaagggtctcagcagcctcggaagtcacagtcagcccctaggctccctcagggtagagcacctagtgggacctggctgctcagggcatgtgtgtggcagcaggggtgagagcaggactgggagacaggttgtggtggtggctggctcactgggagtgcagggaacctccagtccagggactacatttcagggggcagggggactggaaggggaggcctcggggacactgtggagagaaggctcctggtacatggccactgtgaaggggagaaagagaggagcagggaaggagagttaggcacagagggacccaggcagaaccagtgctccaaaagggctcccttcccgtacattcaccctccaagaaccccaaccccacaggaggaccgcacccaaacccccaaagggcaaagccttcctggcttgatctgtcacaaagggtcctcttatcacttgtagcctgagctgtctgcccctaaatgtccatatcaaggtcaataccctctcctgtggc

SEQ ID NO: 30310 - DNA, 1007 bp, Artificial sequence
  DNA replication origin
gcacattcccgggctcctcgtcacttcccctgtgctggcggtcccagcggctctctgagcgaagtcactgagcgagccgccaggctatgaccccaggggctctgctgatgctgctgggggcgctgggggcgccgctcgccccaggtaagtgtaggccccgaaggggcagtgacggggccagcggtcgtggccaggcaccagggctgcacttattctctcctcccccaggcgtccgcggctcggaggcggagggtcgactccgggagaaacttttctctggctatgatagctccgtgcggccagcgcgggaggtgggagaccgtgtcagggtcagcgttggtctcatcctggcgcaactcatcagcctggtgagggcgcgcggggggtggaggtcaggccagccgaccggccgggggcgtggctttaggcaaggccggaccagggacaggctgggggcggggcctgggacgagaccaggctgagatggaccagcctttggtgaagattggatcgaaatcagaccaatggacaagctctggccgtgggtggtggacgggcctggagtagaactgggtagggtgaaggacggacctgtgatcggaccttaaagtggggctggggacgaggcaggggctgggggacggacctcgacgtagggccacatgagtcctgagtgcccagggtggggcggagcttggtgctcaggggtcaataaatggcagcgggtggaggttcggggctgggtggattatgagctgaaggcagggccggggacagagctaggcggagggctaggcaggggcgggtctggtaggttgataggctgggagtgtagacggcaggaagaggtgtttctgagatagaggcaggtcttaaactaacgccgcttctgggaggtggacttggacccgagaggatggggctcagaaaaagggggcggcgttcccaggagagaggttggccccccgagccccctcatttctctccaccctacttcacctttacgc

SEQ ID NO: 30311 - DNA, 1154 bp, Artificial sequence
  DNA replication origin
gcttgacgatggcctcctcccctattcgcacagtgatctgacacagtggaggtggagcctgcagctgagaggggccccggccagcccctgtggggggacccccacctccaccaatcccgcccactggcttggctgtgtaagtcagagtccttccagcccgtggattccggcccttggcctcctccgtggtggtggccatggctggccctgcagcggtggctgggctgactgctgtggctgggctggtgggtgtggctgcaggctcagggggaggaggtgggtattctcgtttcttgggtggcctcgggggagcagtgtaagtgataaccgaggcagcttgggaccctcctgtgctggccgtcccactcccccctccaccactgctactgcccccatggacaatgacagagggggctgggtgggcaaaagtgatgacagagggtggagggccaggctctggggcaggtggaggcccaggcggcgggctggctggcattgccacaggggccggtgtgttgagggttggagaaaggggagcctccggggctccctggctgtaggtcttgtagggccgcttggctgcccgcatggggagcaggcggtagagcttgagtgtattgagcttgggcttgtagcctccattgggtgtcttctcactggcaaggaggcccgggctaatgccgtggaaggctcgctggtgggtcttcaggttatagtaagtgacaaaggtctcccaacagaagatgcactggtacctgggtcaggacagcagggaatagggcaggaacacaggcacttgagtcaagggccctgaagcctcccaggtcctcctacaccctgcactcaaacctgtgactcccgtagccttgtgctgcctccctcaccaggccagcctcagtgcagggtgcccgtctgagctcagtgcctccactggctgtgagactctaggcctcagctattccatctgggacgcagcctaactcacggagccttcttctcaagcccaaatggcagaatggggaaacgacttacgaacagggacaccacgtggaaacacaaggccctgctcggaatagtgtaatgactcccggacatgcctgtgctgccacagtcctttctggtgaggggagttttctctttccttctaggccttc

SEQ ID NO: 30312 - DNA, 1455 bp, Artificial sequence
  DNA replication origin
ttcgtgcggtactccgccagagcaaacactttctcacaatagcggcaggggtacttcctccgccacgagtgtacattgctgtgtctcttcagactggacagggtcacgtaggaacgctcgcaggccgcgcacacatacagcacgtggccgcccaccaccttcaccacgtgctcggggccccctcggaagcccactggtggaggcagggctgaggcgtccacccctgcaggaccaccagggccagcgcccccagctcccagccctgtagacccccgcgtgctggcccctcgtcggcactgggcctcatgggtctgcagccgtttgggatggatgaagctttttccacactgggggcaggggaggggccgccggggcagggagcactgcaagtcaggggcctgggcctcagccctgtcaccctcccactccccagctggcctgggcccgggcccaaagctgtcctcttcaggctgcgaggtggccatgggggctggggtaggaggtacccaggcatcacctccctcccccaggccctgaaggcgggagatgcccagacggcgccccaaagctccaatctctgctacagctgccccgtcccctccaccaccaggcagtgcgagccgggcgctgtagatgaagttgaggacatcagaaaacgcagctgctgggactcctggcaactccaggacccggggtggggaagaagcagggggagaggctggagggggagaggaagaggaagaggaagaagaagaagaagcagaggaggaagaagaggaagaagacgaggaagaggaggaggaggaagaggcagctgtggtggtggcagggttgggtgcggcgcccccagtagctggtggaaggggtagtggggctgaagtgagcagggcctctctgaagaagggacttgaagcagccaggacgctgcggtgagcagggaacttggtgtctccggctatgagggtgacgtcacagaagaggccacggagccgctgttcattgagctggcgcaggacggcgggggcatgggacgggtccgtcacctctgcaggggggggcatggtgccagcctagacagtgggagaagaggccgggtagagtctcagaggctgggcagagggcaggggcttctaaaatcaggcagagagaggatcaggagctgctggtcagaaactagtggaaggctgaatcacttctggtcacagaagtcaggggttggcccttagccacccaagtctggccagcatccaagaccagtatgtctaactcacttctgaggctggaagaggccagagatacctcaggtcatggtgaaggtcaaggggtcatgacctctgaagtcacagactagagatgtaagtgaggcaaatctctctcatgggaaggaggaggaagctccacaactcctgatagccatttcacagaactccccagcctagacaaaatggccgcccc

SEQ ID NO: 30313 - DNA, 2102 bp, Artificial sequence
  DNA replication origin
ggcggcggcggcggcgctggggggggactgtttccgggggtgggggtgggggtaggaccggggcggggggagccgatgatgtcagcggcggcggcggcggcggcagcggggccgggccggggccaggcgctgggggggccagggccggagctggagccggagccggagctggaggcgggcaaaaccggagcggccgggggcggccacggtgatgagccgggcctggcggacgcggcgccatcgcagtcaggtgggccctggggcgaactgggcagggccagggcggaccggagccaactgccaggccccctctccgctgcccggcgctgcgggagccccgaccgcgccccgcgcccagaccgctctcctttggggttgacctgggggcgcaggggtcgggggctgagcctggccccgcccccgggcgcgcacgacgctggggggcgactaagggggccctggtatggcgtccgagcgaggggcggccgtgggacgcgatcgcctggggccgtggaaggggaggtgctcactccctctttgaagggttaattctgcagcctaatggccccctccccccgtggggcagattgggggtggggtggggcgggtgtgagcccgggcaagcgctgcaagctgctgggagggtgatggcgtaggagccaggcagagagggggaggggtgggccgccgagcgccccagagttggggtgtgcggggtgcgcagggcgagctggggccccggaaccgccgcgccgtcggggcagggttgtggctgtgagtcttggagatcgtgtgtcttgtgctgtgtggtggggcaaggtaaacctctcctgggcaccaccgtttgctggcagccaggggtctgggtagggccctccctgggccatggagatagaaagccaggaagggtgtccagtgttgtggggcagagttacaagacgagccctgtggctttgggtgacagatgggtattctgagcagggcacagcatgctgggtgcagagtttgttcgatgtggggctgtatgttttctacagcatgtgttttctcgcatgtgtgtcttgtgctgcacctatgacctgtttatgaactgttttctgcagagctggcatgctgtatgtgttgcggagggtgccaggatgcagtgtatgtgcccttttggagggggcggttgtgggcctttgagtcagaaggcgtcacgtctgggtcccatttctgtggccctgctgaggtgtggtccagtggtgaagagggcgatggatgggtttgcgtgtctgtgatgagcgcgttgcatgggggctgcgcgtctagaactcagatcccaaagatcatgagaggagcgaggaaccccggggtatgtctcaggggcctgtgggtcagttggcactggtgtgaggggctcgaggtggaatgcgccagttgtgtttatgggatcatgggcagccaagcgaggggaaggttgtgtgtttgcaacattctccacaggattcttttgtgacgttgtttgtaggagcctgtctgggctgctgagctgggaggcaaactggtcagaaaacacatgtggggagggaggtggcgtgacaagggcagtgtgggcctcagacccaagaggccagccgcaagcaggctgtgtgtgcgtgcctgccgtctgtgtgcttaagtggcggtggggctgcggaggggatttggtatgaggaaggcgggagataaatgcagggtagcgcatggaggccggcgggaggcatgggtgttgtcagatggcccagctaatctttgcagggtctgtatgtttgcccctcatgagcctgcccagcgtgtcagggtcacccggaggagaggctgggcggccacaagggaagtaagcttagacagagaggctccttggccatgtttatgtaaaggctgggtgtgactcttgtcactaaaatggaaaaaagaaacgtgaagttttcagcctcctcctgcttcaccctctccctctctctgccccccttgtgggtatctctgacgcacactgggccccactcctgcgacggtggaagggcctcagaacagaattcgctcactaggcagattcctcagaacaggttttcctcaccttt

SEQ ID NO: 30314 - DNA, 1026 bp, Artificial sequence
  DNA replication origin
ccgccctggccctgcccagttcgccccagggcccacctgactgcgatggcgccgcgtccgccaggcccggctcatcaccgtggccgcccccggccgctccggttttgcccgcctccagctccggctccggctccagctccggccctggcccccccagcgcctggccccggcccggccccgctgccgccgccgccgccgccgctgacatcatcggctccccccgccccggtcctacccccacccccacccccggaaacagtccccccccagcgccgccgccgccgccgccgagaggaggccggcgcagcgcagccgacaccgacacaaagctccgagcgcccgacggccttccccaggactgacccccgcggcatgacactgcgccgcgctgggccaccgggcgggtggacaccgagcggggcgcgggccgggctgcagcatcccggcaggggcgcaagaccaccgacccccagggaaagggctccctccgcccttcctcctgcacgcccttcactcagcggtgcacactgcctgaaagcataacacacaggctctcagggtgcagacatgacatggcagactcataatcaggcccggtgggactcacagacccagggtcggcacactcaaagagggccagccctggacacacacacacaccctctccaggaatgcgcaggaaagctcagcaggccgcggaaaaagaaggccctggccctgcatacggggcacacacgaacgaccaccagcgcaaatgaacacatgaagctggctgggtactttgtccccaccagcagatagatccacatctgtatacttgaacataaatgcagaggccttggtgtcggcctctggggacagcatcaacaaaacaccaggtggaagcacacacagaaaaaacacattcctgaaactccacagggacaatcccaagaactcctccctggtgctggaaaattaaaaactaaggagatggaggagccagggttcacagctccttgccttaaaacctctctgaggctgggc

SEQ ID NO: 30315 - DNA, 822 bp, Artificial sequence
  DNA replication origin
ctttgcgaacagtggcagcgttgccagcgggcaccacctgaaccgcactgtaggcacatccaatgctgaggacgttgagcagggcatagaagtaggcccggcctcggatgtcaggaggtcccagaagggggtcgccacgcagtttaagtagcagggcaatagggaggtggaagaggcatcgacagatgagcagctccagcgagggcaggttggaagcctggtaagccatatgagaaagggggcccacgaagccagcaggcaggcccccacccagcagggccaccagcaggccattggtggcatcagagggctggcagcactggtgccagcggaggctgggtggagcggagggcggcgatgggtgtgtggagtcaggcgggttcaagtaggggtgactgccagcctgttagggagaaaggagctcagggtagacagcagccgcagcccaggcgacctggggcagggcagatgccaggatggggtctgggaccctgtgggactgtacagtgttgggctatcttgctgaggaactcttcggagctagaaagggcctaaaagatgagtgagatgttataatgtgggcctggagcaggaagcaaggagtgagcagtcctggagcatcgtttccctgggtaagttgttcctgggaggagaaaaaggacccaggatgctctctcggattgaggaaggggaggaagcctcagatgctatgcatctgtatgatgccacaggttccagagacatctgggtacaccattatgaattctatttgtgggtatctctgagacagctaagttttaggaaaggaggggaaatggagca

SEQ ID NO: 30316 - DNA, 2371 bp, Artificial sequence
  DNA replication origin
gactgtaaggtaccctcccattttcctggtcccctccccctaacagatcaagcagcagcccaggcaggaggcaggggcctgggggtctcctgaaccccaatgaagcactcgatgtacatacttttggtcaaaattagtaaactttatttaaacttcaaaaaaataaaataacagacaaaaggcagctttagctttgttcttcccgaggatcagctgtaaccactcacagcaggaactacccctaagttaaaataccctttacccgccccgcatcaagccacaggcaaggaaggatcttcaatttggggacaggcagggggtgggtggggtaggagtgagaacaccactgggccagtgagttctaacagcacaagtggagaacaagacaagagtctgcatcagaaacgggatccagaagttcaccgggagctctgccacaaggcatttatgtacaacggagctgggctgggggtgacgccccgtgagggaggcaagaactgcacagcagcacgggcaagctgccctgggccctagcccgctgccgcaccccacgtgccctcagttctcctcgtcactgtcatccgggctgatagccgggcttgtgagactgtaggtggggctggtgggcgagtaaccaggggaagtgggagagtaggttgagcctttgggggaggtgggcgagtaggtggggctggtgggcgagtacttgggggaagtgggcgagtaagtggggctagtaggtgagtacttgggagaggttggggtgtagactggagaggttggggaataagtaggagatgttggggagtattttggggtggtgggtgaataggtgggactggtaggcgagtacttgggagaggtgggtgaatatttgggactggtaggtgagtacttgggagaggttggggtatactctggggagctgggactgtaagaaggactggttggggtgtacttgtgggtgaggttgggctgtagctgggcgagctggggctgtagctgggtgagcttggggtataggttggagactgtggtgtgtatcgtgggctggaaggggagtaacttggtgaggtcggggaatagctgggtgatgttggagagtagcttggagaggttgggctgtagttagggctggtaggtgtgtagttgggactagtaggtgaatagctgggtgatgtcgggctgtagctgggtgatgttggggtgtaattgggactggttggagaatagttcgggctggtgggtgagtaacttggggaagtgggtgagtagctgggggaggtgggtgaatagcttggagaggtaggtgagtagctgggagaagtgggagaatagctgggtgaagttggcgagtagctgggagatgtcggcgagtagctgggagacgttggcgagtagctaggggaagtgggcgagtagctaggggaagtgggtgagtagctgggagaggtgggcgagtagctgggagaggtgggcgagtagctgggagaggtgggtgagtagctgggagaggtcggtgagtagctgggtgacgttggcgaatagctgggtgatgtgggactatagttgggactggttggagaataggatggagaggtaggggagtaggagggtgaagtgggggaataagagggactctggggtgtgtagcccccaggagagcggggctcgtaggcaggtgacgttggcgagtagctgggagacatggcaccacctgtggggaagcagccaacaaaggagatgagcaatggacagactcacccagaactgtggaggaaacaaacctggcctgacagatggcgacaactcacctggtgaagggatgtaggggcttgagggacctggggaccccggggagcccggtgtgggagaccaggcaggggagtaacctgggctgaagccgctggcatctgacgcagcactgggagagaagccggctgcccctggggtcattccactccctatagagtgagagaagcaagttaaggccagagcgggagaccaaaggcccccaattctccctgccccacctttcactagccctctgcggccttcagagttccaacaatggctaccgttcacgatcccagcttatccacctctgaaccacctggagggccctcttcctggatcaggttactcaccaacactgggggaccaggcgccataggcaggggttgcaccctggttccaaggtgtcatggcaggagagattccacccatgggactgggtgctgaaccaaagaacatgccggtggctgcaaagaggaacacaggaaatcgtgaggagcaagaacagcaatcatggactggtgacacccttgcacccatggcctgcccccccgcctcgccgacgcaagcaggtacc

SEQ ID NO: 30317 - DNA, 1050 bp, Artificial sequence
  DNA replication origin
cggcccctctgcagtctcagctcctgatgtgcccaagaaggggtgcgcagcggggcctcacctgggcggacagcgatgcccggctccccaaactgaccacggccagcaggaggccgaggcaggccagcgccaggcccaggcccagcgcgagcgggaccagcagggcggtgcccggctccccccggcgccccctccgcctctggctccgacgggcggccatgggggcggggggctgtgcctgcctcaccgcccccccatcccgggacccgagggatcgggggagggggagccggcgggcggatcgggccggggagagggaggggcaagggaaacggggcgggagggggcgctggggacaggaagccggacgctgtgtgtgatcaaactccgagcctctcgccgggcgctgtgcgcgcagcgaacggagtgggcgcccacccgacctctgagcgcccagcccgggcgtgcaccaccagggcgaggtccgttgcgtgcggccgcgggagcgacggggctatgcgtgtgcgggcacctcctgcggggaggtggggaactcaggaaggcctgttggttcagattcttctgtgtccctgtgtcttcagagataaggaccctcctttcccccaggtgcagggagggcgcctctcgcaggaggctgttatttgcttcttcaggaaaagggcagggagttccaggttgtatgacctggttcagggaagaagggcaggagaaggtaagaaagatccttcggcttctgcggttttctcaaattccttcagcttaaaacactcactgtgccggtagcacgttctgaagcccatcattaccaatgattgccaagcatctgaggaggaccagcagcatgcaaaagaaacaccaaaattggtccggcaggtggcttacgcctgtaatcccagaaggccaaggctgggggccaggagttcaagatcagcctgggcaagagcaagaccccatctctacagaaaagttttaaaaaattagcccacgcctgtagtcccagctactcaggaggccgaggtaggaggattg

SEQ ID NO: 30318 - DNA, 1195 bp, Artificial sequence
  DNA replication origin
cgccccctcccgccccgtttcccttgcccctccctctccccggcccgatccgcccgccggctccccctcccccgatccctcgggtcccgggatgggggggcggtgaggcaggcacagccccccgcccccatggccgcccgtcggagccagaggcggagggggcgccggggggagccgggcaccgccctgctggtcccgctcgcgctgggcctgggcctggcgctggcctgcctcggcctcctgctggccgtggtcagtttggggagccgggcatcgctgtccgcccaggtgaggccccgctgcgcaccccttcttgggcacatcaggagctgagactgcagaggggccgctgggggccgcgtgggctgaaggcaaggggaagggaggatgggtggagggtgagatgtcaggtggagcggcacagggtgacgctccctccttcccagcaggagcctgcccaggaggagctggtggcagaggaggaccaggacccgtcggtgagtgggcgtgggcgcggtctgcaggctgctggggcatgggaagtgtgcacagccgaggctgcaggtgtgtgcagctgtgccagccgtactcgaggtgtgtgcagggtgtgtgtgaacacagtgcgtgcatgggtgcgtgtctgcaggggtgtgtgtgcgtggtgacaactctgtgtgaggggtttgtgctggggttgtgccacctgagtctgaggtgtttattggctgggggtgacgtggttgtataagatatgtgagtctgcgtggaagaggggtgcggttgtgtacagggtgtgtatcctctgtgcgtggtgactgggtgcgggcatgtgtgcaatgtgccaattgaatgcagggtctgcgttggttgtgtgtgtgggtgggaaagtgtagctggtctagaggaaagggtgaggactggggcctgactcccagcttcacctttgcccggggccccagctgtagttggctgaggggcttaatctgtccctgacttctgtgtctattgctggctggtggctctcctgacaggccccgtatgtctcactttatatctctgggagtctgtggttgaaccctgccctaattcccctaggaactgaatccccagacagaagaaagccaggatcctgcgcctttcctgaaccgactagttcggcctcgcagaagtggtgagcatccctctatcccaacct

SEQ ID NO: 30319 - DNA, 840 bp, Artificial sequence
  DNA replication origin
tcttgctagcccccaaagggcctccaggcaacatggggggcccagtcagagagccggcactctcagttgccctctggttgagttggggggcagctctgggggccgtggcttgtgccatggctctgctgacccaacaaacagagctgcagagcctcaggagagaggtgagccggctgcaggggacaggaggcccctcccagaatggggaagggtatccctggcagagtctcccggagcaggtgagtgaggggaggagggtgtctgggagaggatggttagcatggggggtctctgggcctcctggtctgcaaagtttcaagggggtgcaagagagggtctccggtttggaagtcaggggcgcggccattccaggaaaggaaactgttaaaggttaatgcttctcatacctaacaaatcctggagggcagccagcaccaacactcagggtgctgggaaaaggtgcgtgagagatctgaggcatctcgggggcaggggagggctgggaaggcaggctggctgggaccctcgcatcttaacctaaccttgaccctctttccatgagcagagttccgatgccctggaagcctgggagaatggggagagatcccggaaaaggagagcagtgctcacccaaaaacagaagagtgaggcttccagggtgcagcaggggtgggaggtgatcaagcagcgtggggattgtaagcccgagtcagggtgagggtggaggctgccaacagcacaacgggggaaagtggatgcggctgagattccctccttctctcctcagagcagcactctgtcctgcacctggttcccattaacgccacctccaagggtgag

SEQ ID NO: 30320 - DNA, 1523 bp, Artificial sequence
  DNA replication origin
agtttatctgctgtatagccaggtaaccccagccacactctgagcttcacagagggcctctttggccccctactgagggttcctgacccctctattcataccaaacccagcagacccttctttcttccctcgttagcgctcctgaggcctcccagaactgagccaggccatcctgttttcttcaacatctcccttccctgccaggtcctgtttcaagacgtgactttcaccatgggtcaggtggtgtctcgagaaggccaaggaaggcaggagactctattccgatgtataagaagtatgccctcccacccggaccgggcctacaacagctgctatagcgcaggtgagagccgtgtgggcagccgaaagcaggacgtctctgaccgggggtagcagtgcagggagctaccgctaggagggaggttggaaacctaaacagaggcgggtctgaggagtgaagtgcagaatgccgggtccttacaggaggcagaggaacggtggagctggagaaggcagggggaaacagggcatctggatggctgtgcttcactgcgaatctactttctctcttttctcaggtgtcttccatttacaccaaggggatattctgagtgtcataattccccgggcaagggcgaaacttaacctctctccacatggaaccttcctggggtttgtgaaactgtgattgtgttataaaaagtggctcccagcttggaagaccagggtgggtacatactggagacagccaagagctgagtatataaaggagagggaatgtgcaggaacagaggcgtcttcctgggtttggctccccgttcctcacttttcccttttcattcccaccccctagactttgattttacggatatcttgcttctgttccccatggagctccgaattcttgcgtgtgtgtagatgaggggcgggggacgggcgccaggcattgtccagacctggtcggggcccactggaagcatccagaacagcaccaccatctagcggccgctcgagggaagcacccgccggttggccgaagtccacgaagccgccctctgctagggaaaacccctggttctccatgccacacctctctccaggtgccctctgcctcttcaccccacaagaagccttatcctacgtccttctctccatctatcggaccccagtttccatcactatctccagagatgtagctattatgcgcccgtctacagggggtgcccgacgatgacggtgccttcgcagtcaaattactcttcgggtcccaaggtttggctttcacgcgctccattgccccggcgtggcaggccattccaagcccttccgggctggaactggtgtcggaggagcctcgggtgtatcgtacgccctggtgttggtgttgcctcactcctctgagctcttctttctgatcaagccctgcttaaagttaaataaaatagaatgaatgataccccggctccatttcccccactgcctcgcctcagcccggtcctcgtacggggatctcccgccctcct

SEQ ID NO: 30321 - DNA, 815 bp, Artificial sequence
  DNA replication origin
cgggtgtgacgtactaatcgtgcgccaccgctgccggtgggcccggggctcgcgggaggggaaggaggagggggggaggagtggcggcggcggcggtggcgctggtggcggcggtggcggaggtggaggtggaggtggaagctgaagctgaagcagagccagaggcggcgcggcggggtgctcggcggcgcggcacgcggcccagaagcgttggaatcctgaattgagacggctgcgcctaaagacagcaggagtggcggggccgccgccgtcgccggagagatgagccgggaagcttgaggccggagacgcccgccttcgggcccgtccgcccggcttccccgctcccggtgaggacgccccctcccctccccccagccctgccttggcctctcccattcctgggcctcgctcccaccgaaccggggcccagaggcccgcataggggcttcttaaggcccgtgtgcgccgagccatccaagctcgtgggaccggactggtgccgggttgcattctggtccccgaggatgaagtaggagggggctgggccggcctggcttgtgcgctccgttctgtcccagcgtcttgattcggttctctttaagtttccttcaaagttcttccccgtttatcagcctctgccccctgaaccatatccctggcatctgcacttgagatgaccgcagccttcccatgccccccgttcatccagggtgttagagaactgtctcccattccagtccagtttccacgtgcaagttgcattctcctcaagtaccacggttatcatgtccctgaggaaagaaactgccctt

SEQ ID NO: 30322 - DNA, 1479 bp, Artificial sequence
  DNA replication origin
agaaaaggcagcagtattctctccacatccccaaggccccagcccttctttcaaggagggctttcaagcctcacctggaaggggtggaaaactcctgctggaaaatgtcctccagcttctctactacctcatcagtgctgaggggtatgaggctgccatacgtttgaaggaattcgtccaagatgcctggtggaaagggagagaggagggggtgaggcctccagactctcctctaggagtcggagaagggagagaggctagttgcttaagggctccttactctgtacgcaggtcacatgctcctctcgcagggggctgtgctggccggctttctccccaggcctctctgcctcttctgccatgcccaaatctgagccctgaaaaagctcctgggccacatggtccccgatgctgcacacattgctgatgaggatgctggcatcagggggtgccaagctgcgctccccttctggcccagattgtcccccaaaaccgttgggcagagtacatgaaaggaggcctatagggcaggggaaatggaatgggcatgagagactggcctggggaaagcacaatgggatgcacacagttgactcatgcatgcaaataagaccgcaagaaggatacactgaagcagaatccaccaatgtcaatcccactccaagaaatggggaccccataagcatgagataaacatgtccaagagattctacagggatggagagagagttcctactcatagacaggaagaaagaaaaaggattagcatttagaaatgaaaacttcgggatatttgtcaccactatatgccaaacacccagcatagtacccagcatattgtaaaggctcaatgaatactagaatatgtaataaagacctagagagcctgaaactgtttggctggagttctccgaaagggaaatattctttcacaactgtaagatgatgtactccactactgggagagatcccatcccgtcactttgggaatggtaccctctggagatgtatacacgggggttcttatactgagaggccgacaagggatttcgtgtggacaggatttttgtaaaccacatctccctttctcatctgcgctcaagaccacgggatacctacttagggcatctgtttcctagctctgcctgggaaactgccaggctcactcccaggcttactttctgctcaaagtggggcttaatggagacatttcgcagctcttctggagccggcactcttccatcctactttccttaagcccagctctcaccatggcaacaggctcctggtgctccaggctcttaaccctccctaacccctcccccgcaaccccacacccctttcccaccttacccgagtcagggtccagaggagactttggagtccacctgagtccatcttcctccatggggggcccagagggcactggtggagaccctctcaccccatcctcagccatgagagcacctagcagaccca

SEQ ID NO: 30323 - DNA, 963 bp, Artificial sequence
  DNA replication origin
gaggcgttcccctcccccagtctgcttcgcttctaagtgttgtgcaatctccccctttgctagctcggcttgggctcattgtgcgcgaggccgccaccgcccgcggcctcccacatccgggcaacgcgaggggggggcttcggctggagggagtgggggagggcgcgggcgggatgacgtggggggaaggggatgtcctaccctccgatctgggaggtgaagggcgggacttccagcgcgctggtgctgcggtgggaggtgcacgcgcttgggctttaagcggctgggtcgggcccacgtggacccggcggcaagcaccacctctgggcaccgtgagcgcggcggcacgcctgccggcctgtcttcagaaagggtcacccccttatgtcgggggtggcctggcctgagccgctgcctgcatggggcaaatgcctcagttttatagaaactcctcctttgggtattttttgggagctggtgggagttggatctgggacagcagattgatggcatcatgcaggccactcctgacagagcccggctgtcaggatttctgagtgcttcggtcgggcaggggacaaaacttatgctttaaaccaacagatccagagacaatggccccgatgggatggagcccgaaggcgtcatcgaggtgagactggagaaatggaattctgtcctcccccattacaactttcagccgtatagagttagagtggcctcttgattgatttcccagatcatctagaagcagctggtttccctaaagggaggagggttgtaagctctgaggcttttgttagtaggcaccagattctgtttgctcggagactacagctcagctccaccttttccatgactcaagctttaatttctttgcatcccctagagtaactggaatgagattgttgacagctttgatgacatgaacctctcggagtcccttctccgtggcatctacgc

SEQ ID NO: 30324 - DNA, 886 bp, Artificial sequence
  DNA replication origin
ggtcctgtggggcgaagaggaaggcgcaggtggtatccctctccacagaggaaggagtagcgtgtgggattgggaggggaggggcgccgggaggctgagtgaggggtgagactgaggtcatggctatacctgcatgaatccaaagctgaggtgtccataggggaatgagagaagcaggtggggatgggcaccctcacagcttccctggaccttggttttgttggggttcagtacagagatgccccaggcctgcggaagttaaagactggaaggtcacaagactgcatgcgatgccggccaaggttccctgtcccctcttccttcttccctctgagcctatatccagtcctgcctccctcccctctcatcccccagttttagctttacctctcctccaccctgggttgtgtacatgactcgaatctgaatctgggcttggaggtggacacagggctgggaaccattggtccacgtgtagtctccaatggtctccttggaggttgggctaggactcggagagggtggaggtggttctgggtgggcagaactggtgaatcctgggctggtggcagtgctgttgcttgttggatgaaccgtggcatttccatgactagtggtggcaggactgtgagtggcagttgagggtccctggctggtggcagtgctattgcttgttggatgaactgtgacgtttccatggctggtggtggtggggttgtgagtggcagtcgtgggtccgtggctggtggtgcctgtggtggttgtcctgtgagtggtggttttgtggctcttggtagtcctgtggctggttgttccagtgctctctgtaaccgtgggtgtcaccgtgaaggatggcagcaaagtagctgattttttgtgaggacag

SEQ ID NO: 30325 - DNA, 900 bp, Artificial sequence
  DNA replication origin
tggaaagaaagctgccctgtagccatgacaagctgggagagcgagatttggggggttaagaagagagatgagtggcttatgggcctggggaaggggttttcagtgcagtgggaggattctaggagggaaggagtaggtaggtcttactttgcccaaagacccctgtgtggggcagctgagcagcctggagcctcagggagagcaggtcgaggtggacagctggtgaaagaatgatgctcgagttgctgcaactgaagctctgccccaggggtgcttggagatctcgaagggatgcattctgagccgagaatgtccactctggaggagtgaggaagggtcagatcctatccacctccctggccccagcttagtcctttcaggaaccctggcgtctagtggtagcaatgagaaagggaaggaggttacttacgtgctgcgtgggggaaggacacattgtactccaccgccatgtagctcaggtagacaaccttctgctggaggtcctgtggggcgaagaggaaggcgcaggtggtatccctctccacagaggaaggagtagcgtgtgggattgggaggggaggggcgccgggaggctgagtgaggggtgagactgaggtcatggctatacctgcatgaatccaaagctgaggtgtccataggggaatgagagaagcaggtggggatgggcaccctcacagcttccctggaccttggttttgttggggttcagtacagagatgccccaggcctgcggaagttaaagactggaaggtcacaagactgcatgcgatgccggccaaggttccctgtcccctcttccttcttccctctgagcctatatccagtcctgcctccctcccctctcatcccccagttttagctttacctctcctccaccct

SEQ ID NO: 30326 - DNA, 826 bp, Artificial sequence
  DNA replication origin
tatttatttatttgagacagtctggctctgtcgcccaggctggagtgcagtggcgcgatcttggcttagtggcgcgatgacggctcactgcaacctccacctcctgggttcaagcagttctgcctcagcctcccaagtagctgggattacaggccagctgggattacgccgccacacctggctaattgtatttttagtagagacagggtttcaccatgttggccaggctggtctcaaactcctgacctccagtgatccacctgcctcagcctcccaaagtgctgggattacaggcatgagccgtcatgcccggctttctttttgttcttcaagaaagggaaggaaaataacattgtctttgagccagttgcgtgtcgaggaaataagggtacccccccaccacaccccaaccccctcagtgccctggggtttgaagcaaatgctcagagggcctggtaggcggatgggcgtctccggatgatgcagaaagcaataagcaccagggcgaggaggccaagaaggatcaggccgatgatgagaggcagcaagatggaccggtcactggggcaggagaaacctggcggaaggatagggcaggtaggtatttgcagtgacgtgctggttgggataaaggtgggaggagggaatggggggatgctggggagtaggagattggtgaggagctcaccgcagtgactcagcagtgataaaagggggaaactggcagagtcttgtagaggatggaaagaaagctgccctgtagccatgacaagctgggagagcgagatttggggggttaagaagagagatgagtggcttatgggcc

SEQ ID NO: 30327 - DNA, 1382 bp, Artificial sequence
  DNA replication origin
ggctctaaccttgacgcctgcgcggtggccctcggggccccgcgcgcagcgggcgggtgcccggtgcgcctgcgcagtaggcggcggtggcagggggaggtggaggctgtggagcggcagcggcagcagcgggtcccgggactgaggcagcagcgggggcggcggcgggcggaagctgaggtgacgaaggcagcggcggcggcggccgtttccctcacggtggcggagaccaaggcggcggcggcggacggggagcggcccggccccggccccctgctcgttggctgtggcagggccgccgtggggccggcccggctcccgccccccgcggctccccctccggctcctcctccggggagacgccgggggcctggcccggcccgcactcagactgctgctgcagccgccgccgggggagtcggaggcggtggcggcgccatgggcggcctggcctctgggggggatgtggagccgggactgcccgtcgaggtgcgcggctccaacggggccttctacaaggtgagacggcgcgccgactggggacgccggtccttagccccctcccctggccggagcaggaacgcgtggggcgggatcgagcttctggagctgagtcctggcccttagaatcttggacccttgctccaacccgcagccttccctgggagaccgcttagagtgaaccctgttcctcttatttttgacccctctaaggcacctgcacctgcttctacccccatctccgggagaatgaacttcaggccattattgtccctggcttggcgctccccgctccgcaggagagacccctttacccagcttctaattgactgtgtccgttgtctggtggaagacataccttagaccttaatcacatcttccccacgatccaagcacatggagaattgtctttcttccacacggtccctttgggaaggccctctgtcccgtaaaagatcctttcatcttcctcagagaggcctctgcctactggctctggaacactcaccccactttcatcttatattccggttcccaagccaaggagaaatggtcagatccatttacgacgtttggcatctttgacctcaggaaccctgggttggatcagtcaagttgcttcccagccagccataaggtggcatctttcgcaagtctctctccccaccacaccttgatctcaagacccactgctctaccattctactcaggaatggatttgaggtctcacttagacctcagataccttcaggtcattcatatagtttcttcgtcttgaggcatgtaagcttcatagtcataatctctaaaaggatctctgaaaggaagcttatgaggttcccttctgtttatcttaagatttccacttcttgaagactctt

SEQ ID NO: 30328 - DNA, 1162 bp, Artificial sequence
  DNA replication origin
cagactcagaagcccaactggcttcacccagtggatccagcaccaggccgcaggtggagctgcctgccagtccagtgccatgcacctgcactcctcagctcttgggtggtcgatgggactgggcgccatggagcagggggtggcgctcctcagggagactcgggctgcacaggagcccacggagtgaaggggaggctcaggcatggtgggctgcaggtcccgagcactgccctgcggcaaggcagctaaggcccggcgagaattgagcatagcagctgctggccctggtgctaatcccctcactgcccggggccggcagggccggccggcgctccaagtgccacgtccacccaaaatcgcgctggccggcaagcaccgcgtgcagccccggttcccacccgcgtctctccctccacaccttcccgcaagctgaaggagctggctccgaccttggccagcccagaaaggggctcccacagtgcagcggtgggctgaagggctcctcaagcgcggccagagtgggcgccaagaccgagaaggtgctgagagcgagcgagggctgtgagggctgccagcacgctgtcacctctcactgagggctgtacccgtctatctccttcccgtcagtccgtgcaattccagggacttagccgtctgggttcccaacaaaatgggtgtttgcaaagacaagaacaaggaaagagaagacttctgaaacacagatatgtggggagaggggaatggaacagtgctgtttaatggggacagagtctcagttttacaaagatgaaaagagttctggaaatggatggtggtgatggttgcacaacatcgtgagtggagttaatgccactgaaatgtacacttaaaaatggttaagatgacaggaggctgagacgggagaattgcttgaacctgggagacagaggttgcagtgagccaaggtcgtgccactgcggtccagcctgggcgacagagcaagactccatctcaaaaaaaaaaaaaaaaaggttaagatggtccaggcgcggtagctcacacctgtaatcccggcactttgagagaccaaggtgggagaatcattcaagcccaggagttccagaccagtgggaccccagtctatacaaaaaatttaaaaattaggccgggtgcagcagctcac

SEQ ID NO: 30329 - DNA, 1198 bp, Artificial sequence
  DNA replication origin
tggagtgcagtggagcgatctcggctcactgcaagctccgcctcccgggttcatgccattctcctgcctcagcctcccaagtagctgggactacaagctcccgccacgacgcccagctaattttttttttttgtatttttagtagggacggggtttcactgtgttatccaggatggtctcgatctcctgacctcgtgatccacccacctcggcctcccaaagtgctgggattactggcgtgagccaccgcgcctggcctaattttgcatttttaagtagagacggggtttcaccatgtgggcaaggctagtctcgaactcctgacttcgtgatctgcccgcctcggcctcccaaaatgctgggattacaggcataagccaccgtgcccggcttgagataatgattcttaacatgtggtatgtagagcaagtgtactcccgccctagactgtgagccccgtgagagatgtggcttcagtgtaacctctctggcctccccagggctacagcacacagtctatagaggtgctcaataaatgtttgttgacccaagtagacacataaggaggtgagttccgacgtgggggtgggggtgccaggaggcagagaaccgaagtagacctggctgcagggctgggatctcagggcagtgctggggactgggaatgtggtgttgagagggcttcagggagacgtgatgggaagatggggaagcctctgcacgtggacagagccaggtggtgtggacaggggctgtgagattggagaaggaggcgtctgggggactggtagcggctcccaacaggggaacgtccctctgggggtggcctttatccatctctgcggggcctgtcctagcttccctcctggctcggccagcctcccggctggtctcttcgctctctttcttgatctctagctctttattcctctgacattctgccccatctgctcccggactcttccgccgcatctgtatcttagtctctttctaactccctgcctggggcccccacctttgagcatatatcggcttctctctctgccgttgtgtttctctggggttatctttccctctactccgcccggacacgccctctatctcttcctcccaccctgtcccagtctagtacctggggtgggggtaatggagagacagctaggtccctaagagaagtcaggggggcgggcccaacctc

SEQ ID NO: 30330 - DNA, 1401 bp, Artificial sequence
  DNA replication origin
ctcgggggcgcagggtcccgccgacgcggccccagctcccctcccgggtccccggcgtccagcctccctgccgggctctgggctgggagggggccgaatcgccagtctaatctccccggctggccgtgcggaggcggagaaagtaggtcacagccgccttcccgccccccgcggagccccctcgggcggggggtcgccagctccgcctgcgtgtccgcgccggcgctcacactccctctcggggcctgtccgctccacacgggcgtcccccacctccaaagagcgccccttccctccctccggctctcactagctccgcagccccgtctatttttagctcgtgcccaccccctggaccctgggaacgttcatgagggggcgggtcttggggggtgtgttaggggggttcttcacggcggaagttgtctgtatcccaccgcctggccttgggagccttctgggactgctttgtgggttggggggctgctgatagtatgagttttaccgaggctgcaggttttgctcccatgtcggtgacggagggaggagtggtcgctgtggtgatttgtgtgcatcagccagccaggtgtctgtgacagtcggatgacttggaagcctccccaggctgaccatggcaggactcagggagctgtagtggtcgggggttgggggggtggagggggtctggtgaccggcacaggtgcaggtgaggggtggaattcttccaagagggatggtcaagctgggacgttgagacacaggggacagaggacactgtgtgacacgatttacaatctttccacactgggcaccgtccccatcagtccacccattcggggcctacacgaagtgggtcccatgcaatccattccctcagggaactcaaactccagcccctgggatgagaagaatccagcaatgcttgggagagccagaggacttcatggaagaagtgtcctctgagatggaaggattgggagtccagggtggtgggaacagccggcccttgggtccttacttcaggcgggggagccatggagagatcccaccaagggaaggctgtgggagattctgcctttcctccctgcctctgcccagggtgctgggtgtgaactgagggtggggtgactgttgaaggttctaacaagccgtctctgagagatttgtagctaggctagtgttaggtctttcatttcaggaactgtgttcaaagtttggcttctgaagggcaccaggagagagatgttgctattcaaatctgagggtccagtctctgcggggtggtatgagggtttgcttgtgaatggtggccagtacccgctttaaaaggcaccatgctagcacagctttaagcatgagtacgaatgcagaggtaacagatgtgtgccttgtcaggactat

SEQ ID NO: 30331 - DNA, 1776 bp, Artificial sequence
  DNA replication origin
gcttgggcatttaggtcctttgggaggatagatgtggggagcatcagaggtctttgtcctgcttgtgacagacagcatgggggggatgttgagtccaagcatgttggtgctgggacgggagacagacctctgcttagcctggttagtgccaggagccattgccccctcccccactttgttccttccctctctagcaaaaaagcagggccagagcggcatcatctcctgcatagccttcagcccagcccagcccctctatgcctgtggctcctacggccgctccctgggtctgtatgcctgggatgatggctcccctctcgccttgctgggagggcaccaagggggcatcacccacctctgctttcatcccgatggcaaccgcttcttctcaggagcccgcaaggtaggggtcacaccctgagagcccaaagcagctgggcagcggggcaggagcagggatgtagtctgcagtgtaggggaatgggtggggatggggaaaaaatcccaagctgaaggagtgcctggagaccccgagggaggcagggacatccagggctttgggggtgactccaggtcctgttccttgtctccaggatgctgagctcctgtgctgggatctccggcagtctggttacccactgtggtccctgggtcgagaggtgaccaccaatcagcgcatctacttcgatctggacccgtgagtggctgtgactccttcctacacagggccctgataagcctaggaatgccagagcccagctgtagggtcccagtccctgggtgtgaggggttcctgccccaggggtgaggcctctgccagcaaatctctcctctctctcgcaggaccgggcagttcctagtgagtggcagcacgagcggggctgtctctgtgtgggacacggacgggcctggcaatgatgggaagccggagcccgtgttgagttttctgccccagaaggactgcaccaatggcgtgaggtcctcagttcaattccagagatgttggggcttgggttggggagggaggtgaatcccagagggagcaagtgtcctcactgaaggcactgatagaccctccccatctctccctcagcctgcaccctagcctgcctctcctggccactgcctccggtcagcgtgtgtttcctgagcccacagagagtggggacgaaggagaggagctgggccttcccttgctctccacgcgccacgtccaccttgaatgtcggcttcagctctggtggtgtgggggggcgccagactccagcatccctgatgatcaccagggcgagaaagggcagggaggaacggagggaggtgtgggtgagctgatataaaaaggtttttatgatactagagtcttcgtgtctgttttgggggggcatatgagtgaggtgggggaccaggcagggggactggcgggctccctggtccagcagcagtgggtatggcatattggtcctgaaaccaggcgttgagaggtgggaccaggcaggagccaatggggcggctgagcttggtgtgaagtcaagtgggtgggggtggggcttcatgccattgactggttggttgctaggcaacttggtaaactgaagggggaaacctgtttgaaatctcactcccaaggtgggggcggcaggggtcagggtgagcggggctgagcaggagctgggtcagactgttgggtgtgaccgtgtgagactgtgcagacagtgacagggcgcctgtcgcccacactccacactgtttgccattctccagcagcatggggaccat

SEQ ID NO: 30332 - DNA, 1414 bp, Artificial sequence
  DNA replication origin
gcagcagtgggtatggcatattggtcctgaaaccaggcgttgagaggtgggaccaggcaggagccaatggggcggctgagcttggtgtgaagtcaagtgggtgggggtggggcttcatgccattgactggttggttgctaggcaacttggtaaactgaagggggaaacctgtttgaaatctcactcccaaggtgggggcggcaggggtcagggtgagcggggctgagcaggagctgggtcagactgttgggtgtgaccgtgtgagactgtgcagacagtgacagggcgcctgtcgcccacactccacactgtttgccattctccagcagcatggggaccattactcagctctgaggggagcaggagcactctcctccgctccccggggctccccaggaggcagacaacccagttgccagagtcaaggacacacataaaagagtaaaggtgttgaaaaatacagtcgtcacctttgatattgctgttccatgcggggcgcggcgagggtcttattcattcagcggctgtcgctgggcttgtttctccatttgtctgctctgtctttgggggtgggggacgagtgtgtcatttgaagcagtgactcctccctcctccccccaacaccttcccaaacactgagaatggggggactttgaagaaatactgccagcaggggatgtgattttggacctcacaatcaaagggaagggacgaaaggcctggggaggcttgagagggagaggaatgtcacccctgcccagaggtgctgaaagccagggctcttacacccgaaaaggcaactcctcccttcccccaggataattggaaacagcccttcctgcgcagcgccggtttggggttgtaggtacgccccttcttctcccagccccgcttctccccccagccatctaggaaagacccaagtgtatcccctaaactcttgtttttcactaacccccaggtaacaacagcacttggtccatggagcagtgacaaaagagaccccaagagtgggaggtgcgcagcctgggtttggtttctagctttatcccagacttcctgtgtgaccttgggcaagtcacggggcctccctgagcctcagtttcctcatctctgcaatgggatcgttagctctgcccctcccacttcacacaggtagtcgtgacgatcagctccgccgcactttgtaaagcgccaagccttcaaggttattattattctctccaaacctgccgggagcagcggtgttgttttgggatggaggaggaggctgcgggagcgaaaggggtgggttcctcggggtggagagggcgagagcctttctggattcgagagaggaagattccagcagcttgggcgatcggagggcaggaggggagccgggcagaactcagccggagccagaggctcggag

SEQ ID NO: 30333 - DNA, 1165 bp, Artificial sequence
  DNA replication origin
cgcctctcctttaactcccccctcctgggctcgggactggtttcctcccttagcccgctgccctcaatcccagcgaggctggggctccggctcggcgcccccttcctcgctccctggtccggcgccccatgccgcccccgcccggtccccggctcccccagtcccccacttaggcgggctcacagatcccggggtgctggcgcgtgggccgggggcgcgtagggcgcctgcagacggcccctggaagggctctggtggggctgagcgctctgccgcgggggcgcgggcacagcaggaagcaggtccgcgtgggcgctgggggcatcagctaccggggtggtccgggctgaagagccaggcagccaaggcagccaccccggggggtgggcgactttgggggagttggtgccccgccccccaggccttggcggggtcatggggcccccccattctgggccggggggcgtgcgagtcggggccctgctgctgctgggggttttggggctggtgtctgggctcagcctggagcctgtctactggaactcggcgaataagaggtgagtggcctgcggctggggagatcccagaccctagggcagtgggtagggaagctctgggggcttggaggcgggcttctgtgggcagggaggaggcgggagggaaggtgctggtgctctgatgtgtgatgggttactagacaggtgatcttgggagccagactccgggtcccacgcagagctggatgcgggtggtgctatggatgtcaggagtttggagaccccaaaggggcaaggagaagaaagttcatgggtagccgggagggcagtgaggtgggtatttggatctgtgggaggcctgcgtcgggggctgggcttggagggagcctggttactgtcagctctcaggagagagctgcagattaggtgctgcgagtcgctgaggggaaggcagggcagggtgcctccctcccccagagggactgcgcatccgagatgggaggcaagggggttccgtttgggggctctggggacaacttccccaaggctccttgactctcttcacagtctgtctcccaactcttccccacagccagagggtcagtgaactgttggctgaacgatttcccagccagaacatattcctgccttcctggcttgccggcatc

SEQ ID NO: 30334 - DNA, 771 bp, Artificial sequence
  DNA replication origin
cccaatccgaactaagaagggggaaggagcaggagggcaagggtgctccaggcccggtttttcccccggatccagctgcacccacggctgcctggaaatcctggaacgccttctacatcgcgaatatccctcgccggcctggcgcccggcgccatctgctggacccgttccggctggggcgcacagacctgggcgcggggtcgggcgattgggttctccctgccttttcaatgtcctgcggggcggtggctcactgtctctcgccccagcccttccagctgggtcctgacaccaggccccccgcacccttcggctcgccagatgtggctactttcctttagtcccggagccttcaagccctgggtccctgaggggtagacctgggcggggtggggccgcgaagcagggatccagggcgcctgcgcggaggaggcgggctccgaggggccgcacaccggccactcgcccctccctgcccggggttgccatggggacgcgtgcagacgccggcccgagagggctgcgaggggcaacttcttagagtggcccatcggtcggtctagggaggggagggtcagcgtggcaaggtgtgtgtcgggggcagagggaaggagggaaggagtgctggggagaaggggcagtagtgtcggggtaggaagggacagttgttggggagaagaggcagttgtggagggagagggagcaaggaatatttgtgtgggggagggggaggagaaggggcagttgtgacagctgggggggaagagccat

SEQ ID NO: 30335 - DNA, 795 bp, Artificial sequence
  DNA replication origin
ggagttcgagaccagtctggccaacatggtgaaaccccatctctactaaaaatacaaaaattagctgggcgttgtggtgggcacctgtaatcccagctacttgggaggctgaggcaggagaattgcttgaacctggcaggcggaggttgcagtgagctgagatcgcgccattgcactccagcccgggtgacaagagtaaaactccatctaaaataaataaataaataaaagcacttgtgttgaatcagtgctttctagtgcataaatctatttctcatctctctttactgccaggatggctctcgtcaagcacagtcaaacctgacctttttgtcaatcctgaaggaaccttaccaggagttggctttcatgaagcccaaggacatctctagcaagctccctaagctgatcagtctcatccgcatcatctgggtcaactctccccactacaacactcgggagagactgacctcgctcttccgaaaggtgtgcatatgctgagggtgggatggaggggtttatgagggtggccgggttttctgaagcagggggaatgcattcggcagaggatctgtggttgaaaaggtagtgaagattgcccttctgctcagagactgagctcagaaggcttctaccggcatgatctgctttagggttgctcagcattggagcctgggctggactttctgtttctaggtggaggtggcttaggcaggaagaggggcttcagaagaggagttggtggaagacggggaagcagcaggaagaacagacccccaagctgagctgtgtgga

SEQ ID NO: 30336 - DNA, 799 bp, Artificial sequence
  DNA replication origin
gtgaagattgcccttctgctcagagactgagctcagaaggcttctaccggcatgatctgctttagggttgctcagcattggagcctgggctggactttctgtttctaggtggaggtggcttaggcaggaagaggggcttcagaagaggagttggtggaagacggggaagcagcaggaagaacagacccccaagctgagctgtgtggaaggaaaagctcttcttcccattcctcaagatggagattgcagtgggggagaggggatttaggaaggagcaccggctcttgaggagcagggcctggtgcattcactgggggtgaaaaagccaaagagtgggagaagggacactgagctgagaccttgctgggcagggtggctgcagagctgggctgaggcagagtaaggggccacctaggacaaggagtgggcatggaacccagaggtgtcggcctggccaggggtggagaaccaggggtgggatgagtttcaggagtcaaattaaggagtagggggctgagacatgaagcacgggcagggggatgcagagaaggagttgggtgtcaaggaggtggggacagaggctgtggggactccttctgcagatgagcaatgagatcatccgcttatgctgccacgccatctccctggaccggatctttgagggatatgtctcttccagcaaggaggacctgcaaggctgcattctctgttgtcacgcttggaaagatcactacgtacaggctgtgcagatgcacatccagtatgatacgcctcccctaacatcccatgtctcaactcc

SEQ ID NO: 30337 - DNA, 837 bp, Artificial sequence
  DNA replication origin
ttgagacagagtttcgctcttgtcacctaggctggagtaccatggtacgatctcgacacactgcaacctccacctcccaggttcaagcgattctcctgcgtcaggctcccaagcagctgggattacaggagcccatcaccacgcctggctaatttttgtatttttagtagagatggggtttcaccatgttggcagtctggtcttgaactcctgacttcaggtgatccacccgtctcagctttccaaagtgctgggattacaggtgtgagccaacgtgcccagccattcactcataattagtcattcagttccattaaaaaacaaaacattcattattcccctactgtcttgccaggcactctgctaggtcctgaagacacaaagatgaataagccacagtctcggagaggacagagaggccatcagttatgatgtccctgcctgctggacttggaaagtttccgaggagctgccccaagctgcagtagagttttcaggtgacatgggagaggcagagagatcacagcatgagcaaaagcatgagaagggcacagcatgcagggcagtcagggacgctcaggcccccagtgcaaggtgggaaaggtgaggctgaggcaggagaaggccaggtcctgagggctttcgtgggccacaggggccaagcaaccaaccactggcagtcagacccgggaagcggcatgggcagatttgttcaggtgggcaatacaggagggtgggttgagagggacagtgggtagaggcagaaggacctctaggagaccattgtgcaactcagaaaaaaggatcaccagggccagaactaaagtacagccaagc

SEQ ID NO: 30338 - DNA, 1309 bp, Artificial sequence
  DNA replication origin
cccggagacttaagccacagcctcttcaggcggctccgccctgcccattcgttcagggccacgcctccgttccgctccaggccgccccacctccctcgcttctttccccgtccagtagcagctccgcagtagctctgtcctccgtgaggcctgggcttcctccctccccagaccctcaccattgcattgagagacttaaggcttgttgtcgcgggtgttttacagcactgagctccaatacaactctttcacttttatggctaacacaactaggtatctccagggccacatcacacaaattcggccaaggtcaaagtctgagtgaggtccggcctcagtcctaggtgcaacatctgtcttagctcctggagtccctgaccctctctctcaagcggagaagaggaggaggtctcagctgtccaggctcatgagtagagcagtgcccctcttgatccaatgatcaggtgtcatggccccagaccgcaggtcaatgccgatgacaaaggaggctcggtctgagctgcctgcccggttgggatagtaatagcaggggcaggagtacatgcctgggggaaaggagaggagaagtcagacccctggagcctccgggagagcagggcaggagcagggcaggagcgggtgtgggatgggctggagcagagaatgggttaagttccaaactagggacggggcaggcaggtcctgcctggggagctgtcccacccttggcgctcttcttgcggctctctgcaggccggaagtggatcgtgggcatgaggcagacaagctgcatgggctctgcctccaccaagcaggagttcttccggtcccagccagcaccttccaggtacaggccccggacccagacaccatcctggggagaaatgggagcaggtctgggagaagctagacttcaattgccagcgcccctgacctgctccctctctcctcccttttcgtccaattatttccagtaccctcttttgctcagagccccaagcacaactggctcccaccttggggggatacactaggttgctgtcatccacagtggaaacgataaactcccaggagaggctgtccactgaaacctgggggttgaaggtgagaataagagaggaccctgaagaggagaacacatacatggccccagcatacatccccccctcacactttgcacattgctcacgttgttttggcgagctgaagactgcagcacagcagtgaggaagccagtgggaaaggtgaaaccagacaaccagaagatcacaggaggccgggcccggctggcccacagctcaaactgctc

SEQ ID NO: 30339 - DNA, 1762 bp, Artificial sequence
  DNA replication origin
ctgctactggacggggaaagaagcgagggaggtggggcggcctggagcggaacggaggcgtggccctgaacgaatgggcagggcggagccgcctgaagaggctgtggcttaagtctccgggcaggacttcagtgggtggggcggggcttaccttagaagggcgcgtgatccaaatgagtagggatttgtcaggcagggatcagggctgaaccccgtacactgcaccctgaggcccgcaccctgaagcccgcaccccgcacccggcatcctagccggcacccgccctgaggcgagcgggaccggcagaagacggggcggagccggagagggggactagagcgcgaggaggggcgggaccacaagggggcggggctggggagcgggggtgcgggtgtttgtgttggaaaatccaactgcgccactgggcggagcggcccccccagccccggcctgggagaagggggggccgctcgaccccctgggataccttggggagcctgaacacctgggaccccccccagaaccaggtaacggggagccgcgaggacgtctgtaaagagggaaaccctctccttgcagcagggcaggacgcctgagtctctggaggggtagagctggggatggacgtttgggtcttgggaagggcactgggaagaagactggggcggaggtcatgggtcccctagaagagagaacggcggggaaggaggaagaactgggaggcagatgtctcaggttccaaatgtccagaggggcctgaaaggactccccgttccccttgggctgggattccccttcccgactccagggcggggcggggcggggcgcggcggtccttactgaagggcaggactaaagggcagagtttgcagacaggtcaatgccatggcccagtaaggtcagatgtggtcagacttgggtgtgtcccggtcccaggactactttaagtctccctccagttctctgcacgggtgaggtgtagaagcctcagcctgaccttcccaccagcggccccgagagcttcccagcggtagccttcgccttcttcccaccacccccctgcgcctccctttcactccgtctcgccccgctagcctcctcatccctagtccttctcccactccgccgttcccgaaccctagcgcgccccgcacggcttctcggtgcggagccttcccaacgtagccacaagatggcgagggcgagacgcacccagggcaggtgggggatgtgaccgtgaaagtagctgaagccccccgccccggtccgagggaaaggtaggctgaggcccccacttgacttcctgtgatctgggccccctcacaggaaattgtgggcaggaggtcgcagcgcagaagacggggagggggctggggactcaatctccgcctctcccggctggggtaaatagtggggaggggggcacgcggggtggttgctaagcgacgtagattcgcttcctgtttgctgcagcttatgttgtgacactggtgggggttagagacagcggagggcctgaagactgtggggaaggccgagggcaggacgcctggttcccgggacaggaagagccctgggaggaaggcggggaggtagcgagctgcgccgcgaccgaaggggactcggtggttgtccggagggggttagggaccgaggcgcagcgttgacctcggctccccttccctcccctgggttgcttgtcctgttgccagagtaactggagggcgagacttgggagccggattcccgaactctcccgtcc

SEQ ID NO: 30340 - DNA, 786 bp, Artificial sequence
  DNA replication origin
ctcattgcctggcaaccatcccggggcacgtgcactagtgacatcatcccaggccacctctaacacagacctttgacccctacggggcggagtgggtgtgctggctaagcttcctggaaacactggaaacacccttaggaattctgggaacccaaaaaggagacataagaagaaacccaggcgtccttatctcttttacccctaatacgactccaatcccagggactcaggcctcttgcctgtctcctcctctccgcctgcagccctgacctcccaacccacatttctgacgggagtcggcccgacacgcccctcggagatactgtgccttctctctcctgggcgagatctcggtgggggccggcaggcggggacgggggcaccgggtcccgcggggctccgtcttccatctgcaggatcccccgtgccccagccggccgccagccggaatctgtctgggtccccaactctcccgcccctccccgcgctgttccagggcggagtctgtggagttgaaaccaggacacggcgagaggaagagttatataaccgggagaagcgaagaaggacgagtggagacagggacagacagcccgaaaggagccgagggaggtgcaaagaacgccggggcgaacgaggaggaaacgttaggaatgggaagggttttggtgcacatcaaagagcaggaattcacgcgaagaaggggcgtgatggcccagaagaatcacctgggccgtccggggcttccccgcagtgccctcctccgccaccaacagcagctgggcc

SEQ ID NO: 30341 - DNA, 1152 bp, Artificial sequence
  DNA replication origin
cttcccaaggcttctcccgcccgggcccagctgctgttggtggcggaggagggcactgcggggaagccccggacggcccaggtgattcttctgggccatcacgccccttcttcgcgtgaattcctgctctttgatgtgcaccaaaacccttcccattcctaacgtttcctcctcgttcgccccggcgttctttgcacctccctcggctcctttcgggctgtctgtccctgtctccactcgtccttcttcgcttctcccggttatataactcttcctctcgccgtgtcctggtttcaactccacagactccgccctggaacagcgcggggaggggcgggagagttggggacccagacagattccggctggcggccggctggggcacgggggatcctgcagatggaagacggagccccgcgggacccggtgcccccgtccccgcctgccggcccccaccgagatctcgcccaggagagagaaggcacagtatctccgaggggcgtgtcgggccgactcccgtcagaaatgtgggttgggaggtcagggctgcaggcggagaggaggagacaggcaagaggcctgagtccctgggattggagtcgtattaggggtaaaagagataaggacgcctgggtttcttcttatgtctcctttttgggttcccagaattcctaagggtgtttccagtgtttccaggaagcttagccagcacacccactccgccccgtaggggtcaaaggtctgtgttagaggtggcctgggatgatgtcactagtgcacgtgccccgggatggttgccaggcaatgaggcttcctcccccttctattccctcccacctctgccccgagtccagttccagtcccgtgccatctctttcccctctcccttcccgtggtcttagcatcctgcaggtgggaaaccccggcctggagttttgtgagggggaggggcacgggtgtggtgtggctgaaagactttgcccctttgctgggctgagggagccttgggtcacttttccctagattggcacagaagagcttcccctccaaggctccgcccccatagaaaaagctacctagccgtcattttactttcccacctgctgcatggccaagtgtcctattgcccccttccccagattgatttgaagt

SEQ ID NO: 30342 - DNA, 741 bp, Artificial sequence
  DNA replication origin
ggaaggctggggaagggaatcccgggcgggcggcctgcccgggtggctgagtcacagcggagcctcagccggcggccctcccctccgcctccccctcccccaggtaagaagcgagcgtgtaacccctcgcttccaccaggcgtgatgaggacgggcagggagcgggttgcgacgagggtcctggaccgccccacctcggcgcgcgcgcagcatgcccgctgattgccggctaggtaaaaccctatctgcgggctcttgtctctggccgtcacgtgagtttgcgtgcgcacttcaggcctcttaccacgcgtcccgcgcggctgcggcgctgcgcggaggggctcctcggctcaagcccagagagagttaagtgggtgtgattgatggagtgttctctcttggggctccagcgggggcggggggtagggggtcggttaaagtcccgagtccagggcccggatggagggggcggagctgggcttcgccgggagtgcccggatggagagggtgtggcctcggcgggagcggaattaaccctttcagagccgctggctcccgaggttgtgggtcgggtcgggagaggctggaatgtctgcctcagaagtatatcgatctcccagcctggctctggccgcgtgcgtctacctctcgcctgtcttcgaggagtctgtgggtgtcagtctttgtgcctgtccgtggttcccttcccttggttagtatagacaccgggagtcagggagg

SEQ ID NO: 30343 - DNA, 684 bp, Artificial sequence
  DNA replication origin
agcccagagagagttaagtgggtgtgattgatggagtgttctctcttggggctccagcgggggcggggggtagggggtcggttaaagtcccgagtccagggcccggatggagggggcggagctgggcttcgccgggagtgcccggatggagagggtgtggcctcggcgggagcggaattaaccctttcagagccgctggctcccgaggttgtgggtcgggtcgggagaggctggaatgtctgcctcagaagtatatcgatctcccagcctggctctggccgcgtgcgtctacctctcgcctgtcttcgaggagtctgtgggtgtcagtctttgtgcctgtccgtggttcccttcccttggttagtatagacaccgggagtcagggagggctattcttgccccagagcgagagtggaggtgagagtggagcgcgagctggcggcgactggggaacaggtgcaagcgccgcgtcggggctgcccggcacggggaggggccatcgtgggggaagacgagaggggaaattccgcgggaccggtggtgagccggtgtgtgggctgaggagttgtgtctgcctctgactgtgtgtctgtgtgtgttcagggaggcgggggctgagtcagtgggaagaggggaaggttttctgggtgactcacgctcccccaccccaagcctgaatcagac

SEQ ID NO: 30344 - DNA, 788 bp, Artificial sequence
  DNA replication origin
tgcctcagaagtatatcgatctcccagcctggctctggccgcgtgcgtctacctctcgcctgtcttcgaggagtctgtgggtgtcagtctttgtgcctgtccgtggttcccttcccttggttagtatagacaccgggagtcagggagggctattcttgccccagagcgagagtggaggtgagagtggagcgcgagctggcggcgactggggaacaggtgcaagcgccgcgtcggggctgcccggcacggggaggggccatcgtgggggaagacgagaggggaaattccgcgggaccggtggtgagccggtgtgtgggctgaggagttgtgtctgcctctgactgtgtgtctgtgtgtgttcagggaggcgggggctgagtcagtgggaagaggggaaggttttctgggtgactcacgctcccccaccccaagcctgaatcagaccccgagggagggctttgtacggggggcgggggggcgagtgaggagtccagcgcctgggtcccgggtgcggacaaggatccgaggtggctggcgagaatgagtgtgtgtttagtgtacaggaagttttgtcttcaagtgagggctttgtattcttgggtgctggcgtggggctttgtggataaaggtggaagagcagggagctggagggacggcactcactgacttagggaaagctgagtcagttccccgtgggaaaggggaagtggcagaggggaagtgtcatcatcgccgaaggggaagctgcctttcctggtaactggcggcgctctcgggaccacttccca

SEQ ID NO: 30345 - DNA, 1462 bp, Artificial sequence
  DNA replication origin
aggtccaggtggcagggataggtggggagtggcagcgggagcccccaagaacggtttccgactgctgtgtgccgagggccccaggcggccatggtgagagacctccagcgcgggagtttggtaatggtcagcgccgggctgcaagtgtagaagcaggtggtaggagcattgctcgggctgcctcaagacaagctccacccatccccccctccaccctcagttgtcactcacaatgcctgggttcggctccacgccccggagaccagtgttgctgctgctgctactgctgctgctggtggtggtgccggggaggccagggggccgggaaggggcgtaaggcacgcaggcggtggttgctgctggtgaaacgctggagtccatccgcgacctctgaactctgctctctctaaggtcacttccggggggacgggtggcaggcaggcagccatggctctctgctcctggggggcgggggcctgggcctgggggagcagccgggaccagccggtggccaggggggtgcgcggtgtacgctggagctgggtatggatatgggtgaggcagcgagtgccgctgctcctataggagataaacagggatgcaggatgaggaatagagagcgtgggacttgtaggtgagaggtgaaaggcaacaggcaggggctcacctggcgctctgggggtgctgaacccttgcgctctgggccccaggcatctccatgcagggtactccacagccctggcttggttagctgaaatggggggctggtagccaggccaggcaggggtggtggtggtggtggtggtggtggtggtggtggtggtaatggtggtggaggcagtggcagccctgggggaaggccagtctaggagagaagagagtgtgagaatcccattcccaagtcctgcctacttactgcctgctggcccccctatacccacacctgttcagagttgcagcctctccttcgcttgcctccagggctgaggccctcctcccctgaggggcctgagagtgctgcaggaggcacaggctgcaccactgggggttcagcagctcgcttcaccgggggacctccccgcttggctccatagttccgtttgtgctgagaacaaaaagagagaagagaaaatggcacgggtgcaggcacagcctggctctcctccctaacccacccagtgccagcctcacctcaaggtgtagcaagttccacacttgctccagtgggggcaggaccttggctcggtgctggcaggagccagtatgaaagttccagagctgggcctgggggtggggggacacggggcaggggcagatgtcaggtggggcactgagccagaaggcacaatcgtacaatcccgtcccccacgccctgccttctcctacctgctgcagtcggccaatgcggggccccagctcagcgaagcttcctccgtatcgaagggcgctgtggtagcagcgt

SEQ ID NO: 30346 - DNA, 967 bp, Artificial sequence
  DNA replication origin
ggtggccccggccccacctcgggggtctttgggaaggagaccctgggccgggggctctccgggcgcctgaagcttcctgaggtattttggtggcaggaggaaggaggggctggaggcagggcaagagtcaggggtacaagaggtgggtcctgggggttctgtgctgggctgggaggccggggaagggggtctatacttctggccagatagggtggtgggggaaaggacacaggcccagcagggctgctgctgtggctgccactgttgctgttgctactgctggtggttggggttgggggagtgggaggggtgtgagaatcctgagtgcccacagaaaagcgggaggccggaggccccaagaagccctcgcgatgggggaggggtggtggggcagggcgggggggtccctcagtcccaaagaagagctcttctaagatctctccatcctctcgggctgcccggcaggccggacccttcaaccaggcagggggtggtggggggcgtaagaggcggggacaggggggtggagggggtgaggaaggtccaggtggcagggataggtggggagtggcagcgggagcccccaagaacggtttccgactgctgtgtgccgagggccccaggcggccatggtgagagacctccagcgcgggagtttggtaatggtcagcgccgggctgcaagtgtagaagcaggtggtaggagcattgctcgggctgcctcaagacaagctccacccatccccccctccaccctcagttgtcactcacaatgcctgggttcggctccacgccccggagaccagtgttgctgctgctgctactgctgctgctggtggtggtgccggggaggccagggggccgggaaggggcgtaaggcacgcaggcggtggttgctgctggtgaaacgctggagtccatccgcgacctctgaactctgctctctctaaggtcacttccggggggac

SEQ ID NO: 30347 - DNA, 867 bp, Artificial sequence
  DNA replication origin
ggctggggggtgggggtggtggtggctgtggctgagagggtggagggaacttggctagaggcggtggtggtggtagggctggtggtggcttcttctcctcttcctgggtggccgtggtggtggtggtggtggtggtggtggtggtgacggcgacagcaggagcagtagtggtgggggctgtgtcggtggggaaaggagactgcagagatgcaaagggctccttcagcgggggttggggggccacgcctgcttcgtgttgttgctgttcctcttccttgcgaatggattcgtccagcatcttcatgatgttggccagcccatcaggtaggatcttgaattcggctggctcctcaaactggtcctccagcggagtggggggaaaatcaaagagtcgagggcctcgggcaggcagctccccaaccccgggcggcacaggctggggggctttactcagggggcctgggggtggccccggccccacctcgggggtctttgggaaggagaccctgggccgggggctctccgggcgcctgaagcttcctgaggtattttggtggcaggaggaaggaggggctggaggcagggcaagagtcaggggtacaagaggtgggtcctgggggttctgtgctgggctgggaggccggggaagggggtctatacttctggccagatagggtggtgggggaaaggacacaggcccagcagggctgctgctgtggctgccactgttgctgttgctactgctggtggttggggttgggggagtgggaggggtgtgagaatcctgagtgcccacagaaaagcgggaggccggaggccccaagaagccctcgcgatgggggaggggtggtggggcagggcgggggg

SEQ ID NO: 30348 - DNA, 1118 bp, Artificial sequence
  DNA replication origin
ccgggacttctcacgaccctggatctcctcgctctgcaggtccaggttccccagcacccggcggctcttttctttggggaccttggccttggcctttgccctgccctcacggggccgacgacccacactgtccttacaggcccgcctgtgccgccgatgctccttctgatgctccttctgtcgccgcttacagctgcctgacactgccgccaccccgccagcctcctccttggcctgtgcggggggcagcagtcgctcagtcccactgtccgctggctctgctgtgtccactgggtcggctgggtcagtggcactccggcccacccgctccacaagggtctcgcaagcccggctgatctcttctagcacctcagactcagagcgagcagggggcagagataggggtgggggcggttgggtgggggtcatggggcccgggactggctcttcgcccgccctgcgctcccgggcccagggcccgcctgaggtagagaactgagatgacgaggaagcagagggctgtggggagccctgggcgctaggggccgctgaggtgggcggcagggcggtagcacctgatggggggccaggggaatactgagtggtgggcaagggcccaggccgggtggaaacagctgctccagtcccccgataacagtacttttgtccctccagcacggaggccaaggatttgagcaggctggccgggctggggggtgggggtggtggtggctgtggctgagagggtggagggaacttggctagaggcggtggtggtggtagggctggtggtggcttcttctcctcttcctgggtggccgtggtggtggtggtggtggtggtggtggtggtgacggcgacagcaggagcagtagtggtgggggctgtgtcggtggggaaaggagactgcagagatgcaaagggctccttcagcgggggttggggggccacgcctgcttcgtgttgttgctgttcctcttccttgcgaatggattcgtccagcatcttcatgatgttggccagcccatcaggtaggatcttgaattcggctggctcctcaaactggtcctccagcggagtggggggaaaatcaaagagtcgagggcctcgggcaggca

SEQ ID NO: 30349 - DNA, 1395 bp, Artificial sequence
  DNA replication origin
ctcagccgtcagccaatgagggcagagggcggggctatcggggatcgcagttccgacctggccagccatgccgttctctgtcgacccctgcaggccaccaggagaataacaacttctgctccgtcaacatcaacattggcccaggcgactgcgagtggttcgcggtgcacgagcactactgggagaccatcagcgctttctgtgatcggtgcgtgccgtcctgcgcaagtcagactgccgcgtccccgccctcggtccccagttcccacctgacctgtggccaccccgcaggcacggcgtggactacttgacgggttcctggtggccaatcctggatgatctctatgcatccaatattcctgtgtaccgcttcgtgcagcgacccggagacctcgtgtggattaatgcggggactgtgcactgggtgcaggccaccggctggtgcaacaacattgcctggaacgtggggcccctcaccggtgagagggtggggcaggtgttggcgtggtgtggcgcctcagcggcaagggcctgggaggctggggcttggagagccgccagcagtgagggaaggggcttgggcctaggtgtctgggggctgtttgagagtcctgttgtgatcgcctttggcccgcagcctatcagtaccagctggccctggaacgatacgagtggaatgaggtgaagaacgtcaaatccatcgtgcccatgattcacgtgtcatggaacgtggctcgcacggtcaaaatcagcgaccccgacttgttcaagatgatcaagtgaggaccctatttgggtgggagcccacctccactgactggtcccttttcttgttcttcctgtctgactccaccccatttttacctctctccatccttgtctgcctgtgccccgagtgttactgtgttggggaggctaactaggtccttgctgtcatgaccttttctagtggtccaaatagacaaaagccacaggaaacttcgcctataacagatgcccaggacagaggatgtgacctagacatgaagcggggaggcccctaggggagggccctggggctgcccacccctctgcccttgctccagccctgcctcaggcctcctccttgccggtggtctcaacacaaccccactgctccccaggttctgcctgctgcagtccatgaagcactgccaggtgcaacgcgagagcctggtgcgggcagggaagaaaatcgcttaccagggccgtgtcaaggacgagccagcctactactgcaacgagtgcgatgtgagtgggccggctctgctgctctccctgagtgtccacagtggccctccctccccctgactgcactgtcctccctgccccaggtggaggtgtttaacatcctgttcgtgacaagtgagaatggca

SEQ ID NO: 30350 - DNA, 763 bp, Artificial sequence
  DNA replication origin
cgcagccccagcgtggagaaaaaacaaccaacaaaacgaaaataaagccccagagaaactcaccccggggtgtccctgccccagtgaggccctggccctgggttgtttcacacttaaaaagaaaagggggtgggggtgaaggtctgtgttttttaaagttggccggggctgggaaggacggggttccttttcctcatagttctttctttaaaacctttaatttttttattttatttattttttttacaaaataccatttcagttcccacttcttcccctacagtacaggagttgctcaccctcaggtggggctggggtcgggtcgggagtggggggactggtccgagaaagtgcaggacgtaggggaggggagcgggtttgagcaccatgagaacccggctggagccgcgggcggacgggtggagacggtcgggccgggcccggacacacactggggcgcggggagagcccggcgacgggcggtccctggaggggcgggcaggatggcttgggggtgtgggaggtcgggttttcccaaaaatgaataaatagaggtgagtgggactgttataaattaaaaacaaaaaaacaagaaaagaacaaaaaatacaaatcataaccaagtgaataaagagacatgtacaggggtcacagctagcattggaagtaaaaaaggaggttccgggggaggggtaaagcccatagaaagaatctcattaaaaacctcggctgccgtaacgtctatgtacatacacgagccgcg

SEQ ID NO: 30351 - DNA, 906 bp, Artificial sequence
  DNA replication origin
agaaatactagagaagctgcaccataaaacgagggcacgagattgttgtcccattcacgacggagctgagggggaggtgtgcaggttccagcctagatgttcaggattgagatgtgggtcgtgaaaggaaagtgggttttccgggatgtgggggcttttctcagcactgggtccactgacgctgctgctcccaaggggatgctaggactccgctcaggcaggggtgggggcagggcaggtcggaagatgccgggcttcaagtccttgggccgaataagagggagggcagccgtcagggttgttcttgactcgagggtcattagacccagacctttcctgatgtgggaacggcctgggaccctggtgaggcccggatttgccgcggctgcggggcgcgccgacgccgataaagggctcggctgtagggcacgaggcaatcggctaggcggaggcgcaggcagaggcggcggtagctggccagagcaagcacgagcagcggcacgaggagcaggaatccggtgaccagtagggccgtgaaaccggggtcccgcaggtgcgcggtgcaagggggtgcctgggagcgcaggaactgtgggagaagaggcgtcaggcccaagccgaccaggcgatactgtgcacggggtggaaacagcccaggcgggttgaagttgtggcccatagaccccaccgccagcatcaccacacaccaacactcacactcacacgcacaccccggggcgcacgctcacctgagagtggcagaggaagccgaagcccagcatggtgacagcgggtagcaagatggtccctagcaccagcaccagcaggagaagattgaaggcagccaccagcagattctgggctgttacaagaacagcgcaggcccaacagtccagggggtcccgg

SEQ ID NO: 30352 - DNA, 992 bp, Artificial sequence
  DNA replication origin
tatctctgaccacgatggcgcttacctttcagacttcattaaacttatgaccgaatgggcctgtgtctgtgtgtagctgggatgccggtgcaggatagcacaccccatccctagaggaaagggctcatctgaagtcgggagcaccctcaaccctcctctcccaaccaagatgtccaggggtgccaaaggttctctcaagttcaggggtagagatggggggcagggctgaatgacggaccaacaggccccagggtgggcccctgcatcttccctcccacggctgctgctccagaattgtggcgggagggggtgtcatcctgctccggaaggcccattgtttcccaccccggcctggcaacaccgagttcctctaagctggggtcagagaacgggctcaggtccccaaggggagcagcggcaggcggccgaggctgggcccctccactctattgagggggaggtgcctggggtcaggaacagatctctgaggtctggccaggaagaacggacaaaagcgataaggccagggggctcaaggatgctcctctctgctcatttgtagccctggcacatgtttcctgttcctcggcacagggcaggggtgatagtacttgtgccacgcctctgttcgcagagcgcgttcagttcgttaaatctttattgatgcgtggacactccttcccctccagccccgccccccagccccagaaatactagagaagctgcaccataaaacgagggcacgagattgttgtcccattcacgacggagctgagggggaggtgtgcaggttccagcctagatgttcaggattgagatgtgggtcgtgaaaggaaagtgggttttccgggatgtgggggcttttctcagcactgggtccactgacgctgctgctcccaaggggatgctaggactccgctcaggcaggggtgggggcagggcaggtcggaagatgccgggcttcaagtccttgggccgaataagagggaggg

SEQ ID NO: 30353 - DNA, 1074 bp, Artificial sequence
  DNA replication origin
aaatggccggagctggaccgaccatgctgctacgagaagagaatggctgttgcagtcggcgtcagagcagctccagtgctggggttagcacgggctctggttctgggactgaggggcagtcaagcagcaagatggagggggtggggaactgcagctcccggcagcctctgggctttgtgtgagtgccccgcgggctgccgggagctgtggttccgcgggcgggcagcctgggctgcgcggtctgagcgcttgttacaccccgcgcaggattcggacggagagcgcgaggactcggcggctgagcgcgcccgacagcagctagaggcgctgctcaacaagactatgcgcattcgcatgacagatggacggacactggtcggctgcttcctctgcactgaccgtgactgcaatgtcatcctgggctcggcgcaggagttcctcaagccgtcgggtcagtgcccggggaatgcacacccgcctggtaatgtggcggaaccttacgcaaggcatttccccttaagggcctggctgcaacccttgttttctggggctcgttttcgtggctcagaggggcgggactgattctggcctactttcctgatgctctgatccttctttccagattccttctctgccggggagccccgtgtgctgggcctggccatggtacccggacaccacatcgtttccattgaggtgcagagggagagtctgaccgggcctccgtatctctgaccacgatggcgcttacctttcagacttcattaaacttatgaccgaatgggcctgtgtctgtgtgtagctgggatgccggtgcaggatagcacaccccatccctagaggaaagggctcatctgaagtcgggagcaccctcaaccctcctctcccaaccaagatgtccaggggtgccaaaggttctctcaagttcaggggtagagatggggggcagggctgaatgacggaccaacaggccccagggtgggcccctgcatcttccctcccacggctgctgctccagaattgtggcgggagggggtgtcatcctgctccggaaggcccattgtttcccacccc

SEQ ID NO: 30354 - DNA, 1151 bp, Artificial sequence
  DNA replication origin
gagatggcaagcccagccaagttagttaggagtactgacagactgacagaggaaggagcatccagaaaaactggaagaaaagtagggaggagtacagcaaaacacaagcaaaagcaagcaagcaaaaagacttgtatatgtgtagacttttctctggagcagtatccaggaaatgtgaaacagtggctgcttctgaggagaggaactccgggactaggggagaaggatgggagacaggtttacttttcacagtacactttctgtacttttaaaatgttgtaccataagtatgtactacctatttagaagttaactggaaaaagaaacaaaagaagagagaaaagcaagaagagacgtggacagcaagagcctgccaagcagacagcaaaaaggcaggaaggcagcgagagactgggaaaatggcaaaaagactgagacaggcagactgtctgaggaaccagaaagacagaaaaagagataactgaaataaaggcaaacgtgagagaaggcagggtaggggatgtggcaagaagttagataagactttgaggcaaaggggttactgagaggtttaggggagagagactatcctcattgatggaagttggcagagaagaagcaaaggaagaaaaagctggtaagtatgaagactaaagagagaaaagcctgaaacggtgggatagcagcaaacagggtagacaggcaagagagatctaaagggaggcaagggaaaaggaggaacttaacaggcacaaataagagaaggaacaagcagaagggcaagagaagaggcaaaccaagatggggagccgtggcagggcctggaaggtagacaaaccgagagatgcaggctaaaaaagtgatagagacaggcaggcggggagacagatggctagagagagagtggtgggcaaacagccagagaagcagacagacaaccagagaggaaaaagaggctgccagccagtcagggaggagcagacaggcaggcaggcagacaccataacaggagcaagcaggtaaagaggcagaaataaggagagaagaagaaaaatcaagaggtcaggagagagagagagagaacagaaagagatgcagacaggcaaaagggaggatggatgagagggagaataaggcaaattagcaaatcc

SEQ ID NO: 30355 - DNA, 2259 bp, Artificial sequence
  DNA replication origin
gggcgaggcacccaccgcgcggccgagccgaggcgaatccggagcgcgaatccggggctcgggcccgtggccccgcggcggtccgggaggtcggggcgggcggtggcggctgcgaccgcggggccaggcctcctcccctcccccgccgcacccctcccccgccgccgccgccgccgccgccgccgccgccgccgccaccccggctggagagcgctgggcgcgagctgcgcgcgcggaccgggccactcggtcgcggctttcgggggaggaggaggaggaggttttttttttaccctcggcggggagggggtaggcaggaaacggccaaggcgaagccagggccccctccctggccgagcgagggaccgccgagaccctggcggccggacggcggcgtgggggaggggcacgtgggggaggggcggccgcgcgagcgcccctcgggctctggccccggtggggttggaccgagggagagtggggtttccccgcacggagcagccgacgggcctgccccctccgctcaggacttggacaggcagagtggggacggtgtccatcggacccccctccacccgcggagacttaggtgcccgccaactgaggggcatgcggtggcacgcgagggaggggtcttgtgaatgtttgtgggctgctgatgagtaggggcaggtggtggccacagtccacgcagaccacttcctggaataaggcaggagctcgtcccctcgctcccccagcctgtgcagggacagcagtccattcggattggggagcggagagaagagtgtctggggaaccagatacccccggctccacccccttcatctcgccggggctctgggctcttttgtgtcaagtgcggtggggggggtccccctcttgaccccgtcagtctggggtggccaagctgcccagctgtgactctcacgtggctgccattcactgtcactcactctctcgctgaaaccacccactccctgagcacgttggggggcgtgaactgcccacccagctgttctgcagcttgaccatcactcagcacccgtcccccgaggtgacaagtcacccggcggcactctctgggcggcgctctccagaccgctgcgccgcgtcaggcgcccagcggtgtccccctcagaccaccctcctagtggagtgatttctagtcttctttgggataggtgagcatctgggtgtccacaccccctgcttggggaacagcagggggacctccgcacccccgggcctctggctgccatgcggcacaaatgcaccaaacttcaaaacggccaactccgggctctttgtaaaactgtcatattgatccgtgtggcttctgtggcaaacgttcctgtctagccgagacgacctttgggggagcggggggtgctttcttgtgggtcggggagggatgtgtgtctcctggaaactggataaagtctccccgccccccaagcttgtctgaaaaagggtaaagttttgaaaaagttctcccagagagccccctgccttggcaggaggaggaggaatgaggagttgtggggagagggtgcctttggggttgcctccggcagaggcgctgaaaagagggaaagaaaggccgtcaggtcctgccaggggcttggcagcgctcacctatttgtattgggacttggagtctggggtggggtggtgtgggtcccggatctgggtacgttggggagagaagcgtgaaaggatccgaggttgagatgggtctttgtgtcaacccggcctcccctttccctcttggctttctgaatagaccagaagagacgtcagaggctgcttacattttacaactgaaatgaaaacccacctcccctctccccctgggcaatttttatctccctttcagccctccaagtcgaatgagtgacccagatacaccccctcagatgactttcggaggtaaaacttcgggaaattatttttagcacactcattatttctgtctacctaagtgtggggaaaagaaccctcctctaaggaaatttgttcaggctgccctcgctcttccttgtctagagtatgcatttgtgcacaggagagatttccattgttttccattccgactgctttgattctcaccattttgttttacattcttactcaagaccaattttatcccttccccctctctccagtctccttacattgttaaacgtttaaaataatagcagtcgtgttggtgggggaagggagcaggaagccaaaaactcatttcttctccctccc

SEQ ID NO: 30356 - DNA, 890 bp, Artificial sequence
  DNA replication origin
tctattgggcacggatgtgaatgctatcagacatggatgagggttggcttgcacaagtcctagaggctaaaatccaagggggtgccaggtcggtaggagtggggttagaggtcagagggggatggttcagcaggtagaggggtcagggggtgggaagattttgaggggtgcggggtgaagacttacgcagcgttgtgggccctcccccgcgcggggccgccgcggcccttacccttgtgcaggacggcgttggccggcttgttccccgccagcgactccttggagaggtgctggtggctctcggccaggcactcggcctcggcgaagcgggcgtggagggccatggcggggtgcgccggctcctgcgacaggttcaggtaggccgcccgccgcagctgctcctcaatcaccagcgcctgctccaggagctgagggcacagagttgggaggtgaaggtagggctctgccagcagtgggtgaggggctgggggggcggacatagcaagagacccaccctgccctcactgctggcccagggcactcccagctccaaaccgactgcgaacctagcagcaaccctgacccagatcacactcccaagcacaaggttacactttggtcttggccccaggtatcacctcagccctgaaggtgttaaccttccctaggttccaactagatctggtctcacttctgacccaagcccgtctataacccgctcctttcctccctcattcccaccttgaacctccgggccaggaacttatttttcatctccagaaagttccccttattggcttcagttttaaatggctcgttgataatggcaaattgagcatcattctggatgtcctgccaccgtgcatagccatggctaccaatgaaggaaa

SEQ ID NO: 30357 - DNA, 1566 bp, Artificial sequence
  DNA replication origin
ggagtgtgagtagcagggggtaggaaaacaccagctgacctgtgatgaaggaccctgcaggcatctggctgtaattggcgcctgcggcggccagggcccctacgggtgcggcgctgaaggccgccccgtaccccggaggtgtagcgtagggacccggcgggtaggcctggaacagagaggaagcagaagttggagttagttcatagtctgtgagaggaaagaagctgtaggagagacattatgagccacactccacaactgctaagggtaggatacacaggcagggagactcactcaagggtgatgactgtgttctagcaagttgtttttccatattgtataggattctgatggaagtgtttgtatgtgtgcaggaggaacacaaacagggaaaactggagctagggggaaagagggttaccggtgtggggtgaggctccgtgcccttgctggccagccggctgaggatgctgcgctcggacatctgaaggcgggctgcgatggggggtattcgggacagcgtggctggcaggcgggtcacgtccgccttcatgtcgctcagcaactcctccagctggttcagaactggggcccgggccacagagaaagaagggcaagagaaagacagggaaatacagagatggagccaggaaaagagaggcatcagatggacagatacaggcagaaaaagagcgagagaggagaacacagatgtcaaagaaccagagatcaagaaagtaaaagaagtagatggaaaacagaagcaactcaggggaaaagaaaaagtgtcaggaaaagagacagagagaccagattaccacagaagacagatggagagaaagaagaaagaaaaagggagcatggaggaaaggaagatggggggacattggaagacatgggggcggggagttgtcagaacatctcatactggaagagcaaggtttggggttggggatgatggggaggaaatagtcaggaggcatgggaggtggtaagtgtcaaagctttaaggaatcacggttttaatatgtaaggggagagggaggttagaaggtcagtattacagattcaaggaattagaacagggatcaaaggggccaggagtcagtgactacaccaggcaggattagatggttagagggctttgggatataatctctatcaatggcaaggtgagagggggtaggaggaaaggtcgaaggtcaaagggaagtttcatggggtaaggccagagggttggatgggtggtagtttctgccttatggggtgaaacacatgtgagggaatgtgatttgtttgatcacagccagggatctgtatggtgcattcacagtccaaggcccctaactggatgatgttaagcagtatggcaggcatgcagttccactgccagtgaagaggccccactgtgtggaggggacacagaggctggggcaggtccctctattgggcacggatgtgaatgctatcagacatggatgagggttggcttgcacaagtcctagaggctaaaatccaagggggtgccaggtcggtaggagtggggttagaggtcagagggggatg

SEQ ID NO: 30358 - DNA, 1424 bp, Artificial sequence
  DNA replication origin
ccgccacagggagcggcccgatcaaggcgtgacgctccgaagggtggggcctcacttattcccctatttaaaggggaaagaggccgcggcgccggccccaggacccgacccggccccaggagagtgtgctcgttctgttcacggagctggccgcgttagcgacgtcctcgagtccgcggcgggcacgatgcagctcttggtgagggtaccctctcttccggagcggggcgagctggactgcaacatctgctaccgtcctttcaacctcgggtgccgcgcgccccgccgcctgcccggaacggcgcgcgcccgctgcggccacacgatctgcaccgcctgcctccgcgagctggcggcgcgcggggacggcggcggggcggccgcgcgcgtggtgcgcctgcgccgcgtggtcacgtgccccttctgccgcgcgccctcgcagctccctcgcggcggcctcacggagatggctcttgactcggacttgtggtcgcgattggaggaaaaagcgcgggccaagtgcgaacgagatgaggctgggaacccggccaaggaaagcagcgacgctgacggagaggcggaggaagaaggggagagcgagaagggggcggggcctaggagtgctgggtggcgcgcgctccggcggctctgggacagggtcctggggcctgcgcggcgctggcggcgtccgctgcctagcaacggtgaggggctgcccggggaggatgcaggggagagagcgccgaggaataccgaggttcgttggcatgctcctgctgccactaacccttcttctttcccccagtgctctactgtgcggagatcaaggacattggccacctgacccgttgcacgttgtaaccgaggaactcggaagctacagccgaaggaaggtgggagctgcagcctcgcgggggctgatgtcaagactactctctctcagatcccaggattggcatgtgatgagagagatgagccgaaggcaggagggaacgccctgggaggtgttgatgctgagttggggaggctcctagacgaactcgcccccatctactgactgtgccagtcttacattttcaggatggagtggccaagggatgatataaacaaagcctacgttaccgtgggaagaagacagactgttttcttagctgggacgttggcttttgtccagggtggctctggtgtgtgggagcaacaggtcccattttagcaattctttgtcaatggtttgaattttttttttttttaagatggaacgggagagaagaggctaattttcgcgtcatgttaatctcacttctctggcatgtaagggtgctggtatgcctgctgtctccccactcccagttctgtgttccagaaattgagatggctccctgcctgtgactatgattaggagccttgcttcatttcagaatctc

SEQ ID NO: 30359 - DNA, 1235 bp, Artificial sequence
  DNA replication origin
caccaggtcaggagatcgagaccatcctggctaacacattgaaaccccgtctctactaaaaatacaaaaaattagctgggcgtggtggtgggcgcctgtagtcccagctactcgggaggctgaggcaggagaatggcatgaacccgggaggcggagcttgcagtgagccgagatggtgccactgcactccagcctgggcaacccagcaagactccgtctcaaaaaaaaaaaaaaaagaaaaaaaagaaaatgttgggtactcagaagttaatgtgaattcagtataggctgggggcacaggataacaatagtagctaatatagtacttacctggtgttttactgtgtactggacaccatttgaagcaccttacacatataagttcattcagtcctcattattattatccacatttttaaaactaggaaaccaaggcccagagaaattaagtaacttgctcaaagtgtcacaactagtaagaggtggaagctaggatctgaactcaagccagctggctctagactgtgttatcaccctccataacagaacctgggctgcaggtccaggagaggagggtgaggaggcagctgtgtgtgggtgtggcaccatgaggggaatgtgggttgtgagtaccatgtcctgtttaccagtgggagaagtcagacccctgagtcagaacttatgctggggagctttgctggggccatcacgatgtgtgggtgtccaggcctccggaaggaaaggattcccagcattcctaaagccatggtcctggcatctaggtccctccttaggctgagataccagctgagagttaagcagtttggggagaatgaagtttaggaagccagccttacaaacaacacagagaggtcatctataatgagaattgagggcaaaatcgattcaaaggcccagggaccactaaaggttgggcagaacgggccgtgtttggaaactgggtgggattgtgaaactaactgcgagcaactgaataggcggagggggctttagagacttgtgccagtgactgagggctcaggcgcagagagagacccggggctttgtacatggtagaattaaggagcgctggcgttgcgttgggggaagaaggaaagccccaccccgctcccccgggagtagggaggaatgggtgctttggcccccagggctccggtcctggcatggcctgggccgcctccccgactccatcattgctgtcattcccggcctca

SEQ ID NO: 30360 - DNA, 1234 bp, Artificial sequence
  DNA replication origin
cgggaatcctccggggggtggagggtctggccccaaggcccgagctgcactggttccccgacccccagcgcccgctggggccctccgagagagcaccggccgaggcactggcatgaaatacaggtatgggggtggccgggcagcccaccccttccgctttcctttcgggacccctgagactgcttgagatggccgccaagaccccttcaaacttcactaagtaggtctcccttctttccatctcttctttctgtctctggcactccctcactttgtccctctcttggtttctgtcgatacccctgactacgagaatcaagtttaccaaggttgactgggtcctgtcagacccaggggatgcccctgagcttccctccttacccctgggaaggtcagggatgcatggatctccacgctacacggatctccaggctatgcctcctccagtggagtgtccttgggtccgtgtcctggggagtggagggagggaatcagcttctcactctggcctgctcggggtgcctgacccagatactgcccctgcctgccccaaaggctaggtcttctgcgacctttcttgggtgcaaggggagtggggccggtgggaaggatggaccacatttttcatctccatgctgagggacagggtctgggtagactgaaatgtaactgactttatctcagaggactgccagaccagaagctcagaacctgaagtagggggtagaggaggggctcctgcttgggagtgagctgaggtcactgatctgacctgctttgtcacctgaggaatctgatcccctctatatggtggccctgattggaaagctgagctgacacctgggttgggggctttgggaggatgagggggctcactggttcagagacagtcttcacaagtcaataggaacagagggagtggagagggagaactaggcttttctgtcttactctcccccctccccccaggtcctcaatctgcctttcctccaggcccatctgcctagcctagccagggacccctgtctgtctgaatgcctgaacttgacttggtttacctcttccaacctgccatctaccatttggcacagcactctgcctgagggcctggtctcacaaactcaccacaatcaaacaaaattcctcccagcccctcactgcacacaacccacagatgactcaaacacagacaagaccccagaagaaggacaaaccagactgcacgtcttcaatg

SEQ ID NO: 30361 - DNA, 1973 bp, Artificial sequence
  DNA replication origin
aggggtcttggcggccatctcaagcagtctcaggggtcccgaaaggaaagcggaaggggtgggctgcccggccacccccatacctgtatttcatgccagtgcctcggccggtgctctctcggagggccccagcgggcgctgggggtcggggaaccagtgcagctcgggccttggggccagaccctccaccccccggaggattcccgtgccccccgccggccggcccaccattaccgcccccggggcccggccggggtccacacagacggtcctcactgctccggctgcgaaggttctgctcggtacacgcgatagacacctgcatgctggctggccgaggcgggggagggggctccgaggggacgggaggggggagcagggaagcccgagggctgacgaccgggggcgtagtggggcgaaccccggcagagcgggaaggctgaggaggctgcggcgggagccgccaggcaggatcgggcccgcgggggcgggctgctggaggtcgcgaggtttgcggcgggagggaagaaacgtggggggcgccaggagtggagatattcagttacgggggacacaggagcaaggattaggagggggaaatggatgagggtaaaggtcgaggatgaggtaaaggtctcggaggataaggacccagggggaagcggggcgggagagagatgccacttcagcgcgaaccgctgcgggacccgctgggctcccagccgcgtcggcagcgggcccagctcatcagcatgcaggcaccgcctcctcatctgcatagagccgccctcctctcagccaaacctgccgctcatctgcataagccccgcctgctgaaggctctgcagcttgaatattttctgagcggaattggggaggatggctcctgcaccctctgggacccaagggctgtcaggcttcccccggcccagtgattctcaatcgggagggaatgtatctcccagcgtactttcggcaaggtttggagatatttttgatttcatgcctgtgctatcagcatctagtgggtggtggccagggatgctaaaatcctacaaagcacaggacggtccccacaataaagaattatccagctcaaagcatcaatattcccacggttgagaaacccatccgcaaagccacttcgtggccctccagggggtgtggctgccctactttccaccttcatgcgtggggcaggactgagagggccctcaaaccaacacgctcaggccgcagagagtgacaaaaagtttattctgtgcttctcgcagcattaggcaggggataaaactggagagagggcctggtgtggaggtggagggactctgtgggcttcactctggtaggaggagagcatcagggcaggcctttaggctgttgctctgggcagggggtgggggtgcgggggcttacagtgggggcccttagttggcacaggttcggaagggccccaggcagacatgaattctcctgagacttgaggtaggttgcttcagccagcccgggcggagaagaagggcagagagcgaacataggagtccagtcgggagcgaaagagctcactttgcacagtttggcccagcgggcacaggggattcttcaccaccagctccacatacagctatggaaagggaagatgttagagccaggctttggatacttctggtttttagccccaaaccttgtataacctcaggggtgtgtgaatgcacaaggaataagggctggaaggcaagccctctctgaggagaaagtggtggtgggagttaagaacctaagggcccctgagaaaactcttgagttgagcaaacatatagtaggattggggcaggggagatgagggagtcttggggttctgaagagctctgggggatgggtccctggggctggcactgaccgcactgtagatgtggtgcagcacatctcggatgggtcccacgcccaagtcagtattcatgacaactttgatc

SEQ ID NO: 30362 - DNA, 1047 bp, Artificial sequence
  DNA replication origin
gcagtgagctgagatcgtgccattgtactccagcctgggcgacagagcgagactctgtctccaaatagaataaaataaagtaaaataaaccgtacagagaaggagaaggtgacaacgtaaggcagatggaatgcaccatcgggaggtgggggcgcgacaagggatgcagagcatagactacgggatcagctccacacaggagaagggacctcttagctggccgttgtgctgggtaggcagcctgaattagtgacttcagaggggaggcagctctgggagatgacacagtgggggtttggtcctgtgacgtcatggctgaaggaggtagaggagaagcatgtgacacgaggagttcggggcgctcagaggccaagctgatggctggattgatcttggggatggtgaagtcaccagaatgagaagactgggagctgatggagaagagggtgtgcccactgctcagtgaatgatggcattcaccagggatgggggcggggtggaagaggtgagtggcatggccctcaaggaaccactgggaatgaggacactgaccccaaacctctcaactctggggtgtgtggcgtctgggaggagcctgtgagcagagccagatcttgagtaaagaaggaggtggagggagaatcctgtgaataggatgttaagaatgcaggagaaactgaattaaacaggacggattaagcagatctatttatctcttcaccctccccaaaccccactaaaattacaataaagggataaaaaaggcataaacccacaaggacaagaagagcgggggaggaaatgagcacagacaggagaactcagcattctggaaagcagggggagagtggagagtgatgactgacttggcagagcagagggagctcaaatccaagcgctggcgggtgggggtggacatcaaaaaccagcagaatccgggaagcctgagggattggaaatatcaggtgttttgtctatttactggtaggaaataaaatactccccaatgttgcatggcttgaagcaatgccagttgtaacttcatga

SEQ ID NO: 30363 - DNA, 1088 bp, Artificial sequence
  DNA replication origin
gcccaccacgcgggaccgcagagcccggggtccggaagcccacccgctcggcgggcgcaggcggtcattgccggcttctgcgaacacagacggagcaggctgagcgactgagaccccggcctcccctagggttctccccgtaaccccgagtttctccaagcccgagtaacccatgggatgattctgctgctaccgccccctccggaggctgggaagactaactggggccaaggacaccgccccgaagcccccttctgccgccccggcttcccgctcccacccggcctgcccctccccccgtcggaggcgtcaggggtcagcagggactcgcctgcgccctcagaccgaccctatcccagcggaggggcctctgacatttacagggaagtccgggggctcgggcccacggcccccggtgaggggtcacagggccggtcccccttttgacgcccgcccacaggtcttccttgccagcccaggccagggcgggggcgtgggtacagccggccagagcccttaatctccccaagctgattagggtccttaattaggtagggaggggcgggctagtggaggatgagagcccctactgcgcctttctggggtgggatctgtcctggcttccaggtagtcagccagatcctttcccctccatgccttccagccccccacatcaccctcatcaccaccacccctgcacaaaagcagccgcagcttcccctttcagccgtcggccacactgccctgctcagccagaaagtaacaagtgcctgcccgtggacagctgtgggtaatccgtcctggagaagaaacactgatcccagtccctttccttacaatcttctgtttccagttctgccagctaagttcaagctccatcctttggctggcaaagtctatatcccagagaccaaacccacaccaagctgacacctgcctttcttctttcacttctcttctctctctcgccacacttgattccctgacctctgcttctccatgcctagaaaaccaccctcaggaagtaatgaaaagagctttggcctccgacagacctgggttccaagtccctcttgctgatttttgga

SEQ ID NO: 30364 - DNA, 743 bp, Artificial sequence
  DNA replication origin
ggcgtagagggcatccgcggcgggggtcacggcaggggccgtggtgccctccgcctgcgtccaggggcagccccagggcaccagcgcgatcccggcttcttcggcgagcagctcggctggccggcaggccgcagggttcaccggacccacgaggcccgacacgcgggccagcgcggaggacacggcccccagcgagcccggcgtccggcaaggctcgggcagcagcgctacctcgaagcggggaccgcctgccaggccggggtcgcggttcaggcgggcggcggccaggcgggcggccaggtccgggcgagcccgagagaagatggggtcgcaagcccaggggcccaggacccccaccgtgaacacggcggagagggcggggggctgcagcagaagcaggagcagcaggagcgggagccggggcagggcccgggggaggcggggcagggacggagcccaccacgcgggaccgcagagcccggggtccggaagcccacccgctcggcgggcgcaggcggtcattgccggcttctgcgaacacagacggagcaggctgagcgactgagaccccggcctcccctagggttctccccgtaaccccgagtttctccaagcccgagtaacccatgggatgattctgctgctaccgccccctccggaggctgggaagactaactggggccaaggacaccgccccgaagcccccttctgccgccccggcttcccgctcccacccggcctgc

SEQ ID NO: 30365 - DNA, 2048 bp, Artificial sequence
  DNA replication origin
aaaaaccttctctattgttaccacccgatcttatcaggcttctctattattcccagttgccatctctcagagagccaggcactgtgcagagcactaaagatgtatcagtgtacaagacagaccccgtctcaaggaacctttcttcttgccaaagagacaggggtgttcaggcagtgcaatgagtaaaagtaggggaaactgagggagctgcagagacaggaatgggtgtccccaccctaggctgtggacagagaaggagctgttagaagtgaccatccttcaggggatgagtcagaattatccaggggaggcagggacaagagagaggaaacagcacactcagaagctcagaggcaaaagagaaggacacattccaagaacccagagtagcttggtctggctgaagttcatgggaggtggaagagagagaaagacaggtgacctggtaagccatgtggagaggcctgcatctatccagggcaacagaagccactgtgaggctttgaacaggggcatgacagggtgagatctgtcagatttctgaagcttgatctggagaaaggtgttgggcaggtgagtgttgaagcagagaccatctgagagattatgttttgggatttgggctgggggtgctgtggcctgaatcagggcagtgacagtaaagatggagaaagcggatgaattcgaatgatctttaggaagtaacagtaacagggcttgatgcctggaagtgggggcgaagaattcaaggaatcaagggtgactcacacgctcagaggcttgcgcagtttgggcagtggagaggactgctgtggtacttactgagagctgaagggcttttctctctctactttctcaacctccctctctccactgaccgaccctccctccatcccatctcattatgattcctatcttgtattctcttctgactattcccatcactgcacccctcccccctccattggacacctccaatcctcttggaagaatctaggggcatcgatgggaaattgcaacccctacgacccttctctcatgcagccgcctgtgagttggacctttgtggtggttaattcactgcccgttgacatctaaattcccttctcatagtggtttctagtccccctttgtggcgggagtaaagttagatgatctgaactgggattctggggacttggggatccctaggtattagctggatgttggaaatacactatggatctggttaggattgcccctgaatccacccagggaactttctgcttcttgcaaggtgtctaggcccttgaaaagctaagaccaccagatgaggccccagaggaaatacctctgaactagggatgaaggttggattggcatcctccctccttcctgctttcaagaacaccaagtatttattttagacagctgggagtatgtggtggtggaaacgggtttactttgaagccaattgcaaaaggttttgcagtttacagttcattagagtttactgcttgatgttggacttgagaggtcgaattgcctactctctagaggcaatcctcgtacactaagagaccccaagtggggccagagcctctacattacccaggaaactccaaacagctagagctgccagtggttctttctccattggctgcatcctcctctccctgctttggctgtcctctcccctctcccttgccttcttccctcctcccgggaccgtctacctgctgcagattgaggtcagagggcagctcgcggcgctcttgagccctgcgcaggctgtccagcacgctgccttcagagggacagtggcgcgtgagggtgagcacggcatcgtgggccctgcgaagctgggagctgttggcgagtgcggccaaggcctccgggcctggggacaaggcgtagtggatcgtgtcgaagggcaggaagaccagggagccatcggtcaggcccagctcctctgcggcctccaggaggtagcgctgctcctcgccacccagcagcaccgagtgcatcaccatgatcactgctgcggacagaggcttggctcgcggcgc

SEQ ID NO: 30366 - DNA, 962 bp, Artificial sequence
  DNA replication origin
tggcagcatggccgagttcagggtcagggtgtccaccggagaagccttcggggctggcacatgggacaaagtgtctgtcagcatcgtggggacccggggagagagccccccactgcccctggacaatctcggcaaggagttcactgcgggcgctgtgagtgcgtgggagtggatggggtggaggtgaagggggcgagcaggagggtccggcctgacgcatacttaacctcccctcaggaggaggacttccaggtgacgctcccggaggacgtaggccgagtgctgctgctgcgcgtgcacaaggcgcccccagtgctgcccctgctggggcccctggccccggatgcctggttctgccgctggttccagctgacaccgccgcggggcggccacctcctcttcccctgctaccagtggctggagggggcggggaccctggtgctgcaggagggtacaggtgaggggcgggccgggctggggctgcagggggagcacaggaaggggtaggggactgggggttggggagaagggcaggtgaaatggagaggtgagctggtgtggccacagagtagcgggcagaggagagggaatggcggagccttggggagcgggaggtagcagcctggtgtaggagaaactgtacttatgggaggaggggacctggtagagggtggcaatcgtggagactgtgtggctggtggtagtgatggtgagtttctctccccaccccaacctactccccttctcccacagccaaggtgtcctgggcagaccaccaccctgtgctccagcaacagcgccaggaggagcttcaggcccggcaggagatgtaccagtgaggagggggttactgatgggggagggtgtgcccaaacgatgaggggcagcttgagtgtcctggtcatgacagagattaaaagcccctgcctccacctctcctatcaaagctgctcctgggatca

SEQ ID NO: 30367 - DNA, 937 bp, Artificial sequence
  DNA replication origin
gtgtggaaaggggaagcgtcctggggaacaaaaggtaataagccactctttactatgccttctccctctgcccactcccccgccccccgaaaggaagacctccaggtgacgctccctgaggactcgggccaggtgctgctgctgcgtttgcacaaggcgtcccccgcctcccctcccctctgccacccctccccccgccggcctccccgcctcccccacctcacccctaccccctccgccccccgccccccgccacgctgcctcgccccctctaggtccggcccagactccggggtctgccgctgggtccagctgaggctgctggggaccccctccgctcccccttaccagtggctggagggggcaggcaaagggcagggccggggctgcaggaggggcatggagggagcgagggggaccagggtggtcatgggtcaggggaggggggctggtgtggacacagtggggaggggggaggcagaaaggtgacatgaggggcacgggaaggaggaggtgggatggttgggaggaaccatactcagggaggggaggatggaagataagtgggggaggggagcaccggctctgacaagaggattaggtggggaagttgagtggtggatcagtgagtggaagagggagaagctggtggaaagagaacaggcctgtgaagcagaggggttgggggcagaacatcgtggcccagtattgggggtggtgggtgtagctatgtcttctctttcctcttcccaccgactttactctttggtcccctctggcctgggctgttgagttggggctcagtgaacggatggggacgacctcaggtgctgaagcaggtgctgaagcagggtctgccgtggggggaaggtggagtgggcagggcttctccatccctgggggaagaggcaaagcagacgcagaggccaggggctgg

SEQ ID NO: 30368 - DNA, 2018 bp, Artificial sequence
  DNA replication origin
ccagcgcaacaagtgccttcccatcccctactactacctggacccggtgctgattgagaacagcatttctatttaggagcgcgcttcccgtctctcctctccccattctgtgccctactattttcaacaaaacaaaacaaacaagcaaaaaacacaaaaacctcagagaccaaaacaccaaacaaacaaaaaaacaaaaaaccttcctttccctgggtctggctgtgaatgcgcgcggcaagttactggggcgctggcggcagggctggcgccgcggggtgcaggtgcaggctgtgccgcgcgctctcaccgcgattccgttctctgcggccgcggggttcaggtaggagtagggcagcgccaggccccggctccactccaggacgtccgccgagatctgggccaggcggctctgccgcggggccttctcggtgaagtgctcctctgggtaggtgtccaggaggggagaccgaaaggctgggaccttggccggctgcattttcagcccacaacgattctgttccagcttaagtctccctcccaggggacttagtccacccaagcccagcccacgtaggggtcctggagcactccagacccatccaacttgaaacataaaacacccgcccacctagacaaaagactgcgggccacaagaaacccagaccaccccaagcccggctcactctgaagcccagaccactctaaactccccctactaggaatccacagcaccctaaaccacacccaccagcaacctagtggccacaagccctgccacctaggagcccagcctgctaagctaagtgcatcctcctagtagccattgtccccaggatcccttcctcaatgttcccactctctagaagctgagaccccagccatccccacctgggccttgcttatggtggccttggttccattgctgaccccccacaggagcagcagggggtggtgtgtggcatcgaccgcagggagtgaggctgcttgttctgtctggcccttggcggtgggcagggcaagccacaggatgataggaatattggggatccagtcactgaattcagaccgacccccgcaaactcagtacagagcttccagtgctgctagggctgctcctcccgtgaccctgcttgtccccctggtctggcagtggctcacctggccgctgttgatggcagcatgttgggctgagcaggtgacgatgatcgtcgtgaaacaccggatgagcccagcacagtggcccagggtggaggggaccccctagatgggagtagggtagagagaacagagctgagacccaagaggctgctgccctggggcagtggacgccacctctgagagcatttggcttggaaaaccctcctggaagatctccctgacccaggcctggagctctgagtccctgctcactgccgtatcgtccgggtagtagatgttaacaatattggtcccaaagctggggggtcgggaatacacggtgactaacagccgggagccaacactgcacaggggtatgggttggaaggggccactgagacctgctgcccacaaagggggaaactgaggccaaggaaggaaaacggccaaccacagagtgaactgcagagccgagatcaaaccgggaggctgtgctcttcaccatgccatgcaaacagaggcccgaaggccatgattgatctgcagatgtgttttgatcagctggcaaggtttttctgtttgtttttcaagttgaatcacttgccaacgtttaaatattagaagatgtctggtttctgctgaaaaatcagaagatctggtcacagtgatagctgggtcaccactgtccccatcagacaaacatgagtttcccactggccacggtccctgcccactcttcttccttagcttttctctgctcactggtcctgcaggcatttggattccaacccacagggaaggatgagacaccaggtccatctgcctcaggaccggctgattgggttcatctcatccactggttcccaaagggccctcca

SEQ ID NO: 30369 - DNA, 678 bp, Artificial sequence
  DNA replication origin
cccaggcggagcccagctggtggtgagtgagcaggtgtctgggctccaagccttctgggagctggtggggaggaagagcaggcagggcactgggcctgcctctgaaagggcggatagaagatgccgtggatgaaggcgccttcagggtgggggagccagtccagcctgagccagggccctagggaagttgcgggagggggcagggtgtggtccccagatctttatcagactaataagctccttcctcctgccagtccccattggctacagtgccaggcacccctactaagcagggccatgggcagtgagtgacttgcattggttctgaggccactggtgggcgggggaggggagggggaggggcactaagtggcagcgcagctggccagcctccaggccattcctctctgggaaatgggacaggtagtggccacagtgagaaagctggcctgtccttctgccccagggcccagagtctgtgactggaagggtgggaggtgttgaagctagggctcggggaccacatgggtgcccaaaggcctgaagatgctgcggggaggaacgatcagggtaggagaaggggatctgttgcttcctgtggggccaggatccactggtgagggattggagttggatataaaatcagaagcccaaaaaaaaaaaaaaaaaaactaaatt

SEQ ID NO: 30370 - DNA, 599 bp, Artificial sequence
  DNA replication origin
cgcaggctgtccggaaggcagaaattggtgtaggtgaagtgggccaggcccgtgctcatgaggtagatgaggccttgcctcccgatggacgtgacctgaggacacagcacagctcggctcccgggccggcccaatccccaccctagtgtctgggcacgagatggggctggggactcggcccaaggagggccttcttcggttcaccaagcaatccacggatcaaatacccacgagggcctgcctgacgcaggctgcgcagcttgacgccccattacgtgcgtgggaggagatccttaggtatttggtaactaaaagaatgaactgaaagccggggagcctggctgggctcagggtcagctgagggtagtgctggggctcaggatgaggctgccctgcctgtggacccgtggcccggcggggctgggggcggtgggcgggggcggtgaggctgcgggggcgggggagacagggtctgtgaagggggccggtaggagaccggagaccggcggagtgggcggggctggtggaagaggcagtgattgtacaggtgttctcacaccccaggtgtcctcacaaggggcttgggcgcagaacagggc

SEQ ID NO: 30371 - DNA, 933 bp, Artificial sequence
  DNA replication origin
ctactcaggaggctgaggcaggagaatcgcttgaacccaggaggcagaggttgcggtgagccgagatcgcggcactgcactccagcctgggcgacaggagtgaaactccgtctcaaaaaaaaaaaaaaaaagtgatgtgccctgaaaagtgtgggcacctggggaagggagggtggcaaggggggatgaatgatcggacaggcccaggaacgatgtcacctgggctcctaagcactcactcactcactgcacacacactcgctgggggcccaattaacacccagtgggtgggaaaaccacgaggagttcaatcatgaaagcagaggctgaggagtctgggggcagggagaggggaactggggagcacaagggggagacaagggcaggaagggggcagggggcatgtagagagggaagactgtggggcagggagagggaatgagtccagagaggagggactggggcagggagaggggatactgggaatagggagaaggggcagtctgggagcacggggagggggatggatgggcagagatgtaagatgttcattagagggacaatggccttacgcagggatggcattgaagagcagcgagatcgtcttggtggctgagtatcgaacattgggctccatgtacatcagggatgggatgtcaattttcatggggaagccgggcaggtaccgattcccactgctgggggtcgggggagtagaaagacagaaaccagtcagtgggccctgaagcccagctgctcaactccttccctctttcctgccttccaagtccctgggtctctcttactcccggctcctcccctgccctctctgctcctgagctaaaataacctcctcactcttgtcccctgtgccagaccctttggggccatctcccatcctgatgcttgaatgaaactgcattgtcatagacc

SEQ ID NO: 30372 - DNA, 973 bp, Artificial sequence
  DNA replication origin
gctacttgtccggtttccgcgagtgcctgcttcgcttggcggccttcgcgcacgacgccagcccggccgcccgcgcccagctcttctccgcgctgcacggctatctgcgccccaaaccgccccggcccaagccggtagatccgaggcctccagcgccgcgcccatccctggaccccgccgcaccggcccttggccctgcgctgcaccagcgccccccagtgcaccagggccaccctagcccgcgctgcgcatggtccccatccctctgctccccgcgcgccggggattctggcgcgccggcgcccctcaccggactgctgccgccgccaccgccgcctcacagacaagacggggcgcccaaggccccgctgcccccgccgcccgctttctggagaccttggccctgagccttggggggtggtgggggcggggtctaggggtggggtagagactccagcccgagggcagcagagggacccgggcgtccgggcgagcaggtgttggggagggcagtggggcgcgcgggctcagcgcgcgggtgagatgtggtctatattagagtatctatataaatatatatttccctggttcctgtcccttttccctgccccaacttctcccttgcgtctaggattgtactctctctgcccctcagcccagtcccagtcccttcccgagtccctagtgcatggaataaagtggttattaaatccccgtgtgtccccgagccaggggcctgcctttatctcgacgtccacgcccactttcccttcccttctgtctcccaccctcagtcctgctctccatggcccaagccccggggcagacaggtaagtaaagaagagagcagagcgggaactgagatcgaaattgaaaccaggtggaaagagagagatagggtagggggagaagggatgggggcctttaagaaaaaaacggataaaaaggaaaaattgaaataaaatcgactctg

SEQ ID NO: 30373 - DNA, 731 bp, Artificial sequence
  DNA replication origin
agggccaaggtctccagaaagcgggcggcgggggcagcggggccttgggcgccccgtcttgtctgtgaggcggcggtggcggcggcagcagtccggtgaggggcgccggcgcgccagaatccccggcgcgcggggagcagagggatggggaccatgcgcagcgcgggctagggtggccctggtgcactggggggcgctggtgcagcgcagggccaagggccggtgcggcggggtccagggatgggcgcggcgctggaggcctcggatctaccggcttgggccggggcggtttggggcgcagatagccgtgcagcgcggagaagagctgggcgcgggcggccgggctggcgtcgtgcgcgaaggccgccaagcgaagcaggcactcgcggaaaccggacaagtagcagctggcgagcgcctcggcgtcctggactggggaccggggaacccctggagccgcggcggctggtgcggccggcgggagcacaggtgggcagggcaggggcccggcaggggtgagggaaggggcggggcgcagagataccaaggccggacaggcgcacagagacaggaagccagatggacggaaagagggagaaaatgagggagacacagagacagacacgcgcgggtgttattaacctcgcctcggagcagaaccggccactccccaagcccaccatccaccgcagggcccgcccactctgccccggccggagcctcctggcgtc

SEQ ID NO: 30374 - DNA, 1075 bp, Artificial sequence
  DNA replication origin
aggcactcgcggaaaccggacaagtagcagctggcgagcgcctcggcgtcctggactggggaccggggaacccctggagccgcggcggctggtgcggccggcgggagcacaggtgggcagggcaggggcccggcaggggtgagggaaggggcggggcgcagagataccaaggccggacaggcgcacagagacaggaagccagatggacggaaagagggagaaaatgagggagacacagagacagacacgcgcgggtgttattaacctcgcctcggagcagaaccggccactccccaagcccaccatccaccgcagggcccgcccactctgccccggccggagcctcctggcgtcccccctccctccctccgctgccccacccccgcgctgtacccgggggctccacccggcttcgctccctcaagtagcccacggcgaactccaatatctccgctttctccagcttcgggttccggaggttctacagacgggaggggagggcgcagagacagaaaggggtggggagaaagggggaaagtggcagggggaagaagggagggacggatgcgggagctggtggtgcccccgatcgcatttgcgcactgcccacagaacgcgcgaccaaatgcggagtggagatgaccaaggaaagtcctggcccaccctgagacgaaactgtccaatcctaggggttggaaccaatgcccaacgcgtgaggaggagatttgaaaccgcaacccagggaatgaaattaaccacccgacataacagaggctggctcatcagaggctggctgtgggggagggggaaccggacacttagagacccaaagggtgaaactgaccgaccccgggagcgaaatttacagaaccaggcgtgaaacttacagacccgaggggtggcgaagaagatcgcgttctgagagcgagtgggggtctgggatggaattccaaaggcgggactcgggtgaggatgccttggggccagggttgccaaccaagcttgtgtccccaccccagtgggaagccctgggacgcggaaacgggaagcttggggacctagggctagcggaggg

SEQ ID NO: 30375 - DNA, 1336 bp, Artificial sequence
  DNA replication origin
agtcggacagattcacccagcgcactcgggttgctccctgtctcgactaggaagcgaacttcggagatgatgtataaaattcagcctgggggctgagaggtgctaacttctatttcagggttagtgagggtacagtaagcctcccagaaagctgcaattctggaggaactctgaatttcatccccaagcgagctctgccccaatagcctcctcctttcagctgggtcccgcctccttatacagccttacggtctgtaaaccagccagtgcccccattcacccctcacttcccgcactcccaggccagtttctctccttcccctccccccttcactcctcctctttccgggagcctcgtgccgggtcctagaggggcagaatctggatgtcgaagggggcggggtcgggtcctatccctcctacccttgggccgcggaatataaggctccaggcgagcagggaaccggtccacacagggtccggaggagcaatggtcacccgggatcgagctgagaatagggacggccccaaggtgagaggcgggaggggagggagcagaggtccctggtttggctaggggactgggcccctgacgccgtcggtctggagagaggctggggacgcaggggtggaaggggagcggtgctccagaactccaggagccagaagctggagaggaagctgcaaaatatgaagaaggggacaggggtcagagccagacctgagtgggcggcgggaacataggactaggggcctcggtaatgggtgtcggcaccttgtggcctggggagggggccggtgttggagtaaaataagcaattagagggcagagccaagggaggagggtgggaacgaaaagagaagaggataggcacttgctccactctggctgtgagccgggcggggctggcccaaggcggtcttgtacagaaggtcccggggcgttggttccagaggccccagactggtggaagattttaggagaaccgtggagaaggtgaaggcctggagggttttgagggaaaagaggcggcgcggtcgcgctaggtatctccctttctatactcagggccgccaggtctgagcccggcaccgtgcggcgcacgtgcgtgcgcgcagagagtccccaaagttctccactgagacaaagagaaactgcaccagacggagacgtagagagaaaagaggaggagagacacagagaggggaggagggaggacgagactgagagaggagaatgcgaagatccggggaggcgagctacagaaactgatctaggggcattgggagggggagcggagagggatcgaatggggccggccctaggcaatctggg

SEQ ID NO: 30376 - DNA, 1258 bp, Artificial sequence
  DNA replication origin
aaaggaggcgagacaaaaaaggcatagacccatagacttaagaaaagaaagcgtgcttcagagagaacggaaaataacagaggaagagaggtggaaagaacaagggatgtagagtggggggcggggagacctggcccttcccccgcggggggccgagatccgagcactgtgtcctttctcagggtcacgcctgcggaggtgcgggccggggacggagggaggggggtgtggaggctgcaggacccccatgctgggaggaggggagtgcgagggcgtgcggaatcgtttaggcctggggctgcaaactctgctatagtcaaaaggttaagattaatatttggtagaaatatttaagtgaagatgtttcttagaaatgctaccaaatatattatcctttttttggaggggagaaaagaaaactgtactcgtgcattggccgggaatcgaacccgggcctcccgcgtggcaggcgagaattctaccactgaaccaccaatgcgcggcttaaagattctgcggggatcctatctgagattgtaagaggttgaggcggacccggacaggcaacggtgtaggccagggaagtggtcccgaatggttgccgtgggtggagcgccaagtcatccttcctctcgtccggatccggccaccgggccataaagccgccccatatggccaggggcggccccacacccgggtgcgaacagccgggggcccccagcctcgcgtgcaggtgagaaaaattcagcccgagcccaggttcccaaggaggggggcggcgggggctgatggggacacacatttgcgttcccatttggctgaaggacggagaggtgggatgtgctgggggccctgatcccaaatgggagccccctcctcaaggtctgtgcctctcccggctcgggctatgatggcaagaaaggcttcgtgacaaaaccaaggtgcggagggccgttgggagggcttgaaggaaaccccattggtctctgatttcacagctgtcttccgtctcggtctgcaaccctgtctttccgtgtctttatccctggcaacctggctgttcccttcagtttctgatttatcttctcagacactttgtcctgaagccctcgagtggtcaggcatcgttctgcggagggtcatgctcttggtttgaggtgggtgttgatcccttttttgtaccccttgctttccccttagtaaactgcctgctccctgctaccctacagtcaccaggggcctccagaagcaagcaatg

SEQ ID NO: 30377 - DNA, 841 bp, Artificial sequence
  DNA replication origin
agatgcactttttttttttaacagtttccttctggaggccacggttactacttagcgctaagaacagagcattggcagtcacagatacaatccgaggacgagacagagacccagaccctggcgcaaataaaacaggttgaaagaaacgggagggacagctccagggtgaattccagagacagagacccagatagactaaggccgagacccagattcactcagcgaacctgagccccgagcccacaggccccggcagcgaccgcggacagagccaggaggaggcgagcggtgggaggcggagcgcgccggaagggagcggaccgcggggagccccgccgccccgcccagccggcccgccccgccccgctcacaagtggtcgccgcaggtggctgtgcgcccacccgcccgccctcgggccgacgcgtgcgggatcaaagcggccgggaaggggcggggaggggaggtggcaggaacctggaagtgtcagcgagcttcccaggggatggcaggagcgtgggagcgcagagtcccgggaggcgacagagactcggagagacgacgagataccagagacccgagagagccagaggcggagatgcagacgccaagacgcggagagacgcggaatcagagatgcggagggaggagaccaccaacaccagagagacccagggcagaagtcgctgaagatctggaaaaaacgtgagagatacagagatggaggagctaagagacactcagagacccggaaaggaggcgagacaaaaaaggcatagacccatagacttaagaaaagaaagcgtgcttcagagagaacggaaaataacagaggaagagagg

SEQ ID NO: 30378 - DNA, 1436 bp, Artificial sequence
  DNA replication origin
gacagtagggccaggctgagagagaagaaagctggcgaagagtggggatgtgaggccagaccctttccaagtgacagatgctctctcagaagttattgagatgtcctcaccacctgtcagacagacaggactgtcccttcaaagaggaggtagccaatttctgcctcattcagaaattcagctggggactccctccacctcctggaggctgagacgccagcctggcagagacagcaggcagcacagggtggcagaggggcggggctggggtgggggctggcaggcagacgcaggggtcagtgctcaccagtctggcctctggctcagcagcctccgcactgggaggtgggggcccggcactgctcccagggcctcctgcaacagcagccccctcagcacgggggagctcctccagctgcagcagattgagctggagtggagagctgcatctcgagttgaacagtggagagtccgggcggtgaggaggactcggggcgagggcgggcaaggatggagaaggggagtgcgaggcaggagtgggaggcccttcagcaggggtctggagtgccccataaggatagctggatggggttgggaacagatagttagggagcaccaaggccaccattggggtcaccaaaggggcggggaaagcagctgggggcacagatgtgggagcagggggaagaggctgggggcctcctcgaggagagaacactgggagagggtagggctggacaaccgctgggaagggggtagtggctggtggggtgggccagggggtggagggtggcacgggtgaggggtgtgagacatagcagggcgcttcagcccgagggttctggtggtggcgtgagcgcttggctttggatcggcagtggtgtcggcggcttgggggtgcggggccgtggtggcagcctgtggggagagactagggttagcaaggacctcaacctggggttagtacccctgctacccacactgccctgacacgctgaccagggagaggacaggccaaggtcccagagagagcttctcaacccacacagaacgggggactcaggaggtggggcaccttcagggaagaatcacaggagccagggacaaggggatttattgagaaaggaacaaggccagggagaggttacacgaggggtcgagctgggggtgtgcggaagatggaggcatgctggcagatggaggaagcagggtgagtccatggacacatggacagatggctctggtccgccaaactcctgtgggcactgccagcctaggcattcctcctgcccatcgaggccgtattctgcctagcttgcaatggagtgaagagtggggctggaaagcccagtcctgagtcctgcgtctgcctgcaggggatctccctcaggcacctggaggggctgccttccacctgcccttgaagcccagacccc

SEQ ID NO: 30379 - DNA, 966 bp, Artificial sequence
  DNA replication origin
gacggctgcctgctccgaaatgtagacgattcggcccgtcaggaaggagacagccactgagaaggtatcctggcaggagggggagagcaagagcagattcaagagctgtgggagaaggagtaggggtgcgtcgggatgcagaggccaggccgccgctgacctggttctgaagtgtgtactcagacgtgatgtgctccagctcctccagggtataggtggacatgtccatggagcaaggctcgccctcctccaggctccactgctggtagtattcctggttggctgcagagtggaggcagtgaggcattcagtaaggaggctgcctcaacacgggagcccaggcccaggccattccctcttgggacacaccacttaccctgcacctgcttgacacaggccagtgcgtactgcagcgtggccagggtcccagagcggcccttgccccggcgctctggcggcagtcgaagcttgagctctcgaagtgctgtcatgagttccttctgagtccttgcccgggctgactgttcactgctgcggggcccacagggaagaaagagataaagacattagtcccagagtgtggcctgggcccccagacctctcctccagcctcacccgacgtacctgcagccactggtggacgggttgtcctgctctgagctggcactcaggaggctgtaggcaatggaactgctgggtggggatgggctctgagagtttgtgctaggagacagcaacaggcccagttacaggtagggccagcagtgcgaggcctgtcacccagctctgcctgctcacaagaccattcctagacccaacatacacatccatacacacctcttgctgctctcagtggtctccagcagggctgagtccttgccgttgcctgaggaggagctgtgtgagctccgctgagatgcgcctctagactcatgcccgttggactcattgccacttgaaccattg

SEQ ID NO: 30380 - DNA, 1340 bp, Artificial sequence
  DNA replication origin
aaaggcgaagatgccaagatgttgtgttctgcaaggctagtgcgttcaggaagtagacaagtcttgagcacctaccccgggccgggctttttccctaaagaggcgcagcgtatctccctctctcctcccttccattattcaatgtgcaagcgtcctgcgcccattggctgggcggtgtctggggctcttcagcccagcaccagcacccaggtccacgtgcgcccgtgtgtgtgacacagccctgaccttagtggagaccactagccaatcaggcgccgggaagagatccccagccaatcgggggcggggcctgcggctccgtcggcaagaggccaatgagggggcagtgcccggcattatgcaacccgcctccccgcccgcccggtggagcttccactcggctgcgggctggagcggcggcgggcaggcgtgcggaggacactcctgcgaccaggtaggcatctctgcggccatcctggggccgatctccgtccctgagccggaccgctgccacttccaatctgatgggctactttcggcccaggcagagggcacactgtcgtccttaccgctacccaccctctccctgcccccaaggaccgaagtcctcctcgaaatcttgcaccgggagtctgcactcctgacccactcatcttacctccagcttgtccccacctccccgtcccagctttcccggccccacagccgactctcagcgggcatgccccggtcttcttgctcgttactcgaggggccccaggtttgccccggtaccaggaccctattaggctttcagcgctccccgtgtctctgttctccagtccctggccctgcgccgcctgtgatgtcagcccacttcggactagaacatcccgttcccagcgctggttcctgctgttggccacaaccttcccttttcccctggcgctcagaaaatgctcagtagtaggggtgtggttggacggggagtaggggaagaaagatctgttggctgttgtgtgtcttctgcccaaggcttggggttggtgggggggtctggccagaaaagtaggggactgaagagagaggatcctcgggtccttgacgatggcaggttgccggcttcggtccttgtggtggggaagcagcgcaggggctaaagaaggaaaggttgtgttgtcttgaccagaatgactgggatccaggcgagagtcaggttgaggggcttttgcgccgagggcagtggccgttgtgcttcgtcctggggaagccaggaccaaccctgggatcctaataggccgtcccacttcttacggccaccgagccatcctgggactggggatatgtaagggatgcgtgac

SEQ ID NO: 30381 - DNA, 1604 bp, Artificial sequence
  DNA replication origin
cgccccgcccccgcggccccgctcgcgacgcgtctcccgcggcgccccgcccccgcccgcagtgcccggatgcgggtgacgcgcggccgccatctttccgtcccgggcagccagcgccagtcggagccagcgcgagccgccgccgccatcactgccgctgccaagtcctccacccgctgcccccgccatgtgagtcggccgcccgccaccctcaccgcgcttccctgcgccggccgccgcccttggcaaccggccgtcgggagtgcccggggtctctcctgcgttccccgcgccccggggccaggcccaagccggtgactgcgcgcgggcggccgaggagccccgcgtcccgggctggccggctcgggcgatggccgcgggaaggagcggacccagtgtcctcctgcccctccccgcccctgtcaccgcggccgcctgtcttttcgggtcgacccggatcgcatctgtgaggtcgccctcagttgacaggcggggaaactgaggccgggggggcctcgctcaaggtcacgcagctcatcggcggcagggctggaccgagaccagggcttacatcgggtggccttcctcccgaaaaggaggactggagggacgaggatggacaggtggatgggcggagccctggctgcggggccgggaggctgcaggccctgggtcttaatccgtccctgctcctcaggtctgctaccgctgccacggccccccctgctgccccggctggggagggtggtccccctgcaccccctccaaacctcaccagtaacaggagactgcagcagacccaggcccaggtggatgaggtgagtgtggggggagtcaaaagcagtaggagggaccctgggggttggcgtataggtgtaggggcccatgttggtttgggagtgatgacagttcacgcctgtgggtttgcggacaaagataccatgccccatccctgtctccctgtcagcacgcacttggaagggcgctgggggtgttaatcagctttgctagcctggggtgtgccagcctgggcaggtgtgctctggtgatggacagagcgcctgaggttccatagagggagggtgttgctatgacatctgagatgtcaccagcatgcccctgatgtgtgctccttgcatgtccccaggtgtgctaggcatgttctgtgtgtccttggcatgttaacctggcagtatcagggtgcatgttccatgtgtggcacggtgggcacatgtttgaggattgccctcactgaggtgggccttggcacacccccctgcctcgtgggcccttctcccaggtggtggacatcatgagggtgaacgtggacaaggtcctggagcgagaccagaagctgtcggagctggacgaccgtgcagatgcactccaggcgggggcctcccagtttgaaacaagcgcagccaagctcaagcgcaaatactggtggaaaaacctcaaggtaagggtggggacaggaaggaggacaggtgggtgaatggggtatcatagtttgtcttactgatcctcgcctctcacccccagatgatgatcatcttgggagtgatttgcgccatcatcctcatcatcatcataggtgagtaggg

SEQ ID NO: 30382 - DNA, 1206 bp, Artificial sequence
  DNA replication origin
gaggggcaggaggacactgggtccgctccttcccgcggccatcgcccgagccggccagcccgggacgcggggctcctcggccgcccgcgcgcagtcaccggcttgggcctggccccggggcgcggggaacgcaggagagaccccgggcactcccgacggccggttgccaagggcggcggccggcgcagggaagcgcggtgagggtggcgggcggccgactcacatggcgggggcagcgggtggaggacttggcagcggcagtgatggcggcggcggctcgcgctggctccgactggcgctggctgcccgggacggaaagatggcggccgcgcgtcacccgcatccgggcactgcgggcgggggcggggcgccgcgggagacgcgtcgcgagcggggccgcgggggcggggcgctgcggggcgctgcggggcgggggtcgtgccgggcaggaccacgggccccgcgccaccatgccccggcagctccctcggcactcgcgggaccccaaggcgggctgctgcggcttccccaaacccaccgccaccccaccctgtctgaccacagcccccccaaaccgcctgccgcctgccccttagagcacaacgcagcctggccctacacctaacccccagaccactccctcaatcgtgaacccagtaaaccagcctgcaccccacacagcccaaggtcttgccccgcgcccaggtcccagcacctagcgacccgccttcagcacttggaatgggctggagttgggaaatcagagagggccagtgcaggtgctggggcagtatcgagagcggggaccttactgctagggtggagaggagtgggggagattggtcccaacccatcaccgctggtggatgtctcagaggaagcctggggtccctggccactgggtaggagggtaggaagaaaagatgaggcaggctcttcccgcccaaacaagtccagggggcggaggacgggggagtgtctacagggtgtggggagggggctgccccgcctcacgattaaggttcagactaggggtacttaaccgctggagcaggcccgactgaggtggggtgagctgaggaccccgaggaggagggcacaaggctgccgggggtgatgggggcaggggctgcttcacgtggtggctgctgactggccaagacctagctttgccccaggcttaggtcagcgacccgactgcaggaa

SEQ ID NO: 30383 - DNA, 1125 bp, Artificial sequence
  DNA replication origin
ggggtggggtgggaaggggctgctggatgagagtcctctttctgagatgaatcctcctgggcccttcatctccgtgggtcacacatgccctcatttctactctgctgctgccgtccccacgatccaatagcaatagcacgacccctggccttgaccgtgtatctggggctctgtcccttccacatcacccccaaaccagcatcaaatgtcttgtctggctctgcactaggctcccctcagttagtgcagggtgtccaactgggggcggaagggcttcctgtgcctgcctcttccaatcctccatgtcttatttataccctgacagacactgagggttttgaacttaaaaggctggaatttggcatctttgttctctgactagaaagaggaatcatttgaagaccaaaaagcaggagccagcatctcacagcatgatctgagacccccgtggaagctgctcttttctttctcatcacataggctgagccacccgggactgtcagtgcacaaggaccagggacgcggctgctcctctgagggggaggaagccaagagtatcttctcttagattgggctgagttcccacacccagcacacacattccctgctcactcacctcccacagacagctgggaaatgacacctctggtgacagagccactctccgggcttctgtggggagcgggtggggcactgcagtgggggaggatctcacacccggaggccctgggaagccagggtgggggagggaggaagctggttcctgtttgtcttagagatcaaggccatcagcctccctgcaccttccagggatgtagtaagcacccccaccccagggccaaagggcctcgcctaaaatgcctcctgcacccttgaggcttgctttgaccccctgcactccaccagagcgacagctcccctggtcccatcttctctgacaagctgggtgggagtgtatacagctgctgggtgtgcttagagggcctaatggagaccagccagggataatctcctatgttatccacatcaagccatttaacaaatatggatttagtacctacatatgcaatgtatttggggtccagagagaggagggcaacggtccaaggtcacacctgcgaggcg

SEQ ID NO: 30384 - DNA, 1141 bp, Artificial sequence
  DNA replication origin
cctgtgtgttggaggctcttccagatgcgttcagctggcccgtgcccactcgctgggccttaggctggtgtatgtggggaagttctaacggctctcctggtgggaagggatgttgctctgcttgtattcagttggccatctgtagctaccctgttcttcccaactctcctccctagctagagcaccagccctgggaacacggggctttaggtctgcttgaaggtgaggacgtgactcccacatgtaatcaggagaaagggacagaggaagccccagcccccactgtggctatcctgactccagtggccacatctcaggtgccaggggctgtgggagcttgtgccgtccttggccaaacaccccgcaggcaaagatgcacccctgctgatggagagccttctgcttctgccctctggccctctaccataccacttccccagccagaaccggcgtgcagctaggaggaatgggttgcacggcggagggggtgaggtgggaggcgtctcactgctctcagggttcaggtagaatgttgctggttttgaagctcacctgttgtggagtgttctaatcagttttggctttctgagtttttgtggaattaaagtgctgctgctgcgaaggctgaggctgagtctgtgtggggttgcagtgattaataagccaaaggaatgggaatgagggtcggtgttgttcacgcagctcccttggggctggtgctgggagtggggtgggggtggagatgtctcaggctccgtggggaaagatatggttcttgctcttaagcatctggtctgaggggaaatgtgaggacacagataatcactcacaggggcccagagatccggtaaccacagaaacgtaaaaaagatgctctagaagagaaggggaagaaattgtcttctcaggtcctcatgaataggcaggggctgggtggattggacggacatcttacctctgggggaagactgggaacacttgtcagctctattcctgaccatttcccacactctgcagatcagtgccacgtggtttgagacaaatttgtcccaaagccttttgtttacagttcacacagtaagttcaggagccatatattgtggccataagatgtagaagcaaagatcacgaaacaaccccg

SEQ ID NO: 30385 - DNA, 1018 bp, Artificial sequence
  DNA replication origin
ccgggtcctcagggagtgccgagtccggcgcgggcggcggacgccgcgccaccatctccagtcccctggagctcgaaggcacagtgagccgccacggcgaccttacccactttgtcgccaacaacctgcaactcaagatccgtctgagcggcgcgcctccacccccgccttctgcccctgcgcggccctgcccagcgcctgcacccacacccacaccggccattcccccaatcgaccccgaggtgctgcgggatctggagcggttgagtcgggagctgggaggccgggtggaccgtctgcttcgcggtctgggtggcgcggtgcaggagctgacggcgctgagcgtgggttgcatccagacctaccgcgatgctgtggactccttaggtgaagccgtggacatgagcatcaagggcatgtacaccctgctggcgcgctgcgaggagctggagcgggctctgcagccggttcaggggctggcgcgccaagtccgggatatccgacgtactctggaggtgttggaggccctgtgcaagtgaccaggaggacaggagaggccggtcctggccagggcagggcccagcaggaccctaaggactcttcagggagtcctggtgggaagtgcccactgaggggaggcctgtgtgttggaggctcttccagatgcgttcagctggcccgtgcccactcgctgggccttaggctggtgtatgtggggaagttctaacggctctcctggtgggaagggatgttgctctgcttgtattcagttggccatctgtagctaccctgttcttcccaactctcctccctagctagagcaccagccctgggaacacggggctttaggtctgcttgaaggtgaggacgtgactcccacatgtaatcaggagaaagggacagaggaagccccagcccccactgtggctatcctgactccagtggccacatctcaggtgccaggggctgtgggagcttgtgccgtccttggccaaacaccccgcaggcaaagatgcac

SEQ ID NO: 30386 - DNA, 1283 bp, Artificial sequence
  DNA replication origin
gtgttgcaggagttcttcctgcagaggaagccccccatgctgcagcctctggccttgcccccagggctgagcgtgcaccaggctctggagagggttctgaggctgcccgccgtggccagcaagcgctacctcaccaataaggtcctccctgcacccttcctctgccccctgcctccttcctccgctcagcctcttctgccctcccacccttagaaagtgctgtgggggtttttgcctggccctgcaggaagcagcaggggcagggcagccaccctgatggcctggtctccctgctacccaccttctaagtagagctgttgtctgcattgggggaaagacaggcctcccactgccctgagtgccttgggggcatgtgcgggagctcaggctgtccctgtcccttgctctcttgctaaccccacctggttccacaggtggaccgctctgtgggaggcctggtggcccagcagcagtgcgtggggcccctgcaaactcctctggcagatgtagcggttgtggcactgagccatgaggagctcataggggctgccacagccttgggagaacagccagtcaagagcctgctggacccaaaagtcgccgcccggctggccgtggccgaagccctcaccaacctggtgtttgctctggtcactgacctccgggtgagttctcccacagcttctatcctggagcccccgggcttcaggacccttccacatccatctgtagcccttcatttcatgttgcaacctcccagtccgcctgcacccctggcctctccacatttctcttcccctctaatgctgtgcctctgccacccccaggatgtgaagtgtagcgggaactggatgtgggcagccaagctcccaggggagggcgcagctttggcggatgcctgtgaggctatggtggcagtgatggcagccctgggtgtggcagtggatggtggcaaggactccctcagcatggctgctcgggttggcactgagaccgtgcgggctcctggtgaggtgtgggagccccagggaggggaggaggaactatggagctgggttggcaactcattcctttggactcctccttgctctacagggtcactggtcatctcagcctatgccgtctgcccagacatcacagccactgtgaccccagacctcaagcatcctgaagggagaggtatggacatggccccatcctttgtgatctttgcttgtgtgatctttgtttggctcctgctttgtgagtgctgggcccccatctcaacactgggctgtggtgtt

SEQ ID NO: 30387 - DNA, 1114 bp, Artificial sequence
  DNA replication origin
cgcctgggcccctgcaaatgttatacctccctggaggagacagaccccaagtccacacttctctcttcagtcctacctcctggccctccccttttctctctcctctaacacacacacacacacacacacacacacacacacacacacacacgccagacacaatggctgggtggggctgaggaactggcttcctccgcagagatctcaatctgggccctgagttcccaccccagaatcacaggaacacacacttggaaacctcagccctgcattcctcgctccaaggggcagacaggacaggctgaaaatagcaactggttccaaaaagataaaggtaaattcatggggacctactgcagagttagggagggaagcctgcgggagggtccctgggtgtgaaataggcgttggctcacacccggctcaggagacaggtggtggtgcaagtcggggaaagatggtgagactcgccgtggagggacgcacgcagcatcccttagctgagacagaggcatccagacacccatgctgctcagccaggctctgtgccattgccgtcttgtcctcatccctacccctgtccacctcacccctatgagccccgatccacacagctgtgcaggtagaacctgcgcacacactttccaagcctgaatttcagcttttccccagacccctttaacctctgagaccctggatacctctgtctcctggggccctgtgtgatgtgcgcatgtggagagtggtgtggttcgtgaggggggggtgtccggttgggaggcggatctgattcctgtttcctgcccctactcactcagccctgggaggtgactgagagtggaggggattcaagggtgagtgcttggggcccgagtacctgggttcctaagggtggggtagggaaggaagtaaatgcaggtacccgagagggggtgggatccctgaggggcaggggctggggaggagttggccagtggtcaagactaccgtgtgggtcactttgctaaatgactttctgccagaacacagaggccactgagctgcaagacccatcatctacaacccccttgttcccccctcatcatttctcaaggagccagtccgaggcctggag

SEQ ID NO: 30388 - DNA, 1296 bp, Artificial sequence
  DNA replication origin
ctccatctttaacctgcccagcaactgcaatatcaaggtccaggcatctatagatctcctccaccctgactcccttcaaatcccgacatacagaaaccagatatcccaaacattaactccatttttgaaaaggtagcccctgaaagttgttagcactgaaaacggagaagatgggtggattgaggtcacccagcgccccccacccgccacactcacctggagcaccgttctcctgggacccactcccggtgaggggagcttctctctccccattcacatctgctctcgcttggagacctggctccggggcatctgcatcctgagcccggccttcagcacccccttcaaacctgccagccagcctccgcacagtgccaggagctgaggcagagccattctgagccaggactccagccatggggagcagaggcgtgcagggtgacccagacggcttgggtggggggactggagaccggggagcaggttctggggaggcggagcgccgggacactggactaggtgtgggggtgctggaaggtgagtctggggaagtctgggagtcgaggctggctctagaagctgaggggggcaaaagagcagggggcttgagggatgcagctgggggctcccagaagatgggggtgcacattggggttggtgcatcattggagtttcggggtagttcttgtggagaggagccattgtggggaggccctggggactgggcagccctggaacgagaaggagggcgggggcggatgatccgagggggcttctgcgtggggggtgttgctgcaggaagggactgggctgacatcttcctctgtgctcttcaaaggagtgaggtgctctgctggagtcatcccctgaggaggagggagggaaagagaaagacccttagtgccccacagggagggtaaactggggccactggaaggcaggattttgaagtcaggagggaaggctggtgtgggggttccagagaatccataaaactcaatacgggatacagccgctccgtgtctgcccactgaaccgtgtgtccgtggagtgtgttgtggaggtttgtgtgtggtttgtgtagggggtggcatggtgtgttgtgagtgtgcgagttctgtgcttgccgggtgggtgtgcagggggagagtggagcatacggtgtgtggtgtgtggccctttaggaagttctcggtgtgagtgtctgagatagcggtgccagggtgggtgtgccatgtgtgttctgcgctgtctgggtctgggtgccgtgggcgcgcctgtccgccgggcctgggc

SEQ ID NO: 30389 - DNA, 1382 bp, Artificial sequence
  DNA replication origin
atgctgccttcaagcatctgtttaacaaagcacatcttgcactgcccttaatccatttaaccctgagtggacacagcacatgtttcagagagcacggggttgggggtaaggttatagattaatagcatcccaaggcagaagaatttttcttagtatagaacaaaatggagtctcctatgtctacttctttctacacagacacagtaacaatctgatttctctttcttttccccacatttcccccttttctattcgacacaaccgccatcgtcaccatggcccgtcctcaatgagctgttgggtacacctcccagacggggtggcggcccggcagaggggcccctcacttcccagacggggcggccggccgggcgggggctgccccccacctccctcccggacggggcggctggccaggcaggggctgccccccacctcctggatggggcggctgcagggtggagatgctcctcacttcccagacggggcggctgccgggcggaggggctcctcacttctcagacggggcggctgggcagagacgctcctcacctcccagacggggtggcggtcgggcagagacactcctcagttcccagacggggtcacggccgggcagaggcgatcctcacatcccagacggggcggcggggcagaggcgctccccacatctcagacgatgggcggctgggcagagaccctcctcacttcccagacgggatggcggccgggaagaggctcctcacttcccagactgggcggccgggcacaggggctcctcacatcccagacgatgggcggccaggcagagacgctcctcacttcccagacggggtggcagccgggcagaggctacaatctcggcactttgggaggccaaggcaggcagctgggaggtggaggttgtagggagccgagatcacgccactgcactccagcctgggcaacattgagcactgagtgagcgagactccatctgcaatcccggcacctcgggaggccgaggcaggcagaccactcgcggtcaggagctggagaccagcccggccaacacggcgaaaccccatctccaccaaaaaatacaaaaaccagtcaggcatggcggcgcctgtgggcaatcccaggcactcggcaggctgaggcaggagaatcaggcagggaggttgcagtgagccgagatggcggcagtacagtccagcctcggcttggcatcagagggagaccgtggagagagagggagagggagaccgtggagacggagacggagacggagacggagagagggagagagggagagggagaccgtggagacggagatggagagaggaagagggagacaaatttttttaaaatcactagatggaccaaccaaaataggtcta

SEQ ID NO: 30390 - DNA, 1191 bp, Artificial sequence
  DNA replication origin
cgcccagtctgggaagtgaggagcctcttcccggccgccatcccgtctgggaagtgaggagggtctctgcccagccgcccatcgtctgagatgtggggagcgcctctgccccgccgccccgtctgggatgtgaggatcgcctctgcccggccgtgaccccgtctgggaactgaggagtgtctctgcccgaccgccaccccgtctgggaggtgaggagcgtctctgcccagccgccccgtctgagaagtgaggagcccctccgcccggcagccgccccgtctgggaagtgaggagcatctccaccctgcagccgccccatccaggaggtggggggcagcccctgcctggccagccgccccgtccgggagggaggtggggggcagcccccgcccggccggccgccccgtctgggaagtgaggggcccctctgccgggccgccaccccgtctgggaggtgtacccaacagctcattgaggacgggccatggtgacgatggcggttgtgtcgaatagaaaagggggaaatgtggggaaaagaaagagaaatcagattgttactgtgtctgtgtagaaagaagtagacataggagactccattttgttctatactaagaaaaattcttctgccttgggatgctattaatctataaccttacccccaaccccgtgctctctgaaacatgtgctgtgtccactcagggttaaatggattaagggcagtgcaagatgtgctttgttaaacagatgcttgaaggcagcatgctcgctaagagtcatcaccactccctaatctcaagtacccagggacacaaacactgcggaaggccgcagggtcctctgcctaggaaaaccagagacccttgttcacatgtttatctgctgaccttccctccactattgtcctatgaccgtgccaaatccccctctctgagaaacacccaagaatgatcaataaatactaaaaaaaaaaaaaaaaaaaaaaaaattgaatgattcggccgggcgtgggggctcacacctgtaaccccagcactttaggaggcggaggtgggcggattacaaggtcaggagatcgagaccatcctggctaacacgaggaaaccccgtctctaccaaaaatacaaaaaattagctgggcatggtggcgagcgcctgtagtcccaggaggctgaggcaggaggatgacatgaa

SEQ ID NO: 30391 - DNA, 1900 bp, Artificial sequence
  DNA replication origin
ctggctgtgcccgtgggcctgccctccgtgcccccactggacagcctgggccacacaaaccccctggccgcctcctcccctgcctggaggccacctccaggccaggccaggccgccaggcagcccgggccagagcgcccagctccccctggacctgctgcccagcctgccccgggagtcacagatctttgtcatcagccgccacgggatgcccctgggggagcaggacagcgtgctgccccgccgcagcctggcagagctctcggaggcctccctggcgccccgctccgcccgcgccttctgctgccgatcgcgggccctgctgctcatcacgctcatcgctgtggtggccgtggtggccgccatcctgccctgggtgctgctggtgaggaagcaggcgtgagccgcacctcagggaggccgccgggctagccgtggcctggggtgggacaggaggcccacggcagccctggtgccaccaagctccgaggggcacgcgggcaggcagaggggaggacctgggcacagagagggccttgggcttccccgacccccgcaggggcttccgctcgacagagaggctggagctgactccatgcgcgcggcgcgtgttccccacgtgaatcctcagcagatgcgttccccttcctctaggctgggaagatgggtggtcactgccctcctgcaggctcaccagccctgagcggcagaccttacctgccaggtgacctgcccaaagccaggtgggcccctccagggacaagaaagtcctgcaggcagacgtcctgctgggctggccgatggcaggatcctccaggccagaattcccacccaggatttgcggcttgccctcgggaacagacagaaggggcgcccagaatctcagcactcacccccgacctccaccacagcaccccatcccctaaccctccctgtccccaacctgccagcttagaagggcttccctgaaggagaagctgatctcagaggctgccccagaatttctgggagaatgaacagaaactgttcttcctgcagagctgaggccagatccagagacaggggttggttgatagaggccaccccagcagagtgccccacgaacggagccagaggtctccctgagccctccaggccaaaggagggatccaaactttgagtcctggggttctcaagggtggcagggagtggaggggaagcctgacaggcgagccttgagtcagctgagaactatgtgggcaaacgaacccctgggggctcccgcctccctcccagctagtcctcctcctcatgacccagccactcatttagaggccacaccagctgggccagtttcctaggtggattgccaggctgggctgggtgaggaagggtggggaggaaaacagctgtgcttgtcagggacgccgccatctcaaccgagaaatgctgaggcccaggtgccctcagctgctcctcaaggtctctttgcctggggcccccacgttggactgtgaagagcctcaggttgggtctagcctgagtcattcggggatagctattggctgtttattgaggtccgtaagtcaaccaacacctttcaatggaaaacaacaaaaacctccagcaattatctcaactaagtggtggtctgcacccagctgtgcccacagctgagcccccaacctccctcaacctatacccctctgggcaatttgctgtcttggtggggagggaagaaatagcagtctacgttttatctagttcctaaatgcctgcagtgctggtcatttggggaccgctggggaattgggccccactacaggggatatttgggacatagagagggctgctttaaaagcacttgtgggcttctctgtgctcatttcaagattacagaagtggccaggcacggtggctca

SEQ ID NO: 30392 - DNA, 1557 bp, Artificial sequence
  DNA replication origin
ctgcctgcccgcgtgcccctcggagcttggtggcaccagggctgccgtgggcctcctgtcccaccccaggccacggctagcccggcggcctccctgaggtgcggctcacgcctgcttcctcaccagcagcacccagggcaggatggcggccaccacggccaccacagcgatgagcgtgatgagcagcagggcccgcgatcggcagcagaaggcgcgggcggagcggggcgccagggaggcctccgagagctctgccaggctgcggcggggcagcacgctgtcctgctcccccaggggcatcccgtggcggctgatgacaaagatctgtgactcccggggcaggctgggcagcaggtccagggggagctgggcgctctggcccgggctgcctggcggcctggcctggcctggaggtggcctccaggcaggggaggaggcggccagggggtttgtgtggcccaggctgtccagtgggggcacggagggcaggcccacgggcacagccagcgtctgggagctcttgtccagcatggagggccagcgggagctcttcttgctgaggaatgtgacgtagcggcagatggggcagaccagggtcctctggacctgcccatccacgcgggtggacagcaggtacttgaccaggcagtcatggcagaacacatggccacagctcagcgtccggctggcgccctccaggtcccggaacttctcatagcacacggggcactcactgcccgagctgtccttgctctccccttctgacatggccactgggagatggcacgctcagctgtggacgggaagggttgtgaatattggggcatttcctctttccctcccccgtcctaactcccacctacacctctgcctccactgccccttatcccctctccctgtcttctgcctcctctctcttcctcctactcttggctcttctgctgctcctcctctatggcccacctgactcaaacctagaacccagacccttaggaggagaggagcagatgcttctggaagggagaatcgggagacagagaaccagagaacccagtcacactggaccccaggaggaggtgtgtggagttcctgatgtctcacctcaatcatcatgtacacacatggtgaggtcactgcctcacctcttcctgcttcagtgacggaagtgaagaaaggaagtccctgttaccaggggaagcaggtggctaagaagatgcatgcacagccccagtccagtctccaatttggacctgcacccagagtggccattttccagaaaagcccgtgctagtctcaacctctgccctcacctggggttggcgggtccattggatttcctccagccattggattgcattcctctgtgctaagtgtggctataaagcaatgactgtttaaaaaaacaaagcttagaacttacacattcaaatgcctgctggccctccacatagtcacgtcagggagctttaggttcattccctcacctgccacagctcagtcattctccaaattcttcttatggggctgcctgaggcagtgagagaagcatctgattaa

SEQ ID NO: 30393 - DNA, 1091 bp, Artificial sequence
  DNA replication origin
ctggggctcgcctgagaaacaggccatccgggtgccatctctgagtgcctcttgcgcctgggtgttttaacagaggtgatgatgaaacactccataagaacaatgcccttaaagttgtgcgagagctacaagcccaaattgctgaacttcaggaagactttgaatccgagaaggcttcacggaacaaggccgaaaagcagaaaagggacttgagtgaggaactggaagctctgaaaacagagctggaggacacgctggacaccacggcagcccagcaggaactacggtgagtgtgggagaggaagcagggcccgggcgcctgccgacctctccaccgagcccgtgcagaaatgcctggtgtgcttgctatctttgggaggtggtgtgcttttccttgtgatggcaggtggaacggtgattaaatggtaatggttagaaacagaccagcctatgggtagaaatacctgtgcaggggtgggtgggtaaaccagcagactgagggacacagagggagatggatgtgatcggaaaagctgtggtcagtgatggatatctagggggagagagtgacaactacacagagcagggggcagtgaaaagagatttagatagataggaccagagggagaagggtaaacacaggaataggaggagatacccaggaggccaggcacacatgctggcagtgctaggtggtgtgaacggtgtaggtaaccagctgaaaagggaagggtgccttcacaagggtgagaagaaggctggtgcacgcactgggacagagtgtgcagtgggcagaggcatatgcagcatcatgagccagcagccagggcgggcatgaaaaaagtgacgagcataggtgaacatggccagagaaggctcctgggtagaaagctgcagtgtggcagcccacgagtcgcaggagagccttagcagtgagccggtacgcaggcctggaggtgctggcctgcggctcccacggactcataggtgtcatcactgtggagagcagcatggggggtgtgccagcttgctgtcctggcagaggccatctgctccctcccagactcacactgccaagtgcctcagggcca

SEQ ID NO: 30394 - DNA, 1618 bp, Artificial sequence
  DNA replication origin
ttaaccctgagtggacacagtacatgtttcagagagcacagggttgggggtaaggtctcagatcaacaggatcccaaggcagaagaagttttcttagtacagaacaaaatgaaaagtctcccatgtctacttctttctacacagacacggcaaccatccgatttctcaatcccttccccacccctcccgcctctccattccacaaagccgccactgtcatcctggcccgctctcaatgagctgctgggcacacctcccagacggggtggtggccgggcagaggggctcctcacttcccagtaggggcggccaggcagaggcgcccctcacctcccgggcagggcggctggccgggcggggggctgtcccccccacctccctcccggacggggtggctgccgggcggagaggctcctcacttctcagacggggcggctgccgggcggaggggctcctcacttctcagacggggcggccgggcagagatgctcctcacctcccagacggggtcggggccgggcagaggtgctcctcacatcccagacggggcggcggggcagaggcgctccccacatctcagaagatgggcggccgggcagagacgctcctcacttcctagatgtgatggcggccgggaagaggtgttcctcacttcctaggtgggatggcagccgggtggagacgctcctcactttccagactgggcagccaggcagaggggctcctcacatcccagatgatgggcggccaggcagagacgctcctcacttcccagacggggtggcggccgggcagaggctgcaatctcggcactttgggaggccaaggcaggcggctgggaggtggaggttgtagcgagccgagatcacgccactgcactccagcctgggcaccattgagcactgagtgaacgagactccgtctgcaatcccggcacctcgggaggccgaggctggcggatcacttgcggttaggggctggagaccggcctggccaacacagcgaaaccccgtctccaccaaaaccagtcaggcgtggcggcgcgagctttcaatcgcaggcactgggcaggctgagtcaggagaatcaggcagggaggctgcagcgagccgagatggcagcagcacagtccagcctcggctcagcatgagagggagaccgtggaaagagagggagagggagagggagagcgagtaaattctttaaaatgatcaaagtgttgaaagaaatagaaaaagaaagcagcaggcagtaccctgtagaagttaaatgtgatgtagacaagaataacgggacagggtgacctgcagaaattctctgcaggagagcaagagagccagtcacaaagaaagctgggagcatatttgcatatctgttataacgataaatagccctgctattttgagcactcctgagaaatattctttggctctcaagaatgcatttgtcaaaagagtaagttctctttaattcatgtctcctacggtacagtagtcagtgcgggtacctgttacaatagtctgctgcgccacatcacatcatcattctaaaggcaacttaaccaccaagcaagctggcttggagaaagtgtttcagggcctttgctgggctcgggacg

SEQ ID NO: 30395 - DNA, 967 bp, Artificial sequence
  DNA replication origin
ccagtctggaaagtgaggagcgtctccacccggctgccatcccacctaggaagtgaggaacacctcttcccggccgccatcacatctaggaagtgaggagcgtctctgcccggccgcccatcttctgagatgtggggagcgcctctgccccgccgccccgtctgggatgtgaggagcacctctgcccggccccgaccccgtctgggaggtgaggagcatctctgcccggccgccccgtctgagaagtgaggagcccctccgcccggcagccgccccgtctgagaagtgaggagcctctccgcccggcagccaccccgtccgggagggaggtgggggggacagccccccgcccggccagccgccctgcccgggaggtgaggggcgcctctgcctggccgcccctactgggaagtgaggagcccctctgcccggccaccaccccgtctgggaggtgtgcccagcagctcattgagagcgggccaggatgacagtggcggctttgtggaatggagaggcgggaggggtggggaagggattgagaaatcggatggttgccgtgtctgtgtagaaagaagtagacatgggagacttttcattttgttctgtactaagaaaacttcttctgccttgggatcctgttgatctgagaccttacccccaaccctgtgctctctgaaacatgtactgtgtccactcagggttaaatggattaagggcggtgcaagatgtgctttgttaaacagatgcttgaaggcagcatgctccttaagagtcatcaccactccctaatctcaagtacccagggacacaaacactgcggaaggccgcagggtcctctgcctaggaaaaccggagacctttgttcacttgtttatctgctgaccttccctccactattgtcctatgaccctgccaagtccccctctgtgagaaacacccaagaattatcaataaaaaataaataaat

SEQ ID NO: 30396 - DNA, 1881 bp, Artificial sequence
  DNA replication origin
ctgggggtggggacgtgaggaccaggttctcggtgggtgggatccctgggggcgcgaggtcgaggggctagtgtcccggcggaggtctcggcgtgccccgcgagccagtgtctgcctcccaggaagagaggggattctaagcggggctggaaagcgcagtcccggcggtagggtgggggggcgctgggcaggaagggcccctgcgtgggttgctgggtgggttaggcctggcgcgaccggtcccccgcagcaccagaggggttcaccatgggcttggaaggcgggcggcgcgcgcccgacccgtgggtggagggacaggagggcattggctctgcgcggccggggaagcgcgcggcgggtgaggggctccggagccggccgcgggcgtggggagggtcggactccgccggcgccggggaaggagcgcgggaggagggcgtcctgccgcgccctccgtggagcgcctaggccgggggtggacgccctgcgaggcccaggcggtttgagggggcgaggcgggaaatgtggcggggcgcgctgcagcaggacggccggggggagggtcagcactcgcctcgggatccctttattgtgtaagcgagctgggaatggctcgccgcagtctcttcattgccttctgcagttgggggtcacaccctgatcccataaaatcggactggaattggttcggagggaagttgaagccgcggagtcctggcatttgtgggggctttgtgggcctgtggtgggcggatgcggccctgggaagcgggaggcccccagccaggcctgtttggaactagggccttaggaaggaggttggcgactcggcgggtcagaccgggctggtgaggtttggataacgtggcctctgcctacagccgttatctctgtttctttagggcctctgcagctcccttcaagatcactgcggtggatggaagggggtggggtgggctggggtggggtaggggaaagcaggcggggtagatgcagactgcagatgaaacaaagactgctgttttcgctgaataatgtaataccaaacataatactttggctttgctgagattttgttttttaacgttgaaactgaggattctttgagtcaggtttaattattcttgatagtatctcactctggaaaactttataatctatttattgttttatctccttcatcaatctgcctttattaattattctttgagtcccttgcttttgatgtttaagtatgccctgcctgtctcgggttctggaaaagtggccattttatgcatctccttacttctgcatcttaaattcagttcttccccgtccttatctggagaaagcatatggtgtaattgtgcgatatagcacgagctttggcagcagaaggatgtgacccctgcgagcctggcttttcatttgggctccatagggaaatcattataacgaaggcagctgagatggaaggtgagatggaggaaatcttgaagggcacgttgtagggtggaagactatatgcttcagcggtttatgcactttatcacatgtgaggaattaaagttcctggtgttggatcctagttttggaaatattaaacacagtatagagatattaattgggagatggggcaggccataagtagcaatagtggccttttgtgtttggtttgtgtttgtgatcattgggttgagcaggattttgataaattagcagactcgtccagccctgtcatgtaagtgacctcaatggtagcagtacccaaattgggacagttctgttttagctcatctgttatagatggatgctctgtcatggataatttatccatccttcttgtttgcctttctatgtgcaggccgttcataaaattgaattgtttgcctctgtcca

SEQ ID NO: 30397 - DNA, 1361 bp, Artificial sequence
  DNA replication origin
cgttccttcccccactgcaggtgagtcgcagcgccgcggccccaaccccgcgcagccccgggggtgacgtcaggactctggaccgcgctccgccccgcccctgcaggcaacgctgagggcccgcgactccgcggtggaaccccgtcccgctgcggtacatgccggctgccgcaagcacagggggcgaccgggcgctcgaatgtgctgcggctgcggcggctgcctgacgctaggacgaggagtctgcagtcagagcgccagcctcctgccgcggcccacctgccccgcggcccgcacagccaatgtcagcgcagcgcgccggccgccgcggggcccgcacccgcagcctcgcgggatcgccgggcgttcagccagcctcagctgtccatctacgcacgagccagccaatcccgcgccactgccccggccgcacctcccggagcctatgacgggcgtaagagccagcccatgagattggggcctctgtggcctgggctgggagcgggagccaatgagcgtcattccaggtgggtggagggagccggactcgggaaggtagcttcgttcgggttgctaacgtcttcccttggagatgggcgcgcaaaccaaccagtgggtctgggggcggcggtgatgggcgtggagctggcccaatgagggtaggggtgggtggggcagccccgagcagcagtgctaaaggagcccggcggaggcagcggtgggtttgggactgaggcgctggatctgtggtcgcggctggggacgtgcgcccgcgccaccatcttcggctgaaggtgagaggtgcggctacccgggtccgagtgcacggcccagggctgggggacagtttgtggagggaggaatggctcctgggctgaggggtcccgggcggctctggaggacaggaacgggggaccgaagcgggagctggggaagacagaggggcttctgagctgtagggtttgtgctgcggggaccttaggttagtttgagcagggtcctgggctgggggcactgggacctcagtgggtggagatggagagactcccggaggagcggggaatgaagtccttgtgaaacccgcgggggtcagggcctgggtgtgcaggagggcgacccctggggggctgggggatggagatctgggggtggggacgtgaggaccaggttctcggtgggtgggatccctgggggcgcgaggtcgaggggctagtgtcccggcggaggtctcggcgtgccccgcgagccagtgtctgcctcccaggaagagaggggattctaagcggggctggaaagcgcagtcccggcggtagggtgggggggcgctgggcaggaagggcccctgcgtgggttgctgggtg

SEQ ID NO: 30398 - DNA, 1482 bp, Artificial sequence
  DNA replication origin
aacatctttggggtgggggtgggagagcagagaggtcaggagggctcctgacatgagtaccaaggaagaccccagcatccctgccccagaggctccatccccaggcccaagagggtccataggagcctcccactttctaccccatgcctggcccagagcagagcatccctggacagtggtacccccaagacccagatcctttctgttctccccaaagagaccagatcaccatagaggactcctggctctagccaccccactcagacaatggagggctgtccacaggctctcccagagccccagcccacccccttcctttcctgcccctctgcactccatccctgagtccccaccttcttcttctgcaccatagtttgatgcatgatttctgtctcctttttcttctccagtagccagatggatggggactccgacgccccctcaacattggggagtttcctgtccaagatgtgaacgcgagagggctgtgtgttctgacatggggtaggctggggctgggagtaacccgtggagacagatacccatggggaagcagaggggcctctctccctttccgagggaaagggctgttgtgttgagaagcatagagggccatgcaggagtgagcagggggagggtgacggggtggagaccagcgtgatgaggtggactggtgccaaggttatttggggcactgggttacaggagaggaggggacagacggttggaagatgaggtatggggtgggtgtgagtggtcccaggcacagaggggtgggcaagccaggcctcagacactcactggagcatctgcagcagccgctccccatactgcagccggaagtactcggccaggtcttcctcttccatgatgcccagactcatggtggcagtgacctcacggcccaggcagctgactcttcacagtgaaattgtgggtagcagagccacaggtggctcaggggtggtggctgcactcttgtttctcccttcggcctacagggtcccacagatgatggagtttgagactccacagaaggtggctggagacaggttgggcggctcaggacgatgtgctggggcagttatgggagatgtggttacctagcaacaggctgcctggttctgtggccggcacgtggagtccaggcgctgccctctgccccctgccccctgcccccattggtcctccccttgctggggtcctgctctctgctcctgccctttgccctcaggaacttctgggaaggcattaggcctggttagatgctggttgccatggagcccagggccagaggcagtttctggtgagtgtggctgagaaggggcatcgggtggaggagcggccttgtgcgggcgccctgctcttagggcctccctggggttcaggtgtgggtgagggtgagggaggggccgggccttggtgaagaagagcagagaaagaaaggaggtgcttagcggcggcaggggtggagtcgcgagg

SEQ ID NO: 30399 - DNA, 1111 bp, Artificial sequence
  DNA replication origin
tggtttttgtcagaagtgtgtttgaatattgtgaattttcatgcctttaggcagctcacaaagtcagggctatcttagagcaaggtacttgcccaagcccttagagcacttgaggattttgcctggagtggcactagcaacatgctgttttaacactttcaccttagaacacattttggtgtctggcagtggacattccctctcattcttcttttgtgatagttccttaagtactcagttctctagatgaacttttacattgttttgtcaacatctatggggaaaaaaactctctgaaattttgattgcaatcgcattaaattcctaaattcatttggatggaatttacagctttaccatactgaaccatcatttagacattttgtaagtctattcagttattttatatcctcaggagaggggaggggagggaagggaagggaagggaagggaagggaagggaagggaagggaaaagatggggataggacagacctctgtaaatccgagacagccctgcgtcttgctcagggtccctgggagggcagtgagactccagagagggatggtggtgtgcaaggatcacgaaaactcccatgataggtaccaaaccaagcagcagaaagagcttccagatacgaggagacccttgggcaggagcagaggatgtcttacacctacctctatggaccaacctggccctggaccacctgatttcacggacaatcaaggatatgtctcatatacgtggcggggagggtgattccagaaacagatggcttcctcctcaagggctggcgttgcacagctcctaggcacgaccttaaagaaagggaggggaagcccagattgactgtgccagcctctgtggataaacaaggaaacatgcccctccgaggagcttgaatcgttcttggcggtcttattgtcgccctgctgggcgtgttcctccggggctccggtggagaaccacctcttgtttagggttggggtggccattgtgtgggtgtgttctgcgtggggtagggactgtcttgctttctctgctgagcccaccggactaggtggaagcgacaggtgtgtgtgatggtccgctctggaggggaggctcc

SEQ ID NO: 30400 - DNA, 1582 bp, Artificial sequence
  DNA replication origin
aagcagtccaggcgtttagctcaggctcctgggccacattggcagccagaggccaggcggggcccgaggcctagctcagagcgcaccctacaggcccccggacgcgcccctagcgcacctgcgcacgtccgggcaggtggcccgcggaggcggtgggacgtggcaggtgcggctcgcaggtgcgctggccccgcccccaccttcgcccccgccccgcctctccctccgggcggggcccctttcggtccaacggcaggacctgggggctgtggccgggggcggccgttgacctggtgaccgcggcgccgccccagaccgggggcgcagtcccactcgctccgagccccggtcccccaagcctccctcccgggtacctggggccgcgcccgccctgcgcccagctccgccctccgtcggcccaggcctgacagagcccggcagccatgagtgccaacccccggtgggacatcagcagggcgctgggggtggccaagctcttccacctggtgtgcggggtgcgggaagcctgcgtgaccccgttcctgaccctttacctgaggcagctgggcttggccgcgccctgggtgggcaccctaatgggaaccaagcacctaatcgctgccttctgggctcccgtctgtgccttcctggccaaaagctaccggaaaaggagagcgcttctgatcggctccctgctcggctcggtgggggccagcctgctgatggtcctggtcccaccggtagacaaaaatcgggtgcacttcccttgtaatggaagcagcggcctgaccagcacagacgcactcccgggggtcacgctacctgtgaacatcacctcggcccaagagtctgcctccagccacccagccaagaggactgcagaggtggaaatgcctggcttcagaaacccacctggtgaaagtgaccgagaaactttccgtgatctgcacgtctacttagcgccctccgttgaaggagctaggaccacatcccaagctctcctccatcctgtcacttcggggctgaaagatcatccctgggaagttacttttgaggtggtcaagacagccctccccttgcttcctggggggaaagggcccgggaatccagccaatttgtcagggaccaaggggaaagcctgggcttttgacctgtccttggaggcgttgcggcggacttttatcctctccttggggtccgtggcgttctgggagctgctgacagcgcctctggagcaggtggcagatgacagcctttatgagttcctggattttgtggatgccactgaccgatacagaagcctgtgggtctggaggttgctgggcatgtcggcaggcgtgtgtggcatcacagccttggtggggcagctggactgcttcctgatgaccagtggcccccgaggtgtggtccacttctatgggtactcggtggtcagcaccctggccttactggtgagcattgcctttcccattcccatctgtcagcagtgggagcccagctacaaaagggtcaaagcactgtccattgtggggggtgacccccacctcattctcctcgcctccaccactgttttggtaggagc

SEQ ID NO: 30401 - DNA, 1309 bp, Artificial sequence
  DNA replication origin
agctgcctcaggtaaagggtcaggaacggggtcacgcaggcttcccgcaccccgcacaccaggtggaagagcttggccacccccagcgccctgctgatgtcccaccgggggttggcactcatggctgccgggctctgtcaggcctgggccgacggagggcggagctgggcgcagggcgggcgcggccccaggtacccgggagggaggcttgggggaccggggctcggagcgagtgggactgcgcccccggtctggggcggcgccgcggtcaccaggtcaacggccgcccccggccacagcccccaggtcctgccgttggaccgaaaggggccccgcccggagggagaggcggggcgggggcgaaggtgggggcggggccagcgcacctgcgagccgcacctgccacgtcccaccgcctccgcgggccacctgcccggacgtgcgcaggtgcgctaggggcgcgtccgggggcctgtagggtgcgctctgagctaggcctcgggccccgcctggcctctggctgccaatgtggcccaggagcctgagctaaacgcctggactgcttcaggcaagtaaaaccgtcagagtcggcgtgggggggagccagaatggaatgaatggtatccaccaggctgtctccctcatcttcttcaggtctgtactggaatgcaccctgatcagtgaccaaccacagacagagatcaacacggtccactctgacatcgcaaatcccatacccctgtacccaccccgcccccaagactcccactcccctgccctacttgatcgttctctctagaacttatcactgaccaaggcactacgggcttatatttcatgtgttgactttgtttattgtctgtctccaccagaatccaagctccaggaaggcaggtatttttgtccccggggcctagaattgtttcattggatgcatactgccctcggaaatggcatgaccttgggtgacatggttgtctccagctgggacagtccctaaggagggctgacagctgatggcagtcgtccaggggaactccttgcagccgatcgccagcacatggcagtccccagagccatatgtatgtgctgcacagttttaacctacacctaagggtggtctggtgccctgtttgagagtacacacacttgaggtggttagctagcatttcatcaaaaagacagagacagctagtacaagcacgtcgacaatcttaaatcaacagaagtgtcttcactaatggacataatagatattagaaatagtttttcactggtgaaattagtggtgtccaagccacctggattg

SEQ ID NO: 30402 - DNA, 2494 bp, Artificial sequence
  DNA replication origin
ccatctggcttggctgccccttccctctggccacagcagtccctgaaggctgaagcccaggccctggagggctccccaacccagctgcccatcctggctgacatgctactctactactgccgctttgccgccagaccggtgctgctgcaagtctatcagaccgaggtaaggcctccctgccccgaaccgcctcttccccacctgccgggcctgcaaggccccacccctgccccgggagagccagcaggtctatgctggaggagccaaatgggcccctccaggaggttcacactgatgtacatgctcctgccctctccagctgaccttcatcactggggagaagacgacagagatcttcatccactccttggagctgggtcactccgctgccacacgtgccatcaaggcgtcaggtgggtactgcctgagcagagacagacggtgaggcggggcctgggacgcgaaacgtggagctctgtggaggtggggttacctgggaggtggggccatgggaaggtggggttgcacaggaggtaggcccctggggagacggggttaccgggaggtggggccatggggtggctgggtgacccggtaggcggggccctggggaggcagggatacgggaggtggggccacgggaaggtagggttacccaggaggcagggccatgagagggcggggttacctaggaggcagggccatggggaggcggggttgtccggtaggtggggccttggggaggcagggttaccgggaggcagggccatggggaggcggagttacccaggaggcggggccctggggaggcggggttacccaggaggtggggccatgggagggcggggttacccaggaggcggggccatgggagggcggggttacccaggaggtggggccatgggagggcggggttacccaggaggtggggccatgggagggcggggttacctaggaggcagggccatggggaggcggggccctggggaggcggggttacccaggaggtggggccatgggggggcggggttacctaggaggcagggccatggggaggcggggttgtccggtaggtggggccttggggaggcagggttaccgggaggcagggccatgggaagatggagttacccaggaggcggggccctggggaggcggggttacccaggaggtggggccatgggagggcggggttacccaggaggcgaggccatggggaggcggggttgcctggtaggtggggccctggggaggcaggggtaccgggaggcagggccatgggaaggtggagttacccacgaggcagggccctggggaggcggtgttacccaggaggcaaggccatggggaggcggggttgcctggaaggcagggccctggggaggcacggttaccgggaggcaggaccatgggaaggggggttacatgggaggtcgggccaggtggaggcaggcttacccagcaggtgggccctggggaggcagggttacccaggaggtggggccctggagaggcaggaccctgggaaggtgtgatcacagcggagatggggccctggagaggcaggaccctgggaaggtgtgatcacagcggagatggggccctggagaggcaggaccctgggaatgtgtgatcacagcggagatgggccctggagtgatggggtcactgaggaggtggagatccccagaacgtggagccagagagagaggcagggccttggtgagacagatccctagggagtcacggtccatgtggtaggggatggggaggtaaggcccagggaggcaaggccactgcgttcgtgaggagccggggaagccaggggtagtgaagggtctgtctgtgtgtggcacaggtcctggcagcaagcggctgggcatcgatggcgaccgggaggctgttcctctaacactacagattatttacagcaaggtaagacccgtgctggggctccttcccctccaggatctgctgctgatacttcctccgccagagcttggacccagagctggactcgtgtgttcctgggccccagtctttacgctggaaggctgcagcaggctcccctggatgctgagagaagcagagaagggaaggagtggatatctctgtgcttcttggcctccaaagcctctctcccaccatgttctctgcccccacccgaatgcgctcagcagcagcccaggggtaggggtctgctgggcctggctacagggctggggctgaaagggggaaagggaagccttccagaggcacctcagggagaagccagggtctcggggggccagtgtgcctggcaggctgcatgcaagatgggattggcgtgagaaaggagtgaggagagctgtggggaggtggagggctgtccatgacatgccagaagacatgagttctctgagcaggtcgcatcccaaggtccaggctgagggaagcttggcctcacaggtgggcttcttccttcggccattccaaagatatcctcttagcacct

SEQ ID NO: 30403 - DNA, 1233 bp, Artificial sequence
  DNA replication origin
ggtctgcttcttccgagggctggcgggtcagagccggggctgcttctcagacgccttgcggcctcgggggcgtgacccagaggatgtggggccgggcgcgcacctggctgacgctgccgggccgccaggtggctggagaggccggctccgcggtcagccccgccccattaggccccgccccctgacaggctccgccccgcccgccggaggagcccaggctgggcagatgctgcggctcgccgcgcggctccagctggggcgcggtggtcccgacggtcacccgaatcgcagggagtcgccgctggagaggggctcggcgcccggcggggactgcaggtgtgtgactgggcggccagggcggatgcggagggcacgcatgggagctccaggcagagctggagcaagctggggaccgtcggggagagtgggctccgcgagcagccgccgcagcccgagggctggacagatcctgctatcttccggccccgtggacctggcccaccgcgggggcagcgggtctgcaaacctgcgctccagataaccccagagacttaaggggcgtcgcggggaccacttatcgttatccgggtaacctctgctgggcggctctgcgcagctgtgtcctcagcctcctgcctctgacacaggacgccctgtgtcgtagggtcaggtcccctgcccgctccagcggggaactgtccgtgagcgtgggcatcagggctcttgtgccgtcagaacctgggagtcatggaagtgcccgcgtaaggcgccctccgtcgagcctcactcagcctgctagttagccagccttgggcccagacgcggctgctgtcctagagaactgcacgctttctgctctcagaggatctgtgtttacacactggacatccccgcgtgactcgtgtgtgtgtgtgtgtgtgtgtgtgtgtgggcatgcgcatgtgcgcgtgctggcccatcccggcctggggtaaatacacaaaaagttcaggtcagtaggaggaaggagattgttcagaaggaaaaggaaggcgaggttaaagcagcaggatgtggtataaagcgagttaacaagactcggagtagagaggaggggtgggtttaggcagaataagggctaaaagtaggccaagcctgcctccaaggtcctctctggactgacaccctcgttttccttctgtgtcttctcatccaccccacactttccttcctgccctcaggaccacctgtaag

SEQ ID NO: 30404 - DNA, 1716 bp, Artificial sequence
  DNA replication origin
ctgtgacagggagacgcagacagaactcagtgttgacggcgtggcataacatgcaggctccacatctgggccacagctgtaggtggagaggagaatgcctacttctgaggggatgtacgatgggaccaagttggcttcttgggatgctcagagccctaggagtgagcaccaatgagccactcttttgcagttttcctccattttcagaaggcaggcatcccataatttctctggcagattatttgcctttccaagtgctctcctaatccaacatttccatctggcacacagtgtcattcttgctcctgaattcctgattccagagcatttctgccattttcttcctttgcacagtgtgtaccttccctcttctcctcttcttccaaatgtccatatttttgtggtggaaaaagtggggacaggggagacagaagactggaatccttatcaagtcctctctcagcccttggtggctctggttccttctctgtgaaagggtgacgtgtggggaaggggttggggatgaggtaggagagggggtctgagttccttcccacgtctaacgatggctggaaccaggcctctgtgttcaaccaagggtactttctgtttctgtccatttggggaagttgctttttcttggtatttcgggagtcaggaaaagaaaagtcattggtgttcatatctctcaaagcctcaggtagggctgcggcttttgaccaacaataacgtatgaccatgaccttgtggccgagtttgcacgcctctaacagatattatgacacagttccattcaatagtggaagtggagatttcagcgttgccctttgttaacccacaaatgaagtgctactcttccattgtgagggctgtcggagcagtagccaaccttcttatccccattttttaaacgagggaaaggaggcataggaagcgcagtgtcttgtgggattccctggggagtccttccaactcttggtagagcatcatctgcaacgtcgtctgggggagaaaagggggaggcaagaagagggccttgaccctggaggcaggaactcccgcacaccctcactcccttccccaggggctggggaaaccactcaggtgacagtagccttggtgccggccagggagggcgggaagtccagccagaggctggaacagcagtgctgaacgccgggactggctggtatttctatgaaggttcctgcagaaggatgcgggtcaaggtgcccgtctgcacagcagtagtgcaggcattttaagggttaagggcacccaaagaaaatagaagtaggggccgggcgcagtggctcacgcctgtaatcccagcactttgggaagccgaggcgggcggatcacgaggtcaagagatcgagaccatcctggccaacatggtgaaaccccgtctctagtaaaaatacaaaaaattgggcgtggtggcgcgcgcctgtagtcccagctacccgggaggctgaggcaggagaatcgcttgaacccgggaggcggaggttgtggggagtcaagatcgtgccactgcactccagcctggcgacagagcgagactccatctcaaaaaaaaaaaaaaaaaaaagaaagaaaatagaagtaggaagaggaagtgggtcgcagtgagagaaggaagcagctcgtcggagcttcctctttctcgtctttcccctaagcccctaccccagacctgcccccctgctccgc

SEQ ID NO: 30405 - DNA, 893 bp, Artificial sequence
  DNA replication origin
cgcaccagtgcctacttttccacgcaccgcccgggatggccgcccccagacggccccggcccgcggccacccccgccatccccgcgcaggctctacgccgctccagctgccctccgaggccttcaagaaaacttgggcgccgccctccgaccgcagccccagccagagcttcccgagcgcggggcagccgcgggccgcccccacccggccgcgactcgggatccgcgggtggcacttacctccccgaggcgccggcggcagcgggaggcgagctctccgcggctcccgttcgagtgcgcggggcacggaggagcgcgcgcctttaagactcttccccgagactccgccaggtggtgtcacgccggcccggccctcgcggctcctcgccccgcggccacccggctcccctgcccatcgcgggcagaacaccagcctcccgctcgcaccctgcgccccgccgctcgggctccagtggagctgggccaagataggatgcgtgtaacttgggacacacaactatccaacagaaagccacccaacctacacactctagctttggtttgtctgggagttgcaggggtctttttgtttgtctgtttgtttgaccgagtgctgggggtaaaaatggggaggagagagctgagaagtctgacccaaggacgtgcgatcatgtccccactgccatcaccagcgacaaacctcaattccatgctaactggtctttttgcccttcatccaagatggtctgctgacacgcctcccccaatgaccattaaaatgactgaagagataaaatagagggagaactgtcgccacttaacactaggggaatgcgtcattcacactcctgaaacttagaaaagtttaagaggatccgagggatggctgaagga

SEQ ID NO: 30406 - DNA, 1086 bp, Artificial sequence
  DNA replication origin
ctgtgtggggcctgcagtgtgcagtgttaggtccagctgtgaaagcacattggtaagagaaggcccctgggtttggggactcaacatccaggcagcctgcggtgcactctggcctctcctcatctggctgggtgcacagttcaccccctgccgctccctcattggctgcacattctggaggatactggagcatctcctagaaatagacctcacccactatggcctccagtctgggaggacaccgaaaagactgttctgcagatcatatgtgacgcacatagaacaagcaaagcccatggtcctgggagagaagggcctgctaggtaaagaacctgatttgggctgcattcccctaaatatggtccttataccacctgcatcaacatgcttcaggatgcttgtttaaaatgcagccttctgggcccctccccagacgtagggaagctgtggggcagcggtggggaggaggagggagggtgtgtgtgtatgtgtgtgtgtgttgggtcggggtgggggcggttggaagtctgatgcccagagtccgagattcactgtttgccatgaaatccattctggctcaagccctctaattagctgggtgacaactgcaagtcactttaggcctcaatatcactatctgtataatggctctagaatctgtggaaggatgtttccaactcttagaaagcgtgatttcaaggacagctggatatcagaacccgaaagccacaaggggtgggtggaggcagcctgagagaaaatctgggagtcgctaaagctcccaggagaatgttggtgaagacgtggagagatgcgggggaggtgcagcaaggttggtggtcagtggtgggagcggtgcctgggatccttctactgagagcccccttacttggggccacatgtgatctcattttatccttgttttgcaaatgaggaaacagacacagaggggagggatgacttccactcagaagttgatgagtagtacggagattccatctcccctacacacctgggacacgcatctggccattccagaaactccccttcgtcccagctgtgtcagttctgcctctcaaccgagct

SEQ ID NO: 30407 - DNA, 1299 bp, Artificial sequence
  DNA replication origin
cgccggccaataacgtccgcgagctgccgccagctccgagcaaagttttcaccccgggaaagaagaaagttaaagggaaccggcccggacgcccgagagggagagcacaggcgggtgggaacccgggagcccgagaaagaacagcagagacaaagagaaagcgaggagagcacccggggaaaccccggagagggggctgggccgggccaggcgcgcaccccgtgggggaggaggggccgccggggactgtcagcctcgcccgcgccccgcgccgcccggagagcctcacgcccgggggagcgcgcgggcgggggaagggggccactttctccctcccggtcccagccaaacacatctgtgtttgttttctttgctgcgcggaggtcgggccttcctctaacccagcctgatggcccccggtggcaccgcgcacagggctgtgcccctgtgggcacgcagcccgggagcgtgaggaagaggaggaggatgtgacctctgcctgctctccatttttgcccgaagcccccggggtccggcgaggaggggctgctcgcccgcactcccacggatatcaccgtgcgtgagcctgtctgtcgggaacgcggcttcgttctagccaagggagcagtggtgggcaggaggctgaaggggtaggaagctggcagcacctggacgctggccaccgcccctccaagacgggcctgcctggtctcaggcatggggacagcccagccctccccagatcccctgaggcaggcgtatcggtacttcctcaaccgcatttttaagggtgcaaagccctgtaatagctcatgggacctccacagcagctttgctgttgtattaactccattttgcagatgaggaaactgagggtcccgggagctgaagaaactcgcacaagatcaacccccaagtaaacatcaaaaacaggaagagaagcctgggctccttccactgcagggcattcgtcaaatgcataaccttgccgaatgatggtgtcatggggcatctgcggggccacccagcccctccttgcctcattctccatcgccccaataaaaagactgaggacagtgacagcatcctttggtcatcttgcaacagcagccagagagctctgggaaaggaatacactgggccgagagtttggaacggaatctctgctcgtttatttgttacttgtagatgtgtggtccagtaatagacccggatgaaaagccccaggtcctggttccggcccaagggctgccttgctgcattagctccattaagtgcctcagtttgtcttattggcat

SEQ ID NO: 30408 - DNA, 868 bp, Artificial sequence
  DNA replication origin
gaggccgtgtgcaccgactcgcacaccgacatgcgcccgctctcgggcggcctcatcgccttcagcacgctggacgggcggccctcggcgcacgacttcgacaactcgcccgtgctgcaggactgggtcacggccacagacatccgcgtggccttcagccgcctgcacacgttcggcgacgagaacgaggacgactcggagctggcgcgcgactcgtacttctacgcggtgtccgacctgcaggtgggcggccggtgcaagtgcaacggccacgcggcccgctgcgtgcgcgaccgcgacgacagcctggtgtgcgactgcaggcacaacacggccggcccggagtgcgaccgctgcaagcccttccactacgaccggccctggcagcgcgccacagcccgcgaagccaacgagtgcgtgggtgagtggggtgcggcggcggagccggcggcgggtggggccgcgggcgggagctgctgggcctcgcagcggcgagttcataggagcgcgggtcgagggaacggcgggaggcgcgttcgccgatgcccgggacccgggagggctcagagcaggtccactcgctcgcgtggcgctcgtggtggacgcccgaatttgcgcccagtgctctctgcgaagccaagaagcagcaggagaaatgttcccgggagggggtttggcagaacatttgcagataggtctccgctaaccctggatccaaacgcaaacattcattgccttccccctcgttgggttggacgctgggattcacctgcacccacccccctttcccaaggctgcagctgggctcgcggttggggaccccggcccagttcctgggaagttccaactccacacctacaaatccctt

SEQ ID NO: 30409 - DNA, 959 bp, Artificial sequence
  DNA replication origin
ccagcctgggtgacaagagcgaaactccatctcaagaaaaaagagagagagagagagagataaagggtatggtaagttctgggcacatcaaaggagtttgaatgctgcatttggtctcctcaggctgatgctcctgtctggccccttctgctctggctcagtgtggctgttggggaaggttctggaaaaattagggcttcgcattcagctctgatgatgggtaggagggctgtggctaaagaggaacaggtgggaatcagcggagtcaagcacagatagagggaacaaaccaggtatactgggagtcgtggccttgagggcaccccactgtggaaagttgcagatatcagctcgagggggctgtatttggctgacttggcaatggggaaccaggatggtgtttgaatgaaggactcatgggctcattttcacttcgaggggagaagggaggctggtagcagggtaccacgtgtctcatgcatatcctggagaaggcctgagatagggcagccgtgcatggatcagggaggcggagggaggccctagggacatgggatcagagcagtgggcaggagtgagattgtggtagggccgggggggggcaggacagggagttaggattttattccaggtgtaaagggaagctaagggggtgtgtgttgagctgggtggtggcatgaacctgctatgttttaataagattgtcccggttgctctgcaggaggcaggggtagaagctgggaacagccaggaggccttggaagttttcaggtgggagatgacgggggcttggctggaggagaggtggtggtgagaagtggccccctgtgggatccgtgtggaaggcagtgtcaccagaactaggtgggttgtttgtgggagcgaaaagaaggaaagcaatgacccgtgagtccttctcaagggtttgtgtgactgaggagcttggtgccactcattag

SEQ ID NO: 30410 - DNA, 736 bp, Artificial sequence
  DNA replication origin
ctgcgtggatgggagatggaagccagacagagcctcattcccagctgggctctggcatctccttgtccatcaatccgtctgcacctacttattgggtgtgctgacagccgcgtgccgggtaccgcgatgaggcaggggtggggcagacaggggagtcaaagactggaggagataaggccaggcagctgtgttaggtaccagggaggggcagagctgtcagggctggggagtgggggattggtgaacctgggacctgtgggctgaaaatgggggcttgaagagagtcttggttggtcaggacccctctagggctgaccttcccacaaggtggctcagggtcaccagtccccttggtactctggctgctgggtggttggggcagtgagcagatgcatccagggctcaagtcccctccgatatccctgaatgtgcttttcacctaagaccattttccagtgtggcgtgtggtggaggctgggaaggccatcctggggcaagtctctggacaccatggaggaggggatttagctaaaaggtcttcgggggacagggactaagtaggcaaggcccaagcatagtctttcgtggaggggctcatgggggtgatgccagtcaggggattgggaaggttgtgggggccttgaatgctgagcttaggaatcgagacatgtcctttaggctctgtggagctagggcagctttctgatcagacaataaatgaggtgctttaggcctg

SEQ ID NO: 30411 - DNA, 860 bp, Artificial sequence
  DNA replication origin
gagcacttggtgatggattgattaggtaatggggtcaggggagtgggcggtgacagtggtgactggatttccagcttgcacgtgtgggtagatgaaagcatcatttcctggaagacaactggatttgggagggaatatcatggctttgatcttagacaccattaagtttgaagtgcttttgagcaatctgagatgtggggtgggcggttggatagacacgtcagaagctcaaagaagatgtggggactagagatatatatttgggagtcatttccccccgagaagacagatcattgaattgggggagattaccaagggagatagcgaagtaagaggagagaaggcccaagtgcagctggaagaacgccagctttaatgaggggggggagaagggcaagcatgaaagggaggcagccctggaggaggaaaaccaggcatatgtgctgccaggaaagtcaaaggaagagagggctgtggaagagatgcggtgaactccgtcaagcctgccgaggggcctagtgagagaggtggatccaacatgagttggattttgcaatatggcagacttaggtggccttagcgtgggcgtcctggtgggataacagggcaaagaagatgcagcagagtggacggaaaagtgagtgggaggcagcaccatggaagctggggagagacagtacctagggagatgtggggttggaggagggcttgcagagaggggagcagtctgagcatgttaactaggataggagttgggatgaaaggggacaagaggaagaggctgtgtgtgtgagagagaagggaaaggtgacggtttatgtttcctgaagaggcaagagggagtcggatccaaaacacag

SEQ ID NO: 30412 - DNA, 1724 bp, Artificial sequence
  DNA replication origin
tgaggcaggggatcggggcgtggatgggagcccccgcgtgtccacgtgagctggaggggtcagagtggcttcggcacacagatgcaactgatgaggccaacaccagcctctctccagcctccctgggccccacactgcactgaacgcccccgctcttactcttctcccgtttcctcgtgctatgcctagcttcttgcttagagaccttcctccctccaccgaggagccctgctttgcccagtgagcactggctactcaggctccctcctccaggaagccttcccacccttgccccctctaaagaatgggccacaccgtgtgtgtgcccacctcaggctgcaacccggccacaccccctccttctgtggcccttgtctgtatgtcggtctcccctcctagactgtaagctctctgagggtcaggactgagcctcacacagatctgcaagctcagcacccagggcaggatggggcccacagcaggtgctcaatgaacgagtgtggaggggaggctgggccaggacttctcgggatgtgcagtgctgtgatggtgtgtgtgtaatggtgtgtgcatgtgtgatgctgtgtgtagtggtatgcgtatagtggtggggtgtgtgtgtgatggggtgtgtgatggggtgtgcatgtgtgcgataatgcgtgtggtatgtgtgtaatagtgtgggatagtgtgtgaatgtgtgtgatatgtgtgtggtatgtgtgcctgtatgataaatgtgtgagtctgtgtgtgatagtgtatctgatgtgtgtggtgtgtgtgcgtgtgatacgtgtgtctgtataagtgtggtgtgtatatctgatgtgtgtggtatgtgatggtgtgtttgatgtgtgtgcgtgatagtctgtgtatctgatgtgtgatggtgtgtgtatgcatgcgtgtgtgatgtgtgtgtgtgatagtgtgtgtgcctgtgtgtgatggtgtatctgtgtttgatgtgtgtggtgtgtgtgatggtgtgtatgtgcatgtgtgtgtgctatgtgtgtgactgtgtgtgacagtctgtgtatctgatgtgtggtgtgatggtgtatgtatgtgtgcatgtggtgtgtgtgcctgtgtgatagtgtgtggtgtgtgatggtgtgtgtatgatgtgagtgtgactgatagtctgtgtatctgtgtttgatgtgtgtggtgtgtttgtgattgtgtatgtgtgtatgcgtgcatgtggtatatgtgcctgtgtgataaagtgtgtgtgtgtgatggtgtatgtgatgtgatggtgtgtgcatgcatgtggtatgtgtgcatgcgtgtgtggtatgtgtgcctgtgagtggtgtggacgtgagcacagcggttgtgtgagacgtgggaggcagcgcagacaggaggaggtgaggatggaacagtggagcttcttcccaggagcacggggacgggatgggaggaagaggttggaagggagacgggaagggaacaggaggaggcagaggggctccgccaaggaagcctcttggcttggtggggtgtgaggcggggcctcggggggcggggctgggatgctccagttccctggcggtggtttccggggctgtggtttcaggtgtgtgctgtgtgaccgcagggcaggtgcctccagcagggccttgctccgcctgtatctgagctgccccacaggatgccaactgtgtggtgagcacgcacacacacccacgctcactcgc

SEQ ID NO: 30413 - DNA, 863 bp, Artificial sequence
  DNA replication origin
gactgtgtgtgtgtgactgtgctctcttgggggtccgtggaagcagtgggcctggggacctgagcagaattctgatttgcatcaccataccgtctgcgtgccccggtacctccagaaccagtggaaaccaagtagagggcttgcccagccaacaactattccctcccgctgctgggacccggactgggcacatcacagccttgatgctcatccttatttaatctccacacacaccttgtgagggagggattttcattcctgtcaataggacgctgagactcaacaagataaaatactctgcgcgggattaggtactccacggctgagaccttgcttctctcccacacccgggaggccaggctttggcagcaggagtaggcgcggcagtcctttagaacactcaagaactgggaccccatcggggccactgactctggatgagccttggaggagagaccacagagacatcttcatgggcaaacaggcgggagcgggcaccgtggtgctggggatgtccgagatgatggagcagaggcactgggcatagtggcagggatgttggtggtagcgggtggtggtccagaggtggattggtgatgggcatggctgtgtgttcgaggaagcttccaggaagacccctgatggtgaggggggagacctagttggcaatggaggcaggcatagagaagaggcagtggtgggaatgaccgtagctcactatggagctgatgtgggtcagtgtgtggtgggcggtggtggatggatcccggtcctggctcagcccttgtccagtcgctcaggctgggaatcagatgagccggggaggggagggtctcaccactcccgcctcttgtctccagcta

SEQ ID NO: 30414 - DNA, 1461 bp, Artificial sequence
  DNA replication origin
acactacgggcttgagaattcacagttctcctcccgtccacgtctccgcgccatccacgccccgcgcctggggccccagttgtgcgattctgcgcccgcccccgggccccagggcaggctgcccccagcccctccacggcggccgcgcccaggcccagggaagcgcgtctctgctctggaaggagccccgtgaggtagctacgtctcgtcatttctccagggcccggccggcggcgcaccccgccccgcgtgcacgcggctcccgcccagagcgcgcagggtgggggtagggggaggggccgccgagggtcccgccccccgcgccgtgcggccccgccccctccctccccccacctgggaaagccctcgcgggccaagtccgcggcggccgggccaaggcgcccgctctcgctcggccccgccctggcgcccgcccgcccgcccgcccgctgcctcggcgctaggccttcttgcacttgcccttcttctcacgctgctggaacttgcgcagccgccgcgcccacgtgtcccgccactggatcaccaggctgcttttatcggccacgatgccgctctggtccggagagtcctccgcgttgcccagcagcaggtacttcttgaggggcttgattttgggacacttgcaggcgatgtcccgcgagcggatccacaggctctggtcaccgcggcggatgcggctcgtgccctgcttatacacggagatgatgttcaccgtgaacttccaccagtcccccgccttgtccgccttcaggatgtggatctggacggctgcaaggaagcacaggcagacgggtgggctcccagctgctgtggctaggtccgccctgcctgagcctggggagaagggaaaggagacccagccccaggaagtgactgcacagagtggcccatacaggagcgcgtgggtggtggcaagctgatcgtagacccccacctgctaacaacagggccaagaagccttgcctcccacgctgtgagggtgccacccagcactgccgtcgggacaagccatctcctggccttgtcaaggcccactttgtccaggaagcctacaggtgctgaccacgcccccagcactctgggcaagctgtctgcccagggcaggcgctcgggtgagagcagtgctggcggggagagggaggttcctcaggggtgcgcttctccaaaggcccaagtcactttacaccagccctcatgacactccacacacagcctggccctccaaccagcctcagaaaaccataatgggtcctcaatgctcagggacagaagatgagaacccaccctttggggtggccgtagtgccttttccagagccccgggaaccttggactgccgcttcccacgcctaagccatccctaccaggtggcctcccttcctccatgccgcccaaggtccccagaccattcctcttactccaaattctctgccagtatttt

SEQ ID NO: 30415 - DNA, 2051 bp, Artificial sequence
  DNA replication origin
tccggaccagagcggcatcgtggccgataaaagcagcctggtgatccagtggcgggacacgtgggcgcggcggctgcgcaagttccagcagcgtgagaagaagggcaagtgcaagaaggcctagcgccgaggcagcgggcgggcgggcgggcgggcgccagggcggggccgagcgagagcgggcgccttggcccggccgccgcggacttggcccgcgagggctttcccaggtggggggagggagggggcggggccgcacggcgcggggggcgggaccctcggcggcccctccccctacccccaccctgcgcgctctgggcgggagccgcgtgcacgcggggcggggtgcgccgccggccgggccctggagaaatgacgagacgtagctacctcacggggctccttccagagcagagacgcgcttccctgggcctgggcgcggccgccgtggaggggctgggggcagcctgccctggggcccgggggcgggcgcagaatcgcacaactggggccccaggcgcggggcgtggatggcgcggagacgtggacgggaggagaactgtgaattctcaagcccgtagtgtgggcggggcgcggagcacccaccaaaccaccacccgacacgcagccgacgggatccccccctttctccccggccccttctagcagttccccgcgggccacctggctgtcacagcctggactcctccatctgaaggggcctggcagcatttggggagtggacagctcctgtccagccagcatgccccaggcggcctctgtctccactgctacctgctgagtgggtcctactgggtgggggcttggggtcggtgagtggttcacctgtggagagaggagaggaagcccctgctgctgcctgtctctgcccctgcccctgcccctgcccagcgtggggctggcccatccggaaggcagtgggcccagggacacccctgagaagcccaagccgggtggtcaccgcctcatgctggagctgcctgttggaggaggcatcgcaaacgcaaaacctcccagagagtttccttttggaaacttggaaccagccctttttatgacgttttccagggggagggggaggggcactggctgggtttacggcagtgacactatttatgtaaatgacatcagctcccgcaaggcccctcagcaatgtcaacagctggaaagggcctgaacgggcttggagtctgcaggctgcgaaggcacttgggcctggcttggggccgggggcttgtttgagctgggatggggtttgctggctcagtgaagtaccagagtgcctgagccatgggtgggcaggggcacaggaatgaccaggttcctgggggccaaggaggccatgctggcttctccaagggaaggcacagaggctgccggcctgccccctacagctgtcttgggtctggcctgggccacaccttgaccgtgcctttccagacggtctttgtggagtctgcccgtgccctccactgtgccccagccctccttccaaaatctcctagagacacggtcctcaagcaggcagccccttttgttctgacctcctcacacagggtccattcctgtgccctggggcctcctggctccctgccttcctgggctctctgcactgcccgggcctctggcccacatcctcacacccggcgcactgaattaagaggcctggctcccctcacagtcaggaaattggtttcactttcccggccagagtttggctgctcaaaagggtcataccaagtatgaagctcggcccccggtggtctggcttccctccgccttccccacatttacccgcatcacggctgccatttattgagcacctgctgtgtgccaggcactttacccacatgctcccagtgtgtactcatgacaaccctgtgggacagggactcattatcaccagcaaggagactggagtacacgtgcccaaggtcatgctgcaaattggtggcaggactggggctcaaactccagagcccgactttctgaccaggggccacgctggccctcactgcactccagctctg

SEQ ID NO: 30416 - DNA, 872 bp, Artificial sequence
  DNA replication origin
caaaaaattacaaaaatcgggcagggcgcagtggctcacgcctgtaatcccagcactttgggagaccgaggcgggcggatcacgaggtcaggagatccagaccatcctggctaacacggtgaaaccccgtctctactaaacatacagaaaaattagccgggcgtggtagcgggcgcctgtagtcccagctactcgggaggctgaggcaggagaatggcgtgaacccgggaggcggagcttgcagtgagccgagatcgcgccaccgcactccagcctgggagacagaaaaagactccgtctcttaaaaaaaaaaaaaaaaaaattacaaaaattagctgggcatggtggcgcatgcttgtaatcacagctatgtaaatcaggtccaggtgcggtggctcacgcctcggcctccaaagtgctgggattacaggcgtgagccaccgcgcctggccctgacttacattttaaaacagacctctggcttctggcttctggcttctgtgtcgaaaacagactgcgggaaagtatactgggtgagaagagaagcaaggagacgtggtaggaaggtacgagggcaatctaggggagagatgctggtggctaggataagggggaagataatgaggggtgagggaccttggatgtactttgaaatgagcatcagcaggggatgtggatgtgggcataagagaaaaaggggaggcagtgaggactccaagatttctgtcctgagccgtgttcgctctagatgtaaggtaagcccagagctcctggcagccctatgtggagaagacatgcgcagggtggggtagggacgctaacaaggaggagaagacagggccaagaaaagaggagtgaggaccgggtgcagt

SEQ ID NO: 30417 - DNA, 1304 bp, Artificial sequence
  DNA replication origin
tggggctggggtccgggcgggcgttcctccccggggctcccgggggccgctggaactgggcccggggcgcaggcgaagcccccctcaccgtcgccatcacagtgtcccggctggggccggggcggtgagtccccggggcgtgagcggctgcccagcgccagcaggaagcggctgaacaggcggcgcagggagcggcggcggcggggccggggcgcgagcggtccccctcctgccgcgtccccggggcccaggtccatggctgccgccggcgcagctccaggcgcggagcccccgggcgcgaggcggacgagcggccagcaggccctacagcttctctaaggctcctggtgccggctacctgcgggccaggtgtgcggggacggggcggaggcggagccaagggcggggcagccccgccccgcgcgggaatccggcggcacgaccagccccctccagggcagcgccgggccacccctacccctgcctggtgccgcccccgctgcgctgactgggagtcttcgtggtcggattccccacccttccttacctcgtaaaccgacagacctgggtttcgccgctgctcctgttcctcgagcagccttcaagcagtggaaattacggagaaatgaacattctgaaagcgcctagtaaatggtaaaggcctggctactgcaggaagaaaagggcaaggcaggcatctccagagcacagcctcgggcgtggtgagaggcgcgcgctgggcgctgtgtgggggtggggagcgcttttgtgcaccgctggttcctccgcaggctcaggtgtgtgcggacaggtgtcgccacctccttccagaccgtctgccccttggggggaggcagagtctgtgcctgcacccgccaacccgggacctgaactgggagccacgtgttgccctgtgaaaaaagcccccgagtggttgtggtttgcttttttacaccacagattgggttagaatcattttccaaaaacttgcaagacttgatcacccttgctttaatcggcaaggaagggggctcagagaggttatcgcaacgtagggaggccgcccgatccgtaagcagggaaaccggaactcgacctggatctatggactgccaagttcaggccctttccagcctcagtatttgctaaccaggaagttttcaggctctcaggcgcgccccctacgcggtttctggttcactccttaacgcacgatccttgttgaatgattgcccaatcagaattagtttggccttgccccgcccttgattccctgggtaaccctgggcccctcccccacccct

SEQ ID NO: 30418 - DNA, 856 bp, Artificial sequence
  DNA replication origin
gccgagttcctggcgctggggcgctaccgggcggctccgggccgcgccgaggtcaccgagcagctggcggcgctggtgcgcgcgctctggactcgcgaatacacgccccaactttccgcggagttcaaggtaggcagcgctgcgccgccgaccgccctgtccccctggtttcgcctcttgaaaagtgtgtgcacgatcaggaaagggttttcttggggccttctttaaatgccgttgaccagttcagccccggattaccggctttgttttgagtcgatgtgttacgctgtcgcttgcttatgttttctttgtaaattaattctcctaggtattttgagagggagtggggtgagctggcagattgaagggtaatcagcgtttttggattcaacaagcatttgttgaagtattgaaggcttgtgggccagacagtgttctaatgccagctctagagcttccagtctggaatgatgtggggtagggaatgggatgttgaaggccaaggcctcagaggaaggaggtgatgcttgcgttgagatctgaatgatgagaaggatgcagtcagggcaagctgtaggactaatccaggcaggaggaacagcaagtacaattgccatagacccgaaggagctgagtgctggagacagggaaagaaaagcagtggcgttggagcttaggaggcagatgagtttcgccagatcacgtaagacctaggaggcaacggtaaagagtttggattttattctaagcccagtggaatctgacaacctacaggccaggtaccgtgctgagtgcccagcaaaggcagtgagcgtgctattttggagatagcatccttttgtttaaggcgcattca

SEQ ID NO: 30419 - DNA, 1098 bp, Artificial sequence
  DNA replication origin
tcctaagtgtcaccccgctgtaagctcctttgtggagtgctgggtaagcagtttccaataaacgcaagctgagctgggcacgtggctgctggtcatccttcaactggaaaaggaaatgatttctatcagtcacacctcaaagacaaggctgtgttgcgatggcagccctaggctgggctgctttggtgcggaatgagtctaatgcggtcctgctgtcatggagctcatggtccagaggggacaatgaacctggaaggagccatgaccagtggcccaggttaccatggaaacgtgcagagcaccaggggaggacacagtggaaggggctgacttgtcaggggggatcagggaccacatccctgacgaagggagatttaaattcagaaccactgcacacgaggcgggggacggggtcggggtggggaagtctcaaacagaaggcggccaacacagagccgctgaggcatgaatgaccatctcgagttccaggagaaggtcggggtggctggagggtagaaggaggagggagagcaaagtgtgagctgaatctaaaaggtaggcgggggctggaccacgcaaagccctccctgcagcctgtggtaagcacttgggggctcaccatggggacagcggtgccactgtggagttggaagtaggaggggtttatgtttgtaagagaagtccccagcaggctaaaataagtcagagaggagcaactgggggctccctggagtcagggagcccgatgaataagcttttgcagccactcagatggcctgggccaggggaaaggcaatgggatggagaggaccagatccagtgaggacacatttaggaggtagcatccacctggctggctgagggggcaggaggagagagggcaggaatggcagccaggcctgtagcttgggcagtgggtgaatagcaatgccatctatggagatgagaaatacagagagtctttggggtttcagggaacaatgatgaattcagcttcaatatagtatgaggtgaaggcagagccatagatggccctaaagccccttgttttagagacaaggaaaaggagtcccaatgacaggaagcagcttgcccaag

SEQ ID NO: 30420 - DNA, 1090 bp, Artificial sequence
  DNA replication origin
cttctttctacacagacacagcaacaatctgatttctctatcttttccccacatttcccccttttctattcgacaaaacccccatcgtcatcatggcccgttctcagtgagctgctgggtacaccttccagacggggcggtggccaggcagaggggctcctcacttcccagaaggggcggccaggcagaggcgccccccacctcccggacggggcggctggcggggcgggggctgctccccacctccctcccagacggggcggctggccgggcgggggctgccccccacctccctccctgacggggcggctgccgggtggagatgctcctcacttcccagatggggcggctgccgggcggaggggctcctcacttctcagatggggcggccgggtagagacgctcctcacctcccagacggggtcgcggcccggcagaggcgctccccacattccagacggggcggcagggcagaggcgctccccacatctcagacgatggggggccgggcagagaggctcctcacttcctagatgggatggcagctgggaagaggcgctcctcacttcccagactgggcagccgggcagaggggctcctcacatcccagatgatgggctgccaggcagagacgctcctcacttcctagacgggctggcggccaggcagaggctgcaatctgggcactttgggaggccaaggcaggcggctgggaggtggaggttgtagcaagccgagatcacgccactgcactccagcctgggcaacattgagcactgagtgaacgagactccgtctgcaatcacggcacctcgggaggccgaggctggcagatcactcgcggttaggagctggagaccagcctggccaacacagcgaaaccccgtctccaccaaaaaaaaaaatatgaaaaccagtcaggcgtggtggcgcgcgcctgcaatcccaggcacttggcaggctgaggcaggagaatcaggcagggaggttgcagtgagtcgagatggcggcagtacagtctagcttcggctcggcatcagagggagaccgtggaaagagagggagagggagaccgtggaaagagagggag

SEQ ID NO: 30421 - DNA, 781 bp, Artificial sequence
  DNA replication origin
cctcttcccagctgccatcccatctaggaagtgaggagcctctctgcccggccccccatcgtctgagatgtggggagcgcctctgccctgccgccccgtctggaatgtggggagcgcctctgccgggccgcgaccccgtctgggaggtgaggagcgtctctacccggccgccccatctgagaagtgaggagcccctccgcccggcagccgccccatctgggaagtgaggagcatctccacccggcagccgccccgtcagggagggaggtggggggcagcccccgcccggccagccgccccgtctgggagggaggtggggagcagcccccgccccgccagccgccccgtccgggaggtggggggcgcctctgcctggccgccccttctgggaagtgaggagcccctctgcctggccaccgccccgtctggaaggtgtacccagcagctcactgagaacgggccatgatgacgatgggggttttgtcgaatagaaaagggggaaatgtggggaaaagatagagaaatcagattgttgctgtgtctgtgtagaaagaagtagacataggagactccattttgttctgtactaagaaaaattcttctgccttgggatgctgttaatctatggccttacccccaaccccgtgctctctgaaacatgtgctgtgtccactcagggttaaatggattaagggcagtgcaagatgtgctttgttaaacagatgcttgaaggcagcatgcttgttaagagtcatcaccactccctaatctcaagtaccca

SEQ ID NO: 30422 - DNA, 1117 bp, Artificial sequence
  DNA replication origin
actttatagagtttacattttagttaggggtgacagatagcaaggaaaactaagcaaactgcatggtgatctagaaaatgtgtcattttaaatgggatgggcagagaaggtctcattaggagagggcatctgtgcaaagccctggaagatacgatggagtaagcacgtggattgctgagagaagagcattccagccagaaaacagaacagcatgtgcaaaggccctgaggccagagcattcctggagtggtcagggaacagcaaggaggtcagtgtggctggggcagagtgagtgtgtgtggtgtggggagtgttggagatggggacagagaggtgaccagactgaggggtgggtggggccaaagcacgagggcttttgagaccctcacaaggatctgacatttaccctgagtgtcaggggagccattgagcagaggagtgacttgagccagctggatgtttacaaggatcactctgctgctctcttgggaatgaatgatggggggatggaggggggagcagagggtagaaggagggagacaagtaaggtggttattgcagtaatataagcaagagctgatgctggctgtgacatggctgtcaccactggattttggatgtattttgagagcgagaccaatgggatttggtaatgggttgcacgtataaggtttgagagagaactcaaagcgagtttcaaggtttttggcataagcaaatgggaggaaggagctggtttgaaatgagaaggtgaggaacggaagcagcaggtttggggaggaaatcaagagttaagtttgagattcctatatatgttcaagtaatgatagtgagtaggcatttggaaagaggactcttaattcaaggtaggtataaatttgaagtcgttatggcgtagatagtcttcaagccgctgtactggatgagatcacctaaggagtggggtggatggagaagaggtctggggatggggcctggaggcaccccaaattaagaggactgggcagagcaagccaactgtaaaggagaaggagcaaccaaagagtgggcggaaaaccaggaaaccagacagttctccctgggttcagtgaaggcagccatggagtcatcgggacat

SEQ ID NO: 30423 - DNA, 1500 bp, Artificial sequence
  DNA replication origin
ccgcggagccgctgcccagcccgtggggctcggcgggaatgcaggctgcgctgtgaacccgggcgccaaggccatgtccggcgctcgctgccggaccctgtaccccttctccggggagcggcacggccaggggctgcgcttcgccgcgggcgagctgatcacgctgctgcaggtcccggacggcggctggtgggaaggcgagaaggaggacgggctccgtggctggttcccggcgagctacgtgcagttgctggaggtaaggggcgagggccggggctgtaggagccggggctgcggtcctcggtgcgctcgcgtacctgttgcccgttccggggatgccgcagcgtcccggtcggaggggcgccccggggggcagcccttgccggcgctacctgtagctccacgctcctggggggcagcgacggcagcgggcgcccctcggggcgtgggcaacgcggactcgcggggagcttccaccttgcgccgggcctccggagcacaccgtggctgctctgaggaagcgagaacttgttgcctgtgtgagttaaggagcaggcgggagcgttcccggcagtggcaggggccggtgaagggtctggcggtcttgggaagaggcacggaggatcaggggtgcgagaaagtggcaccgactcggtcccgcagccccgcgtctccaccccggagtctagagcctgatgacccgtggacggtcgtgctgccttgggtcaggctgcctggccgcctcgggaccacccacttgctggtcagccgagcctgctggccaccagcccgagccccctcagcaggcttgatcctggggtgccgtagcaccccccgccactgcctgctcccctggtccagctccccgaggctaaggctcagaacccgaaagtggcttgttcctggggttctggcctggccccagggctgcacaggacctgctgaggcaaggcggctggctgtttattgtctatgtgacaggctgtcctctaatcactgagctcgcagtcacagcctgagtgagacccgaagtttctaaagtcctttgtgtgtgggggggtgaccttccaggacatcccctttactagaagcccgcctgcccccaggattcttgtaaagactaaattaacagttaccttcaatggtgtcagtattcctaaacattctggtaaaacactgccggaagaaatcatggaggctgaatttatttattatttaactcttgacctacttcacagagaaagtagcaaattttgactgagaatgctcagtgcaattcatcgggggcggggggaagaaagaaagaagtgaaatggttacagggtgagtccgcctgaggatgtatcctgtggcaacattgtcagcaagagcctggccttataaaagtacattagattgctttcaggtccagagaacaacaaaatctctcctaaaggcatcagtagcatttgagcaaagtttaggggctgctggaatgagctttcatgggctgtcagcaga

SEQ ID NO: 30424 - DNA, 1031 bp, Artificial sequence
  DNA replication origin
tcaggcaggcgggggacgcgcgctccgcgccgggaagcagagactcgttggcttcgcagagcgagcggcgacgcccccgggccgggcagctcgcggatcctagctctgggctggggggcggggctcagggggaggagacccaggcgccgcgggctccggagacaacttcccgggaacgcggaacgcgggctgccgccgcgagggctggccggggccggggccgggaccggggccggggccgccctggcgcgcggaaatgcgcagctcccccgggaggtgggacccggagcatcccccgcggcaggactccgcggcgggcggccgtggagaggagctggcggccgggtggccgggcgggggttagctcactggcgagggggcgggccggggcggggccagggcggccacgcccgcggagggctgcgcgctccctcgcagaggggcctgtcactggggagaggggctcccactcgcgcccccaccgccggggaccgcgggaatggaaacgcccctctgttctgtgcctgctttgtaggcctggcggcccgtggcgtgcgggcggcttcttcgaggtgtctgcgagggatcgtttgtggttgtcattgtagtggttgaacctggggttgaacttgtctcaccggaaactgaacaatgggtgaaagacaggtttgaagcctggcgcctgagcccagcagcctggtggcagcgtggcacgctggagggacggaatggagagaagacggggtcggagttgatagaattggaaacagtcgatggggataaatggaggaaaggcgaacggtgagaggaacagcaccaatgcttttacttgcagagggaaggccggcccagggtaccagccctcccgaaatcgagatgggttggctaaagagtctacactcatgtagtcagtcaacaaacattaccaggaggctgccatgttccatgcgatgtgccaggtactacaaacatcatttgggccagtccctgctctccagggaccagtgaacctgagtgctgcagaatgttga

SEQ ID NO: 30425 - DNA, 990 bp, Artificial sequence
  DNA replication origin
aaactgggacaacagtcacctcatcagctcgtaggattacaggaatgaaatgaattaagtggagaaattaacagctattatcatttttggttgctgcaggaatgtttgaggtgggtcaggtagaactcaagtgtatggcatgctgtgtaggctgcgatttctcaagtccaaactggatcacagttcctcacgggcatgcagagaattagggttgcaggatggctggaaatcagttgtcctaccttgattcaggccacatcatcaggaatgaagcctcagaacagcctgctggaagtcacatattttcctgatacaaggaattgtatctcttttaaaacttcattgggccagctatttttaatgactgtttttgatatgaagttatgcagctccgctttaagggactcttagtggtgactgtggtcaagagtttgtttctttatatttccggccaagcgaatgttcaagactttgcaattgatggactattacaaataatctgcttgtgtcactttgcccatggccagagaacagatggaggctgctcaggtgagatggcttagctgcagactagggctcagtagtgactcttaaaacctgggcatgagtatttttaaaaagttgcataatgactgtaatgtgcagccaggattgagaaccattgaactaggtgaaaggctctgtgccagggtctgattcaaagcatagacaggtgcgcaagatcttcaggctcttggagcccggcctgactggttttgtaatggatatctaggcagtcatagtaagaggtgaagctagaggaggcgttgtggagggcctgaaatgtacaggcagagaagtttgtaccaaatttaaaaggcaatagggagccacagaaggtgactgggggaggggggaaggagtagacagaggtatacaggcgtattaaagggtccagctttttttttttttgagacggagtttcacccttgttacccaggctggaatgca

SEQ ID NO: 30426 - DNA, 1316 bp, Artificial sequence
  DNA replication origin
ttcagcctggaggactacccttcctttggatggaagagagtgggtgggcccacctgccccggtccttctaccacatcacattctaccagaccccttcagggtctgaaaggggtcggtagactttttctgaaaagagccagatagtgaatgtctcagactttgcagaccagatggcctctgtcgcaactactcagttccacccttgtagcaagaaagcagcagaaagaagatgacaatgaatgggtggggctgtgtgttccagtgagcccttatttataaaaacaggtggctggcctgatttggcttgaggacagtaatttagaacttggccttgccaagtccccacagagtccactccacccccaggacaaagagttctagagcagtggttctcaatgttggggtgattttgcccccataggagatatctggccaggtttggagacatttctggttgtggcatgtggaggagggttactactggcatctggtgggtagaggccagggatgctgcccaacatcctacagtgcacaggacagggcacacaacaaggaattatccagcccagcatgtccatagtgcctggattgaaacacccttctctaaagcagtggctctcagagtgggtcattatcatctgggaaattgttagaattgcaaatcatctactcctcccctgcactgaataggaaaccctgggggtggggcccagcaatgtgtgttttgacaggccttccaggtgactctgatgcttgctaaagcttgagaacactgctgaaagagaccaagggggccgaaggagagggagggaaggaaggcaggactggcaaactcagaactcccaccatatgccaggttctaagccacagaggggcctccagggcagtgagacattgactattaggagacacagagagaagactcaaggtggcagcaggtggggtggaggagcatggagggggccaaccccagacacagggcccaggcgaggctcccaggatgagaagggctcagctaagcctagaggacagcagtctgggtagggagaacaaggtgatatagaaaggcagggaaacccgagagagagacagagagagagagagagagagagaggaagggaaagagggggaagaaaggaaaaggaggggggagggggacagagaaagggagagagagagaaagaaaaagggtagagaggaagagagagaaagggagaaagagagggagaaaggggagagggagagagaggaggaggaagggtaagagagagggagggagaaaggaaaaaagagagggcgagaagaagagaaaggga

SEQ ID NO: 30427 - DNA, 2649 bp, Artificial sequence
  DNA replication origin
atttgggtctgatatgtcaaggggaggactggggaagagggacgttgggctggttctttcattcatttgacatttatggagcatctgctgaacccaaggcaccatgtaaaaggcacagtgaacaagatactgttcttgtcctcttggattttcagagtttggggaaaacaagcaaggaagggataattacccttggggaagcacaggggtgacacagaggaggctctaacccagtcctgctggtgtggtttgagggggctttgaagacaagacattcaatacctatttttgagtcacaagtctactctgttccccttcctttaatgggacagcttttaagccccccagattccttcctaagtgctccagctatgtatcagctcaagtctgtgccctgattgtcatacctccttgagctaagcctctgcccccatcaaggaggcctcagctggccccaccccgtttctcttgtccagagcacgaggaatgcatggcaggctgtttgcagcaactgagtagtctagcaagggtgcctcttctgggacattgctcatgcctgtcccctctgcctggttactgtcctcctcctatctcctggcccatctcaatccaaatcccaccttgactttttcacatccacacaaatgctccctcatctgtgaagggggatcatagattgcagttgactgtggatgacagttgtgcgtgtgcgtggtttcagaaccatggagtattcatctctgtactctttatagccaaatttagcaccacggtgcttccctggaagttcacagtaaggattttctgagtgagccaatgaataaacggcatcctaaggacttaagggagatggcaatgttgtctggttctaattctttacacctgtccagcaccaaatagttgcagggcacttcgaaacttgagctcgttaatcaccacccagaggcacaaggtcaacagagtgggcgttgcttaccaatcagggtttttcactagtccgggcaataagcaaatggctttttttgtttttgtttgttttgttttgtttttttggtggtaagaaaatggctttggctaaattaatcaaaaaggacaggtatgggaagggcacagagaagctcacagatttgtgaccctgaccaatgaaagaaatttattttacattgcaactgattttacagtacacttatttatataacagaagtaacatttagaagaatcagtactgacctgaggccaagtgtggtggcttatgcctgtaatctaagcactttgggaggctgaggcgggaggattgcttgagcccaggagttcaagaccagcctgggcaatatggtgaaaccccatctctacaaaaaatacaaaaattagctgggtgtgatggtgtgtacctgtaataccagctactggggaggctgaggtgggaggatcgcttgagcttgggaggtcgaggctacagtcagctgtgatggtgacattgcacagcctgggtaatggagtgagaccgtctcaaaacaaacaaataaacaaaaactgacctgagtttaagtttatatgctgtatcacttttaaaacctgatggccaaggacccagtacactgatttcatgttacccatagagggtcacaatctgtgtgtaaaatattggtttaaaggataaagccaaactcctttggaatggtatcaaaggttccttggtaacccagcccctacccgcctcccagcccctacccgcctcccagcccctacccgcctcccagcccctacccgcctcccagaccttacccgcctcccagcccctacccgcctcccagcccctacccgcctcccagaccctacccgcctcccagcccctacccgcctcccagaccctacccgcctcccagaccctacccgcctcccagcccctacccgcctcccagaccttacccgcctcccagcccctacccgcctcccagcccctacccgcctcccagcccctacccgcctcccagacgttacccgcctcccagaccctacccgcctcccagcccctacccgcctcccagaccttacccgcctcccagcccctacccgcctcccagcccctacccgcctcccagcccctacccgcctcccagaccttacccgcctcccagcccctacccgcctcccagcccctacccgcctcccagcccctacccgcctcccagaccttacccgcctcccagaccttacccgcctcccagaccttacccattcttgccgtttcagtttcttataagtttctgtttctttgaattcctttatgtaccctatgctgggtctcatgctggtgcctttgctcaccccattccatctgcccaaattgtcctcttctccttcaccaccaccccctgccccctactttcttcttcaagactcagcttatctccttggaataggttagagcctcctctgtactctcagaggaccctgagtcgggaaccacctgtctcagcgtcatttatattcccagaccctgccataggcctattgaggtggggtggtgaatctggacatctactgaactagcccaggtgatctcttttttttttttttttttgagacagagtcttgctctgtcacccaggctggagtgcaatggcacagtcttggctcactgcagcc

SEQ ID NO: 30428 - DNA, 1687 bp, Artificial sequence
  DNA replication origin
aggtgggagaatactctgagcccaggaagtcgaggctgcagtgagaggagatggcaccactgcaccccagcctgagtgacagagcaagaccttgtctaaaaaagagaaaatacaaaggacgattggcatagggtggtgatgggagagacttcctcaaaagggtaatggttagtctcagcactttgggaggtcgaggtgggtggatcaactgagatcaggagctcgagaccagcctagccaacatggtgaaatcccatctctacaaaaaaaaatccaaaaattagccgggtgcggtggcacacacctgtagtcccagctactcggcaagttgaggcaggagaatcacttgaacccaggaggcaaagagtgcagtgagcagagatcccaccactgcactccagcctgagcaatgagagtgaaaccgtgtctcaaaaaaaaaaaaaaaaaaaagaaagaaacccaacaaaataaaagaaacaaatgaaggttggtggttaggatgaggcttggaggacatataggagccaaagaaaagtgatggaggtgatagaggtggtggtgatggtggtagaagtagaggtgttgatggagatgaaggtggtggtggaaatggaggtgatggtggagatggtggtggtggtggaagtggaggtgatggtggtggtggaaatgaaggtgatggtggagatggaggtggtggtggtggaaatagaggtaatggtggagatgaaggtggtggtggaaatgaaggtgatggtggagatggtgatggtggtggtggaagtggaggtgatggtggagatggtgatggtggtggtggaagcggaggtgatggtggagatggaggcggtggtggtggtggaagtggaggtgatggtggtggtggaaatgaaggtgatggtggagatggtgatggtggtggtggaagtggaggtgatggtggagatggaggcggtggtggtggaagtggaggtgatggtggagatggaggcggtggtggtggtggaagtggaggtgatggtggtggtggaaatgaaggtgatggtggagatggtgatggtggtggtggaagtggaggtgatggtggagatggaggcggtggtggtggtggaaatagaggcgatggtggagatagtggtggaggtcttggaggcagtaaagttaaaggctggaggccatgcaggctgtggttgtgaaggtagagctgacagaggtagaagtggttgcagtggtgatgaaggtggtgatgatgaggagagtcgcgattgtggtggtggttatagtgttggtgagtgtgatgatgatagcactgttgttgttggatgtgttagctttggttttggtgatggtgatgaatgtggatggtattggcagaggtgggtgtggtggtggtggtgatggtggtcatggtgtagtggtagtggtagtgagggagctgcagatggagatagaggtggaagtctgatcttcaagtcatccatagctgctgctaccacacaggtcactgctaagcctccacttgttcccatctttatggcctttccagggttggagactctcatctctacttctacccattcttggtcctcagaaatccttctactgcttccatactgcctcagggcacaaagaattgctgagcagccatcggaggtgatacgtctctagagatataaacagctccctc

SEQ ID NO: 30429 - DNA, 1604 bp, Artificial sequence
  DNA replication origin
gcgcagctcggccgcccgggtcccccagccgcccggccccgcagcgcgctcccgccgcaggctggctccctgggacggagccggttgaggctggggtccggcggcgagccgggagagcgcgcggcggctggacctcactcactcaccatgcccggctgcgactgcagaggcggcggcggcggcggcggcggcggcggcggggcgaggcgggaacgcagctgccggagcgagcgagcggagagccgccggctcgccgcctgcactagtgccggaacgtgtgcgagagtgagcgagggagacacacgcactcacacacccgcacacacgggagcgccgcgaggggaggggggacaggggaggggagggcagccgctctccgccacccacgtttgcacgcccgggcgctcagggtgcggggcgggggggactccttttcgcttcttccggatcgcagcagttgaagctccgcgtcacgaaagctccggacagcagttattcgacacggcgaacccggcgggcgaagagggggccgggagcagggcggaacgtccgctctgcagccggcccgcggcagggactgacctcccctgccattgccttctctagccttcgcgaccagtccccaccctaccggagcccggggcagcgcgctgcctgagcgggagttggggtttctgcaagcctttgcctctccctagtggtgatactcgcagccaggagaagaggtcaaacccattgctacaggttcccaaactgagtccaggggtcaagtggcttgtctgaggctgttgggcgacccgtgagctgagcctacactctcttccccttggtcactctttccccaaccccgtacccactacgcataaaggcgctagacagccccaggactggatggcaactctttgctatacttttttttttccccgcggagcctcgaggccattagaaagctatctgaacctctgagactcagctttgtaacccctgtgttgaaatctctgtgctgcagctcctatgggaggtgaggaggatgggggtgcagggcgggggtgctttccggggtagttgcgtgtctgggtctgtggaaaggaggcctgagtctaactttcacagctacgaggccatcccaaaagagaatcatagtaccatccttggcgtgtgtccttggaggaggtagggggaactgagaacaaaaagcgatggccaaggccaagattctgcctgcgtgaccagcgtgctttggttgaaggcagggaactgaaggcagggaacaggctgtcagagcgagggcggtagagaattttccctgagactttctgttcagtcccactcatgtgtgacctaaacaagggatccctatccaggaacagaagagttcctcttttgggaaccgtggaatggatatattagagctcgaactcagactccaagacacaagagggagatcctgatattgactagggggtggggtggggggcggtgcacagactatccccgcagctccccacttgctactgtctccattccctccctcttcctctgcacttcctcccgttcccttaacttctcagttgccaccttcttcttaaagattctgtccaaca

SEQ ID NO: 30430 - DNA, 1620 bp, Artificial sequence
  DNA replication origin
gcccgcgccgggccggtccgtgcgcaccgcgcgccgccgccgccactgccgcccgcgcctcgatggcgccatcgccccggagccgctgaccgctcagcgcctccagcccggcccgcgcggcgggtcctccgagcccggcccgccgggggagcggcctgccgcggaagcctccccgcgccctcccgcccggccccgccatggcgctgcggcgcctcctgctgctgctgctgctctcgctggagtccctggacctgctgcccagcgtccacggagcccgcggccgcgccgccaaccggaccctgagtgcaggcggcgctgccgtcgggggccggagggccgggggcgccctggcacggggcggccgcgagctgaacggcaccgcccgggcgcccggaatcccggaggcgggaagccggcgggggcagcccgcggcggctgtggcggcggcggccagcgcggccgtcacctacgagacgtgctggggctactacgacgtgagcggccagtacgacaaggagttcgagtgtaacaacagcgagagcggctacctgtactgctgcggtacctgctactaccgcttctgctgcaagaagcgccacgagaagctggaccagcgccagtgcaccaactaccagagcccggtgtgggtacagacgcccagcaccaaggtggtgtcgccggggcccgagaacaagtacgacccggagaaggacaagaccaacttcaccgtctacatcacctgcggggtgatcgccttcgtcatcgtggccggcgtcttcgccaaggtctcctacgacaaggcccaccgccctccacgggagatgaacatccacaggtgagagcgccgcgtgccgcgcgccccggtctccccgcggcctcaccctctcagcttgcttcccctgtcctcttcactctcggcatcatcacacctccccaggccctctagtcatttccaccatcgctccttttgcatgcaataaatcagggtcttcttgtgccccctcctccatttcttcagaaccgggaatgcatgctttggtggtagggggatttacaaggcagagtaagaattggttgagtgcatgaagttccaagtgtaagaatgttacaaattctgtaatcgtggatgaggatccagggttctgctttcctggcatgagggcactttggtgtaggttcttaatggcatttagttttttgagtcaaatcagagtgtcatcttcaatataggaaactgaccaatgttggaaccttactgaaagcggtaccaagtggcttagggtcaactgagatgttctcgtacattaggaattggggttttatagaaaggatgcctcctgccggaagtagggataaagatttctccattccatgttgaccaagcacagatggtgtctcctcattgcatcctgcggagtgggatgtttatctttcctgctgagactagaggactcgttctttgaaaccctgtaggcagaactctgagttaacagtactcgcctgtgttaaacctggtggggcatctttcactgcttacgttcgaaagacagtgggagctgcctcctaccaaaacttacgccaagagctcaaactatggcagtccctggttgcacgctgaat

SEQ ID NO: 30431 - DNA, 1331 bp, Artificial sequence
  DNA replication origin
ataaaagctcgttgtaaggatgactcctcagaggagtgtgctgagttgggggtaaatgtggggatggggacatgccatccctgcttctgtgtttcctccagttgtgtttctagggtgggcctgaggtgggtacagcagtggaagggcaggtgcccgagaagaggccatgtttccagcgtgccaaaagctgcagggcctgaccggctccatatccaggagcagatgtgaggatccccaggcctcactgtttctgcacagacgaatggagcagaaggccatatcaggaaggccttctaggatagaagccctttcctgggaagctttgggtagtttgcacctttcctggtgagcgatagggtccccagtgggtaacgagggcctgactggccaagaggcccctttgctctaggggagctgccctgctccagtgagaggggccctggaggggtcagtgcctggagttggacgaaggcactggggaggtggccgggtggcagtgtgaagtggtgcgaacaggaagatgtgagcttcacgagcagagggaggatgatcacacagcatctcacgtcctaggctcaagatctaccttttcctcctacagctttgatctcaacacctgcagtcaaaagatgacggcccctgcttgagccttgctctgtgaggtggggaggaatgatgcctgggatgcctggtactgggatgcaatggggagaagccagcagagagaagcaaagggcgggtgggtgctgggaggtaggagaaagggtattttgccagcagcattttgagctgattggagaggaagtgaggagtgggcacaggttggggaggcatcagaagacgagatgagtggggaccacagcaccctttagggctatgcttcagtgatgatgccaaggaaggagtgccagtgaggtgtggaggagaagagagaagatcccaaaataactctgggaactttccagggacacttcaagccggagtgtagggaaactcagccctgagacttgccagaactgttcccggtaggagctggggatgagggctcggtgccaggcaggtctcactgcgcttggccacttgtaagagacctcttcctgctgggcttctgggtggctggttggtcaaagaggaccaaagagaagcagaagcagtgctgtgatagttcctcagaccgcatgtttcgatgcacagctttgttgttccgatttttatgtggttcaaagagtccttccacagttacaagactagatgtcacattgacctgtggtgttggggcttttgaggcacttcttcatgcgtcacatctcatccctggtgaagcatagcac

SEQ ID NO: 30432 - DNA, 2002 bp, Artificial sequence
  DNA replication origin
tgcagctggaggccgcgcgcgatgcggctcgcggaggagcgggccgcgctcgcggcggagaacgcggatggggaacccggcgccgaccgacgactgcgactcctggggacctacgtggccatgagcctgcggccggctgcgggcgcctgggagcgttgcgcggggagtgctgaggcggagcagctgctccaggccttcctgggccgcgatgctgccgaggggccgcggccgctgctggtggtgcggcccgggcccaggggcctggcaatacgccccgggctggaggtgggacctgagtcgggcctggctggcgctaaggcgctttttttccttcgcaccgggcccgagcctccagggcccgacagcttccgcggcgcagtggtctgcggggacctgcccgcggcacctctggagcacctagccgcgctgttctcggaggtgagggtgggttagtgtccccgcgcggctaaagctgggtgggggaggggaggaggagccttaagggacggaggcggggccagagggggcggggcgaagctgcaggggaggtccaagaggcggagtgataggcagaggggcgaggctgtggagggagcacaaccaggagggaagttcctgaagtcaggaagaaaatgggatggggttaggggcggagtcgggtgggtccggagggagggatctgggtggaggccaggccagaatgagaatgggaaggagctgaggcttgggtcagtccgggtctgggttccagccaaagtcaggggaagaccataatctgaagagtgcctaggttctgactactttcaaaatcagcctctcgtaatccctcctgtaaattggaaagatctgaagaagatgggaagtggacaagacggcatttctgatggatcagtggggtggaaggaggtggatggctataaacagtgcctacttctggagagcagttaaatgggagggggaggtgggtagtgatttgcttttgattttcatctcattcattcattaccaaccatttagcaaaggtcagccctgtgccagcataagaagttgggctcccatttggaaatgcccagcaggcctttggaggagtctgcctgaagctcagggaggaaggtggagatgtgggtcatgagtgctttagtggcaccacagcagaagcttcgagaatgcaggagatttcagggaagtgctccagagagattcctgggccccttagacctttctggaatgggagtaaactgccctgcaagtcaggctgtgtgcttatggaggcttgatgccctggaccctgcaggttgtgaaataaggatgggcagaatactggctgtatgatggttcaggtgataggtgctatagggaataccaaagaactattcccacccatgaaatgcttactccaaggagctgaaacgtatgtaataattcatatattcaaaatgtttcaaacttttaagactggggtgagggtaaagcttacctaaaagttggccccactgctggatgcaagtcctggagtctccctgctatgtcaagtgtaagccctttagatggtgtatcaggaggctgtggggaggtgaaaattccagggaaagggttggatagatagaggaggacacagagggcccaggaagctagatctcttagatatggaggtatttcaatattttaacaaacagaatggtcttgcaactgtgcattgtctgaaagccatcccgctgaagcctgaacttagatcagcttctctaatgaatgttgacgatagaaagtacttttggcttcagaggagaaagacaggcctgtgatctgagaagcatgcttaacataagtgttgaattgtctcctgaacaattagaagaatttgtataagtagagagcaaggtaactttcaagatactgagagcagactgatcaaaggttcagagacaggatttaacctagtgtatgtgggagacagaaggcccatctcagagttgtgtcatggccaagcaaagtagtccagcaa

SEQ ID NO: 30433 - DNA, 762 bp, Artificial sequence
  DNA replication origin
ttggggttgggactgaggggacaggcgggagatttgggacgagttgcattgggcacagagactaggaatggactgatgtgtaaaagaatgcctggacgtcaggcatctcagaccatttgcccattttacgacaagaattagttagatcttgtaggatggaaaaattgaaagtgccgttttccggctatttggaactactgtggagtttgtattggggtcaagcggcattgcagaagaaaataagacgcctagattttaggtcaggtgagagttgaagaggttttaagttcttaagaatacaggctaagggagaagaaggaggaatggaaggtggaagcttgcccatagtgaaggaggcaagcccatagtgaaggaggcaagcccagagaaaagagagcgtagagacacggagggaaggggttcgggggttcttaccttccagaaaagcgggaggggggggtcggggcgcggaaataaggcattggggcgcagagataagggattggggcgcagagataagaggttggggcgtggaaataagggattgggacgcagagataagaggttggggcgtggaaataagggactggggcgcagagataagaggttggggtgtggaaataagggattggggcgcagagataagggattggggcgcagagacaagaggttggggcgtggaaataagggactggggcgcagagataagaggttggggtgtggaaataagggattggggggttcttgccccctaggaaagcg

SEQ ID NO: 30434 - DNA, 929 bp, Artificial sequence
  DNA replication origin
tcaggtacatgaagatgtaatcccatccccgcatcaagctttatttctccagaggaggatctttaattcttgtaaacatgggacaggtacaggacatgttatgataatgacaggtacaggacatgttatgataatgacaggtacaggacatgttatgataatgacaggtacaggacatgttatgataatgacaggtacaggacatgttatgataatgacaggtacaggacatgttatgataatgacagctcttctttaaatttttattttttatttattttatttccataggttattggggaacatggcagctttttttgaataccctcctctttgccagttgcccaaggtggaacacccaaactttgacatgatacttccattaatgcaacttagtatcacaagttgatgtcgtggcccagcacaggatggcctggaaaccggcaacactggacgctggggaaagggtaagaaggtcttgaccattacaaatggtgtggaactgagccgagggagggatagtgagaagggagagagggtgaggtgtctgagagacaatgaggtcaaatcagaggattcagccattgttggcgtgtgggaaagggaaggagaagggaagagtcagggatgacatttgttgagagagagagagagaagagagagagacgcaggtggaaagaggatggcaccacattggactagccccaacggaatggggagaagtgggagaggacccaggggatgcagagctgatgagagtgggagaaccaagacagaggaagaaggttggggcaaatcaagtgtctcagggaggcccagtgaggcaagaacggaaaggagaaaggcggcggttaagaatcagggataatggcagagcgttgcagctctgcgggtgggactgggcggaagggtttgggagagacaaagaa

SEQ ID NO: 30435 - DNA, 1178 bp, Artificial sequence
  DNA replication origin
ccgggagcggggcgggaagccggggagggagagagggagaagccggcggctgccgtggcttcctcagccgggtccgggggcgtccgctggggcaggccgcgacgacgcgggttgccgcgctagggggctgggatctcggcgcggccgcgttccttaccctgcatgctgctgacggccgggtggcctggcgccggggaccctacggggccgggggtgccgctgccgctgccgcccccggagccgccgccgccgctcgggctcggagccgccattgttgggagtgaagagccgagcggcgccgcggcggctgcaatgcagcaagctcggcctctcgcacggccgaggggcgaggcttacccccgccttggccccgcctccgacacgccccggacacgcctcctgacacgcccccgccagagcccgacgcgcagcccgggccagatgctgagctgcagaaccgcccggctctgggtgcgcgacctgtgaagcagacagctgtcttggaccagggctgcgggcccgcggggcctaaagtggtttgcagaattaaaggtgggcctgcatttgtgcggaaagaaggtacgcagctttcatcattcccatggaggtctgtgactcccaaaagtccactttgttggaatctcagaaccccaaatcagaatagtaaagctgaaaaggatcccagggatccctttctcctccagtcgctaacacatcacttccagaagggagttacctagagctatggttacagtctggaactcctcttaagcccaataccccaaccctctacacttctctgaggggaaaggggagtcccaaggggaactaaccaaagtgctgtccatggacccatcccaaaactactgaattagaggttacattttaataataccaccaggtaatttgtatgcccattaaatttgagaagcatatatttaagcactcgacacttcccagcctcctgaaatatgctatctacatcaccatcttcccctaaatgcacactggattccctctcccaaatcctttacatcttgtataagacgagccgtagtcattattgtaagttacataaaatgacaaccccaaaaaacaatatgaggtttcttccattgctttgcacagagacttttattttaggaagacagtagctaaaagaagaaaaagttctctat

SEQ ID NO: 30436 - DNA, 1410 bp, Artificial sequence
  DNA replication origin
ccacggcagccgccggcttctccctctctccctccccggcttcccgccccgctcccggccgcctccggcccggcttggatccgggctccggcccgcataggccccggccgcggcctctgcctgcgcttggcccctgggccctaccgggctctcagcaggcccgcagggcccacctggtccgggaccgcccccgcggccgtccccatcgcccccgccgcttacctggcgcccgcccggcccccgtttccgggaacgcgccggctcggggctgcggcggagcgggaggggcgtcgggcctgccccctggtccctgacgccgctcaggtaggcggcgaagacagcggccccggccggcgcccctcggccccgccgccgcagtgggccccgctcagggccatcttggctgtcgccgggcacagctggagccggaccaccgagctgacctcgggctacgggggcctcttggaacctgcgttttcaaacttttgcagggtttctgtgcgctggaagggatgggggtggggggcgggttgcccaggcctgtgccacctgtaaggtaggtaggctgcattggcctgggagaggcattttgttccaggccagggatttctgtgttagcattgcgtgcaggaagaaaaaaaaaaaaaaaaaaaaagaagacttaatttggtttaaatggagagatacaggaaatagacaggggtcaaagtgatactgtagtgtctggacatttgaggcagctctgctaattaatgactttccccactgggaatgcttattagctgtgtatggcttttgacagggggtgttgtgaaaataccaggccaggcccgagcctgttagggaccatttccttaaatttactggggaattttgagtagtaatgctatttttaaaacagggaatctcagaactctcttgacaactttagcaaactgcttgtgttgaattattaacagaataagggttggggtacccttggtagtcagtgtgaccatggttactttttgattccattcctcttaaagggcttctagcatttagttaggttcaacagacatttattgaatagttcatgtttatagagcatgccataattcagaaagaagagacaggattttatttatctttacatccctgtcaccctccccatgaaataattttaatatacataaaaaccagtgatagatatatagacaggatgatgtcagagcttagaggacactttctgtgcaggccctcagataattcattcaaattgaattagttattggatgcccactgtgttgcacagcacattatactgatgaagtataagattgacttcctgactgtacagctttacaatttaggtggtggtggttggggcgaaatgaaatggcaaaatgacaatttaggattgtatttctt

SEQ ID NO: 30437 - DNA, 974 bp, Artificial sequence
  DNA replication origin
gtgtccacagaaacagagcctggagtgatgtgattggcagaaggggcattagctaaggaattcaccagtctgctagaatccagaaaaggcaacaaaacaaattatccctcagagcccctgcaggcagcatggccccactgacaccttgattttggcccagtgaacccatttcaggcctctgatttccagcactgtaagataataaatgtttgttgttttaggcattatgattgtggtcatttgttacagcagataggaaattcatacaaaaagagaaggcaaaatgaattgatgcaggaaaaaacagttaagaaaaggagcaggagagtcaagatgaacaggaaacagaaggagcagaagagtcaagatgaacaggaaacaggagacgcaaaactgggctccggaggggccaggggtgctgctgccaggggctgtggacctgggctgctgatctcctggaagcaggtggaatgtgtggggccagaggggctaagagaggaagaaggtgatgggctgtgagggtagtcagaacaacgttccctgcctagttgtcccagtgatacggcttcaatggctggaggaacaccatggttcttagtctcgcaccgattttgataaaacgacacggacacacgtggagtggttctaaggagcgaaaagtttattaggcaagaaagaaggaaggaaggaagaagaaaacagctcccctgtacagagacagaaggagggggggattcgaacaaagagaaaaccctgtgtgcggtggaaaagtggctgcttatattcctatgctggtggaggtgatgtctgatttgcatagggcccaggggattggtttgaccagatgtgtcatttacgtaacccgtgaaaaacctggccctccaacctaagccctttaaatacgtaaatgtgggttgccatgatgttctgaacacacggtgttatctggaggtggccatgacacttggtacacc

SEQ ID NO: 30438 - DNA, 1100 bp, Artificial sequence
  DNA replication origin
ccgcgggtgacctacctgcccaccgtctggttggccagctggcgcatgcgattgaactgcttcttcatcgtggccccgctgccgcgctagcccgggagctggggaaggacggagcagcccggagcccgccgcagggttacatggctcccgcgcggagcctcccgggcgacggcggcggcactgcggagcctccgggcgccgtctggcccgcgcgcagctccctcccgagggcgccgccgcctactcctcccgccgcgccgcctcctgccgcatccccctcacgcgcgccgcgcaatgcccggggcagagcaatgcctggggccgtcctcggcaccggcccgctccgcccgggctgcctgctcccagtcccagtccggcgcggggacccgggagtctccgcaggctggctggccggctggcccggcggtccccgtgcgcctgtgcggagaacgccgtgcatgccgggacttgtagtttcgcgccccgtgcccacctttcctctgtccaaagtttgcaaggacagtggagtgcggaggtgggagaaggcagcgtcaccagcagctttgcactttagcgttcgagtaagggaaacgttttcctgttttaaaaatggcaaagtgggaccaagaatacaacagcaaataaagaaagtgagcatctgtctctcattgtatttttagtgaatgtgaggtatcagtgttctgaattcacagaagggagatttatgctagcagatacgtggctgataaaacggtctaaggtcacctgattaatgatgaggttcaaggttaagcttgaaacacaggggctgacagcagattttgaacaggcatagcttgcatcccagaagtctgattcttaatttttaccaaaccaaacccattaggtaaccagaagccaatatagataagtgacgttgtgcttactggcccaacctgtctgagacagcttttttgtatggcttagatgccaatctcgtatctagtcccatttcccttccaccaccaggagaccaaggggcatcagctgcagcaccccccaagtgtcctgcaccacagcatcccattggcgtcagttgactccttggaaggggttgtggc

SEQ ID NO: 30439 - DNA, 1332 bp, Artificial sequence
  DNA replication origin
gggccagccggccagccagcctgcggagactcccgggtccccgcgccggactgggactgggagcaggcagcccgggcggagcgggccggtgccgaggacggccccaggcattgctctgccccgggcattgcgcggcgcgcgtgagggggatgcggcaggaggcggcgcggcgggaggagtaggcggcggcgccctcgggagggagctgcgcgcgggccagacggcgcccggaggctccgcagtgccgccgccgtcgcccgggaggctccgcgcgggagccatgtaaccctgcggcgggctccgggctgctccgtccttccccagctcccgggctagcgcggcagcggggccacgatgaagaagcagttcaatcgcatgcgccagctggccaaccagacggtgggcaggtaggtcacccgcgggcaccgctgtcggtgcgcgcccgcgaggctgcatccgcaggggcgcgcaggtgatggagcccgcccagcctccagtcctccttgcctcagtcctttcccctgcaccagctccctccaggcgccgctcgcaggcgcgacccctcctccctaacttcccagaccccggagctcttctcactcgccgccttctgctccgggctccggttgccaagcgcaaagtgtgacgcatcctttacctgcgtccccggctgccccttcgcttcgtcctccctgcctttccccgggactcccttctccctctggccgcctgtcttcctggaaacaggtgtttgctctgattgtgctggaggcagccgaaccgcagtcggtctccggagatctcttccctcccctcccctgcgccgagttcagggctgctcccgggtccagggaaagtgctgggcctggtcggcctgcccctcccgccgtgtttgttttcagggactatgactgtacgagattctggatcactttcctggccgggtttcttaaggcgtttggtggggggaaagggtgaggggtgggagaggaaggaaggtgctggtggaatggcgttgctgcctgcttgatgttaggactgatttcagtggagggagggaggctgcaaaaaggaggcccaagtcctcgggaagatgagataagcagagaatcgcagccaggtaggggagggggacagaggccccacagtcagaagagtcaggccccgggaagctgcaagaccccgcctgctgccatcacggtgaaaatgggctacatctggactccaggagcggctctgcagggtgccaacatctattaaggttacataaaaatcctggtgggtcgctcccaagactagacattctttgaacacaggagcgttaggtagaag

SEQ ID NO: 30440 - DNA, 1238 bp, Artificial sequence
  DNA replication origin
cctggccgagcgctgccagaccctgtccggccccgtcgtggggctgtccggcggcggcgaggaggcgggggcccctggtggcggcgtcctggccggaggcccgagggagctggcggtgtggccggcggcggcacagagaaagcgcctcctgcaactgccgcagtggcggaggcgccggccgcccgcgccccgcgacgacggcgaggaggcggcctgggaagaagagtcccctggcctgtcagggggtccgggcggctccggggccggaagcaccgtggccgaggccccgccggggaccctggcgctgctcctggacgaaggcagcaagcagctgccgcaggccatcatcatcggagtgaagaagggcggcacgcgggcgctgctggagttcctgcgcgtgcaccccgacgtgcgcgccgtgggcgccgagccccacttcttcgaccgcagctacgacaagggcctcgcctggtaccggtgagcggggcgggcccgggctggggctgaaggatccgggggtcctgggctgggaaagacgtggaggagccctcggtgacccccagttcgccctcctccccacttcatgcagaaggcgaagggtcgtcaagggtctttcttccctctccgccttctccttcctgggaagtggatgttgaaggagagagtgggagggaaattctggccttcataattttcatccttgggaatcccttgccagcaaatagccagtctggtctctttctcctgctctgcgaaagtattcatgtatttaactaaaggaaaaaaaaaaagtctcttctaaattagaaacctgttcaacaattaatagattgccttctccttcccaaggaagcccgttttcattctttatcttttggaaagttctttgtggttaacacagtctttaccatcaggtatttatttaccttgaccttttgccagatagttgtcctaggtgggaagtaatatagagacttagtaaaagtgtcaagaaccagagaatctgggtagtttggaaaatatatgtctgtctgagcaagggaaagcaaccaggcactgtattttaaaggacgcttggcaataacttttgtttgagggcaaggaatgagttttgtaaagtgcttttgatatttgcagggaaaagtaacttttgtcttttgactgacagaaacttttctaaagatcttcaatcctctttacaaataaggtagccaattaaaagaagaagacaacagaga

SEQ ID NO: 30441 - DNA, 984 bp, Artificial sequence
  DNA replication origin
gcggctgccgggcctctgcgctccgtgcgctccagacagtggcgagcgacagtgacttccagccccggctttctctggtccccttgcccgcctgggcgcgttctctccgcccgagttcaggttctctcagccaaggagcgaggtccccccgagtccctctgcccgagcgggagacaggaggcccgtgcagagccgtccacccctctccgtagcgccgggttgctccaaactgctcttggaccccacctgtgagccgcgtggctgggctgggctgggctgcgcgggacctgtcagcggcccccgccactctgctcgcaggcgctcaccggctgcctcctgggccgccgctggccgccgccacacgtgggacgccgagggcagcaaacttgctggtgacgtcaaaggcccgggccggaccagcccccggacgagcgcagcggggcgcggaccagcggccaggcggggccagacgggcggggtgggatggagaaaaggtggcgcgggctccgcagcagccgcccaatggcactggagagggcgggggcggcaggggcgacgccccttccccagtgtcccccattcctccccgcggcttcgcccccttccagtggatccggtgtctgcggcggctccggggttgcctgagtgacagctaaggccggccggatctctgggggcctgacttccacccaagacgccactagcttggtgaggggccccagagctctccaccgcagctcagccctccgcagccctgaccctccctctccaggttccccgcgctctgctcccctcttggcactgttgccctatccttccccatcccactgctttccatcgcctggaacctactcctcgtccccttggaagttttgtttgcagcagttcccagtactgcgctgcacgccacgcccccgtttgtctggagcaaaccgaattcctctgcagcagcttggacttctacctactcaactgtctgctgcg

SEQ ID NO: 30442 - DNA, 1302 bp, Artificial sequence
  DNA replication origin
gaagcagcatacgtacccttcagcctagatgctttccgcaatcgtggagaggcggactgcaggaggctgtgctgacagcacgccagcagctggggcagcaagtccttcactgatgcagtgctggtggcccatcagtgtctgccacagggagatggctcagggatgaggagatggcaaaggctgagaagcgaaacactactggggttcactgtgctggaactagcctgcagcttcctccactataacaagggtggagtgccaactggtgtggaggtttggtggtggaagggatagatcatcccctgtcagcatctacatgctcaaagaaactttgagaaatgttatctcttgcaggagagaaggctaagaaatgtttgtctcagagactgggaaagcgggtcttctggggacacttaggagagttgcagggcacgtttatatgcttatagaagtgggaaaattaaaggaggacgagtcatctctatcacattttcctccatcaactcagtggctcaggctaggaaacttgaaggcagaattgtcctggaggatttccaatgctagaagcatcatgaaggaagagaggggctggaggtatttgtaggagaagaggacaaatggaggaccacagatggctggtggtactgaggctcagaaatgttgtacagcttgagcagattcggaaaagcaatgcagctctggtgtatcatatgccagggtcctggcatgacaccctccactaggtaaatagaggagcatgggacttacaaaggagctggaggagaagaggacacccaggaacggcgtagtgccttggctctggtaagtgggagctgtccttgccatcctaggcctgaagcgggaggagagcaatcataagagaaccaagggactgtcaggctgtgcggagaggacttccgaacaggggcctggacttccaggtgggggaagcagccagcccttcaggagccagccaggagacagcgtgcggaataggggcctctccctcagactccccatccttcgattccctgtccctttctctaggagacaagggaggctccggagcaggatgccgcgtggaagaatttggaatcagcgcacacccctactcctcatgacacaagtcatcaaaccaaccagggcgtcaaaatcttatttataagctaagagcatccatccttctgtagtttgcagagggctcctcatacatggcagcgcttcctgtgacaatcccagagggtccaactggaactggaaagtgcaccattcccaaggagcagtgggagctcgctctgggaa

SEQ ID NO: 30443 - DNA, 1135 bp, Artificial sequence
  DNA replication origin
gcggcggctgcggtaggagccggccggggacatcgaggcaagatctgccgccactcaggcgctgccccatgcgctgcccgcgggcgcggccagggacatggctcagcacatggcgtgggtcccgccgggcagtgagcgcagagagggttccccggcacgctggacgcccgggtggctcggtttattgcccccgtgtgcccgcggccgccgctgctgctgctgctcttccccaggtggcggcggcagctgtagcggcggcggctcttgacatgttgcccggcaggagctgcaactggaacggaaagtcgggacggcggtaactgctgggcgagggtctgctcccggggcgcgacgacgcgctcggggccaggaggacgttgcactctcgcgccctggccactctagactgtgcgcaccgccgcacgccggggctgcctccttgcagtcctaagaactgagcctcgagcagccccggcacttccccgcagaggctgcagaggcgaactgcgcaggaagagagctgtggaccgaggtggagtgggcggtcccggccttccagagtgacgggctgctctacctaccaaaaaccccgaacgccatgcaaatacaggcgcttctccgagagctcagcagccaacccgctcccaggacgagggggtgtggaaaggcttctgggcggtgtagggcggtcaggggttgctattggcttcggaacaaggggcgggcccaaaggggcggagttaggggctggtgacaggagcagatggtgggaagaatgctgcagtgacctagcgctgggagaggtcctaccctactgagtggtgcgctcccacacccgcacgcatttccgcactcgttccctagaagccagccttggcggtagttgcccagatgttgggacaccagtccccatccagatgtttcgcaggaggtttcgtgatgcttacgtgttgcagagtagggaggcggttggaggagggagagcagggtaggagatgcactaggcactggaaccccccccccaacccacgccggggactcattcggagacccttctgggacaggcacgggattaggaagtttaagtagaaaggatgtttggaaatcgctgtcgtgtgtgtgtgtgtgtgtgtgt

SEQ ID NO: 30444 - DNA, 1134 bp, Artificial sequence
  DNA replication origin
gccgccgccacctggggaagagcagcagcagcagcggcggccgcgggcacacgggggcaataaaccgagccacccgggcgtccagcgtgccggggaaccctctctgcgctcactgcccggcgggacccacgccatgtgctgagccatgtccctggccgcgcccgcgggcagcgcatggggcagcgcctgagtggcggcagatcttgcctcgatgtccccggccggctcctaccgcagccgccgccgcccccgccgccggtgaggaggaagctcgcgctgctcttcgccatgctctgcgtctggctctatatgttcctgtactcgtgcgccggctcctgcgccgccgcgccggggctgctgctcctgggctctgggtcccgcgccgcacacgacccgccagccctggccacagctccggacgggacgccccccaggctgccgttccgggcgccgccagccaccccactggcttcaggcaaggagatggccgagggcgctgcgagcccggaggagcagagtcccgaggtgccggactccccaagccccatctccagctttttcagtgggtctgggagcaagcagctgccgcaggccatcatcatcggcgtgaagaagggcggcacgcgggcgctgctggagtttctgcgcgtgcaccccgacgtgcgcgccgtgggcgccgagccccatttcttcgatcgcagctacgacaagggcctcgcttggtaccggtgagtttccctgccaggggcagggtctccatcgtcgattcagaccctgagctaagggagacatggcgtatgatagggaattggcagggttacagcttcggaccacccggggtagggcagggaaactacggcagattgcgcagcgcatcctgtccgggtgcggtgagggttgcgctccgcttggttctcgtcacaacccacagaaagttctcgcggagcactggtgcccttgaattcatcaggcgacctcgccgcaaagaagaagggcagcgactgagaccgccctcagcaaagcgagccaccctctaaccatgggggtatccgactcgaatcgtattttatgactcgttttaaattttttcctcccggagcccgagacgctgggaatgttctgagcccctttggt

SEQ ID NO: 30445 - DNA, 1053 bp, Artificial sequence
  DNA replication origin
agggcagcgactgagaccgccctcagcaaagcgagccaccctctaaccatgggggtatccgactcgaatcgtattttatgactcgttttaaattttttcctcccggagcccgagacgctgggaatgttctgagcccctttggtcggtctccgccctcaaggaacttctagagcagcttctgcttcccagatggggagagggggtgggggccgcggcgtcccggcgaggccgcagagtctgttaactttttgttacagtccgcctggttaccggaaccccaagggtgtcagacccgcctcgctcgcgagccgcctgggctcgggagggtgagccgggcgggtggcccggcgcctccgcctggcgggcgggcggcgcgcggagcgtggagctgtgctggtccctgtcgggcaaaggcgcgcactgcaaccggctggagcggcgcgaggctttgaaggcgtccgggcctccgggcaccgccgcccgtttccgcctccctgccctcggtgctgggatagggaaagcaaggacgcgtgtctccgcggggcttttacacgtccggagcaaagaatattcggggcccattgattgagaaatgagggttgcttcgaggtcgcggcttccggaaattctgttctcgagtcgggttgcgggtcaggttccaaagggacagtggccccggggtcacaatcactacctctgcccactgctttccgcagctgctggtctttggggtgagctgttgggttgcccgagcttcgggtaaggcgcgagtgggcaggaggtctagatttcggcctccgataactgtcttcgactaggggcccaggtaacgacccccacattttcgttggggtctccacccgtaaccccagccagcacgacattcagacacccctccaggcccaattagcttcacagacgctcaagacttgggaaaacaaaagaggagaagataactgaacccctctccctgtgcccaccccactgtcgggacctgggtgggttggagaataaaagagggctgaccccgcggattaaaacggctcccttccc

SEQ ID NO: 30446 - DNA, 1127 bp, Artificial sequence
  DNA replication origin
gagcctcagtccggcctcacctccgctttgagggagcaaatccaggggcggggcgagcgggggcggggcgagcgggggcggggcgagcgggggcggggcgagcgggggcggggcgagcgggggcggggcgagcgggggcggggcgagcgggggcggggcgagcagcccggacacggcggaggcggagcctggagcaggagcgaaagggaaaggcattggggccacagtgggctccaagtggaaagcttcatggtctgttttacggaagtatttgctgtccacccaatgcaaattctaaagtcgttcccccagcgtcgctgccccgaatgcaggggggcggggttttattgtataatataattttctttaaatattttacaaagacttactcctgtacagtattacttttgtactttaaattgtagaagcaactttttaaaatatgttcttgcagagaagtaaaacgttaagaaaaacaaggcaggaggactctagagtaactaatggacggtattattatgggaggtataaacttagactccaggagttgagaccttgcgccctggagcttaggcgcctgggaactctattgccaatcatatcaccaacctttatgtacttctttcgtcagttgtaaagtgggggtgataatggtttccttacagtgtaagtatctagtaaatgggagacgttatacttattacagttttaagtccagccgctcatgctgtgatcttgcctgaacaaaggatgtgaaattaaggggcgttaagtcatctttgaagcggtgatgatgacaatatcctatctgtctggccgagtcagactgctgttggcatagtggtatttgcacgtttccttaattgaagggattctattaaaatcacaaattttatgtggctgtttgccagtgccatttaaaacctaatattctaataatgaaaggggaaaaacacacacacgcgtttctcaaaggcgagacatttcggcagcacaattgcattcgtgcccttggagatgaaaagctaacaaatttggggcctgtacgtccagcctgcccatggcaggttttcagtggtccactcagtgctgtggagttttgtgttgtttttcgtagtttttggttt

SEQ ID NO: 30447 - DNA, 919 bp, Artificial sequence
  DNA replication origin
gcgcctctgcccggccgcccctactgggaagtgaggagcccctcagcccggccagccaccccgtccgggagggagatgggggggtcagcccccctacccggccagccgccccgtccgggagggaggtgggggggtcagccctccgcccggccagccgccccatctgggaggtgaggggcgcctctgcccggccgcccctactgggaagtgaggagcccctctgcccggccagccgccccgtccgggagggaggtgggggggtcagccccccgcccggccagccgccccgtccgggagggaggtgggggggtcagccccccgcccggccagccgccccgtccgggagggaggtgggggggggtcagcccccccgcccggccagccgccccgtccgggaggtgaggggcgcctctgcccggccgcccctactgggaagtgaggagcccctctgcccggccaccaccccgtctgggaggtgtgcccaacagctcattgagaacgggccaggatgacaatggcggctttgtggaatagaaaggcgggaaaggtggggaaaagattgagaaatcggatggttgccgtgtctgtgtagaaagaagtagacatgggagacttttcattttgttctgcactaagaaaaattcctctgctttgggatcctgttgatctgtgaccttacccccaaccctgtgctctctgaaacatgtgctgtgtccactcagagttaaatggattaagggcggtgcaagatgtgctttgttaaacagatgcttgaaggcagcatgctcgttaagagtcatcaccactccctaatctcaagtaatcagggacacaaacactgcggaaggccgcagggtcctctgcctaggaaaaccagagacctttgttcacttgtttatctgctgaccttccctccact

SEQ ID NO: 30448 - DNA, 708 bp, Artificial sequence
  DNA replication origin
acgttctgagaataacagagctggggtagagggggaggctgggagccagaagcgttaaatcttctgtcactaaggggaatgactgggaggctgtagaagacagccaggaggagaggaggcgtggtattttggggcacataaggggagcagggtttgcaaaggggctggggaggggcgatggtctagatgttgtgatgggggctgaggaggactcccatccacctaggcataggaaatgagagaaggagctacacgggttgagaggtggcaggagaaattgtctttgggggacattcaagttttggttaagacaaggagcaaagcagaatccgaggagagacagagtatcaagatgccccagggctcagtgggagcaaagtggggtggtgactgtagagcctttgaagcaatagggaatttgagttcaaaagaatcatgtgactttctagcctcaatatttgggtgctgggggtttgagcatgggcatttgagacttgatgggatgtgtcactgtccctggaagcaggatcagagcttgggcctagtggtgttctgctttgagggttggcattagaggggacttagaagttgtggtgaattttgtggtcccagagggctgaagatgagcctccagaggggccaccactcctaatcccatgcccctgccaaatatcccaacctgagcatgatgccgtctcccattgagct

SEQ ID NO: 30449 - DNA, 1676 bp, Artificial sequence
  DNA replication origin
cagatattaaaataccatctctttattaagtgtctctacaataaggatatttgctaagatcaagatgtacaattttttgggttctgttttgttttggtaaatattgcccacgtctttttagtttgcttcaaacatttactaaaaataaaaaattttaaatctttgcctacttaaaaataaaaaaaatactcaaaacaaatttaagctgaagatatatactgtataaagtgcttcatctacctaattctctgaagtcttttttttttctgtgttttaagactttatcattaaaaaaagaagaaattagagaagggaggtgggggggacaggagggtgaaagaatctctccaaaatgtcggatccgggcgaccctccttccctgactgcccagccaccctgtcccttctctgtcctcgcggcgaggccctagctgccatcttctggggaccaaggcccaggagcccagctcgggtcccaggcagaggtgaaggcagaagcggggctcagagcctggaggccttgccggtgtccttgagagccccttgggtgggcactcaggcccccatgtcccagcagggccctagggaggtaggcgttgagcggagaggcctttggaggtgggatcctgaagccagaggaccaggcgggaaccagagccaggtgtgaggctgggggtcacagccggaggctgggtctctcccgcatcagcctctatagataatgccattctccttccgagttcaaactcatccccactgatgctggagcccggaaggccacgtgtggctctgtctcggtatagcccccgatgggctggccctctgggctgaaggctgcaccctgccctgtgcggttggattgatcgatcataggttgcacgatgcgtctccgggcattaatgaaccagttgttgacttgcaggatggtaagccccgtgtcctgcgccagctgtttcttctgctcctccgaggggtacgggtgtgagaggtgctggaacaaccaggctcgcatgatgttggtggccaccttggggaagatccccctcttcttgtttcgccgtggctcctggtccaagtcctcatcttctccaccagaactgggagaggccacgctggtgtccagcccgactccttggtcactggagttgtccccactctgggaggccagccccccgctggatggacctggggtccccaaatgtacagacccgctatcctcatggtctcgaatccatatattattctggtctgggaggctggggcaggaggctgggtagtcctcgaagtcctccctgcagccgccatcccgatcctcgatgaccaggtcgatgggcatctttcccttctccagctctagcaggtggaaccgcagcacttggattgcctggatcatcagattgtccagttctgggttggaggagaagaagggcctctcagagcgaacctgcttggcgaaggcagtgttgtcctcgttgaaggaatcagaggagcagacgtcgccgccgcgggggtgtccccagcccagctccggccccatcacggggagagcatgtagccagttcacatttctcaaagaccagggccaagacggggaagagcgggtgtccatagatctcatccttgtccctcttcaggccgtcgctgtccaagcctgggggtaggggctggggaggccgg

SEQ ID NO: 30450 - DNA, 1917 bp, Artificial sequence
  DNA replication origin
agaacaaaatgaaaagtctcccatgtctacctctttctacacagacacggcaaccatccgatttctcaatcttttccccacctttcccccctttctattccacaaaaccgccattgtcatcatgacccgttctcaatgagctgttgagtacacctcccagacagggtggtggccgggcagaggggctcctcacttcccagtaggggcggccgggcagaggcgcccctcacctcccggacggggcggctggccgggcagaggggctcctcacttcccagtaggggcggccgggcagaggcgcccctcacctcccggacggggcggctggccgggcggggggctgacctccccacctccctcccggatggggcggctggctgggcggcgggctgacccccccgcctcccttcccgacggggtggctggccgggcggggggctgacccccgcctccctcccggacggggtggctgccgggcggagacgctcctcacttcccagacagagtggccgccgggcagaggggctcctcacttctcagacggggcggttgccaggcagagggtctcctcacttctcagatggggcggccgggcagagacactcctcacatcccagatggggcggcagagcagaggagctccccacatctcagacgatgggcggcctggcagagacgctcctcacttcatagatgggatggcggccgggcagagatgctcctcactttccagactgggcagccaggcagagaggctcctcacatcccagacaatgggcggccaggcagagatgctcctcacttcccagacggggtggcggccgggcagaggctgcaatctcggcactttggggggccaaggcaggcagctgggaggtggaggttgtagcgagccgagatcacgccactgcactccagcctgggcaccattgagcactgagtgaacgcgactccgtctgccatcccggcacctcgggaggccgaggctggcggatcactcgcagttaggagctggagaccagcccggccaacacatcgaaaccccgtctccaccaaaaaaatacgaaaaccagtcaggcgtggcggcgcgcgcctgcaatcgcaggcactcggcaggctgaggcaggagaatccggcagggaggttgcagtgagctgagatggcagcagtacagtccagctttggctcggcatcagagggagactgtggaaagagaggcagagggtccagctttggctcggcatcagagggagactgtggaaagagaggcagcggcagaggcagaggcagcggcagcggcagaggcagcggcagcggcagaggcagaggcagagggagagccaaaagaagaaaatttaaggcacactggaagaaggtatttgccatatatgtatttgacaaaggacttacatggagaatatataaagaattcttaaaagcaataaggaagagaatgacatctgattcttaaaatggacaaaagttcatatgctgtttacagagccaatacccccgctccccaccaccaaacaaacaaagtgggcaaaaaacctgagcaggtgcatcccaaaagggactatccacatggccaatttgcatatgaaaaggtgctcaatctccactgccaaaagaaaaatgcaaatcaaaacctcaatgagacactactacacattacccacatgacctccagtaaaaagactgatgctaccaagtgttgatgaaaatgcacagaaattgacctctcataaattgctgaaaagacataaattatacaaatatttcaggcatctgtttggtactatcctagaatgtatgcataccctaaggcccaggaattccattctgaaggatgtaaccaacaggaacaagcacatatgtgtttcaagagacatcgacaagaacataacagcgctattc

SEQ ID NO: 30451 - DNA, 925 bp, Artificial sequence
  DNA replication origin
ctgggatgtgaggagtgtctctgcccggccgccccatctgagaagtgaggagaccctctgcctggcaaccgccccgtctgagaagtgaggagcccctctgcccggcggccactctgtctgggaagtgaggagcgtctccgcccggcagccaccccgtccgggagggaggcgggggtcagccccccgcccggccagccaccccgtcgggaagggaggcgggggggtcagcccgccgcccagccagccgccccatccgggagggaggtggggaggtcagccccccgcccggccagccgccccgtccgggaggtgaggggcgcctctgcccggccgcccctactgggaagtgaggagcccctctgcccggccagccgccccgtccgggaggtgaggggcgcctctgcccggccgcccctactgggaagtgaggagcccctctgcccggccaccaccctgtctgggaggtgtactcaacagctcattgagaacgggtcatgatgacaatggcggttttgtggaatagaaaggggggaaaggtggggaaaagattgagaaatcggatggttgccgtgtctgtgtagaaagaggtagacatgggagacttttcattttgttctgtactaagaaaaattcttctgccttgggatcctgttgatctgtgaccttacccccaatcctgtgctctctgaaacatgtgctgtgtccactcagggttgaatggattaagggcggtgcaagatgtgctttgttaaacagatgcttgaaggcagcatgctcgttaagagtcatcaccactccctaatctcaagcacccagggacacaaacactgcggaaggctgcagggtcctctgcctaggaaaaccagagacctttgttcacttgtttatctgttgaccttccctccactattgtcctgtgaccctg

SEQ ID NO: 30452 - DNA, 1322 bp, Artificial sequence
  DNA replication origin
ctcctgtggcagggggttggggagcctaagccaaggagccgagtaggcggtgactgcgcgcccctgcccgcgccaggcccggagcggtcgtctgttgaatggagcccctgatgcgaccagcatgggccaggctaggcaggggcaggagcccttcggcagagcccccgtcaccggcgcggagccgcagcctggggaggcccctgccgctggagtccggccccgggagcgcgagattgctgggcatccctgttccctagcccggagccccgcctaggggagccctccagtgcctgcgggggcagggctgggcagggggaaggggtcctcgggcgtcagaccccagcccagcctgcaccgtccacatggtgcaggggcgcggtcccaggatgggcggccgcagccctgaggagatttggctgcgccggctcagcctggcgccttgtgggcgccccttgggagccctgagggaacgtgcccctcgagactccgagactccgtgggtaccgctgtccccgcctagccccctcttcaagaggacaccagcgtaccgtggcaggcacggtctggctctgttgcccaggagggaatgcagtggcacaatcagatctcactgcagcctctatctctcgggttcaagcgattctcccgcctctgactcccaagtagctgggaccacaggcgccaccacgcccagctcatttttagttttttgtggagatgcagtctcgtttttgttgcccaggctggtcttgaactcctgctcaagccatcctcccatgttgtcctcccaaagagctgggaagccactgtgcccggccttgtttttcaattaagagatcacagcaagtgctcctccttctccaggacaggtggccgatggtggagcattgagcagtggctaggagtgcaggctttggtgccagatcacttaggtttaaatccttgctttgccttctccaagctgagctgctttaggcaaattattgagcctttctgtgcctcagtttcctggtctataaaatggtctggcaatgacctaattcactggtgccacaaccccttctaagggaggagaccacccctcatactgtcttatgcccaatttctgcctccaaagaaagaattaaaaactaaaaggcagaaatgaaatccacaggcagacagcctggcaccactccctgggcctggtaattaaagattgacccctgatgtaattggttatgttatctatagattacagacactgtatagaaaagcactgtgaaaatccctgtcctgttctgttctaattaccgacgcaggagcttgcagaccccagtcat

SEQ ID NO: 30453 - DNA, 1139 bp, Artificial sequence
  DNA replication origin
catgatcccagctcactgcagcctcgaacccctggcctcaaaggatcctcctgcctcagcctcccaagtagctgggactacaggcacctgccaccgtgcctggctgatttattttttatttgtttgtttagagatggggtctccctacattggccaggctggtcttgaactcctggcctcaaatgttcctcctgtcttggcctcccaaagttttgggattataggcgtgagccatgttgtcgtcattacagctacattgagatataatttatgtgccacacaatgcatgcctttcaagtgtacagttcagtggcattgaggtatatccacagaaccgtacaaccatcaccacattgagaaaatttttatcaccctaaaaaatcctttacaaaatcctttaccctttagcagtcaccccatgttttgatttttgctttacatgattttacaagcatcttttcctgttgctggaaaatctccttacccatcctctttggtgactgtcagcaaaggctttcgggtggtgaaatagcgtggccaggagtgctctagaacaatggtgttggtgagggctgcagaagctgaggacccacaggcagagagggagggatggtagaagcaggtggtgaggagggactcggggcaggactttgggggtaaaaggaagcaagtctctggaagcagaaccagcagcactgctgatcattgggacgtggagaaaggcgaaggctcagggtgtcagcaaacttcctagggtgggtgagggttgccaggtcaataacgaacagggtcccaggaaaaggcggcagcacaggtttggggagaattagagatgagcttggttttggtcttgttggatttgggggcaccagtctctctcctggcgagagtcggcagtggggtgttaggatctggccctcaggaggctgttagggctgaagcaagagatttgggagttaagggtgtgagggccacgtgggaggcctcgggagcctgtgccgatccagggtgagtgtgaaggaaagaaaaaagagggcccggggaacactggtattttcgggcggtggacgaggatgggacggccacgagcttgtcttaaggtagaaggcagagcggggccgtaggggcagtggcgcggg

SEQ ID NO: 30454 - DNA, 1610 bp, Artificial sequence
  DNA replication origin
tgtcccgctcaggtgaggcgctcggcgtcgcccgaactcggggccccgtcggagctccgaaatgggtcgtcttctccaggccggggttcctccctcgggggccccagacgggccaggctgggggcgcgcggggcgcttggagggctggttcccagcctggccaccccgcaacgctagaccagtgcgcccgggcacccaagacatcccagatgcgcgtcgctctaaggagatctgcgtagggacagctctagggggtccggggagtgcggtccccggcgcccggggaggcgccgtggaaaccccggggaaagcgtcacccccggggaaagcgtcacccccgtgggcgggtggagcccggggcgcgggagttttggtgatcacatctccactcctgccacgaaggccgttcctaacactcgcccgcagcggcggtgcagcggcagtcccgtgagtgctgcggctcccggaggcccgggaggttcccactaagggcaaggcaactttggacgctgggcattcgcaccgtcagaatggacacgcatgagccagcttcagaacgtgtctgctgcggagaggcggcccggcccatcccaggggaaggtgtccgttaactttggggaacgctacggactcagattatatacttttaaaaggagttacaatgcttcctcgtgtctggcaaacggccttacagcctcactgcccttgtgtaactatttatctcctgctgccctgttgggagcgggctgagaagtgcagaaaatggtggcgaacttacttgtccactctttctcccacactgagaaaatctaggattcaggggatggagtcagccagcgaccagagtggattcccagttggagctgatgacttcaacattgagagtttgttgaaagtatttattctctgtctttggtgcctgggccactttggcatttctgaggagagcttgagatctctttaaatttggagctgagacagggaaactaaatcacagagtaggaaggaagggaaggaattcatttattgggtgccaactctgtgcagacagtttataataaacgtgtccccagcagtccttgcagtagtaccagaggacgggtgctgtaaccttcatctcgtagaggaggggtgatggcccagggaggttggagtcttgcccaggatggtgtatcagggatgggtgtcagagccggggcttgaactcacagctggcaccgtgtccccacccatgccatcaggccactctgcaaggccatgtgtggcaccgtgtttaggagtcagggagaaaagtgctctgctgttttgggaggaggagcctgcctgcagtaaactggtggttgtaggggaatgtgtttgtgggaatggagccggagaatgctcccagaggccatttgagtaggcagatgtgttgggcctggtccttgcaggttgtttcgtgggtcccagcaggaacaggagcctcctgcttgggagggctgtgagccttatgtgggtgtctggccactccatgtgctgctgcccgtgctgttggaccaggaggccttatgtctcccatcaggtgtgacagcccagggatttccaaggcttagggaggacagcagtttctt

SEQ ID NO: 30455 - DNA, 916 bp, Artificial sequence
  DNA replication origin
cgcccggccagccgcctcgtccgggagatgaggggcacctctgcccggctgcccctactgggaagtgaggagcccctctgcccggccagccgccccgtccgggagggaggtggggggttcagccccccgtccgggagggaggtgggggggtcagccccccgcccggccagccgccccgtccgggagggaggtgggggggtcagccccccgtccgggagggaggtgggggggtcagccccccgcccggccagccgccccatccgggaggtgaggggcgcctctgcccagccgcccctactgggaagtgaggagcccctctgcccggccagccgccccattcgggagggaggtggggggggtcagtcctccgcccagccagccgccccgtccgggagggaggtgggggggtcagccccccgcctggccagccgcctcgtccgggaggtgaggggcgcctctgcccggccacccctactgggaagtgaggagcccctctgcccggccaccaccccgtctgggaggtgtacccaacagctcattgagagcgggccatgatgacaatggcggttttgtggaatagaaagcagggaaaggtagggaaaagattgagaaattggatggttgctgtgtctgtgtggaaagaagtagacatgggagactttccattttgttctgtactaagaaaaattcttctgccttgggatcctgttgatctgtgaccttacccccaaccctgtgctctctgaaacatgtgctgtgtccactcagggttaaatggattaagggcggtgcaagatgtgctttgataaacagatgcttgaaggcagcatgctcgttaagagtcatcaccactccctaatctcaagtacccagggacacaaacactgcggaaggccgcagggtcctctgcctagga

SEQ ID NO: 30456 - DNA, 1800 bp, Artificial sequence
  DNA replication origin
ataggcgagacgaagagcgtcatgcaaaattaactcagcctcttctggctcatctttcataatgctcaactgaaaagggaagacaaaataatagaaaatgaaacatatagtagatgcatatgctaagagacagaagtgtatgcaactgtacatcccaactgatagaaggaagctaactcattcatcagacatttactgaattcctactatgtacaaagcattgtctacagagatgacagggaggtcagcctcccttgcagctaggtgtggccatctgatgaagttttggccaagagacacaggcagaaggaatgtgatcttacaacatattttataaggaagctgcttgtcctccatcctctttctaatttcttgcaggctggaggtgaccatataggacaagtaagcttaattacaactaatgataagagctataaagatgacagaaaggaatgataaggggtctcctctaaataggacttagggaagccttccaaggaagtgacagctaaactgaggtagtaaggatgagaatgagtcaaccaaataaggacctggggagaacaatgactcaaacagagggtagagaatgagtgaagtccctacaagctgaagagaatggttttgaggaagaaatgcaaagaaatagatgtgaagggaggatggtgagccagaggattactgccaaatgggtgggcaaggtatatgctggtttagatcatgtggggtgttgcaagccaaggcaaggagtttgtattttatcataaatgcagtgggtagccattcagagctttctgacaaggagatgacataatccaatttactctttttttttttggtcgctttggtttctgcatggagaatagattgcaagaggccaggaggccaggaaagactactggagcatagttggtggcaatgatggtttgcactagggtgacagcaagggagatagacaaaaggggaaagatttgagaaatattttgcatttgttggcaacaggacttgttgctggactgtaagtgtattggaaggcaatggtaaggtaccacaagttttaagaatgactatgaggtttttaggctgaaaaactgatggtagtaaagagatggcgaaagcgtatgttgaggaggcattaaagatcgtttagttttgggcatgttaaatctgagaggtaggtatggtcctaaagtgcaaatggcatgtcagtagcacactacagaatggaaatacaaatttggacgttgttggcatcgagtaggtatttagctcaatggaagagatgagataacttgggaaaagaggaggaaaaaaaaatagaaaaggatgtggagaaaaggaagaattcaggaggagaaccgaaccgcataaccaacactaagttgccattttcaggccgctatatacgtgcgaaattatgtcatttcagataggctggttaattgataaaaccactacaaaacgttcccgatatttcgtttgcataaagcgtgatgcctagggcgccatctccatttgcacttgacactgcagaggttttactgcaggccttagagtcggaaaagcctggatggattccaatcccctctcggatgacccacctcattctcggcaattttacccgcggagcctccatccactcttcggcgaggcggagagagtaatgcgcagcaacgccaagaccccgctcacaaaggctaccgcgctcggccgggcgcagggcccggagccgcctcaccttggctcgcttcagcagctggatgatctctgcctcggcctcgtccgccccgtcctcggcag

SEQ ID NO: 30457 - DNA, 1286 bp, Artificial sequence
  DNA replication origin
aaccgccatcgtcatcatggcccgttctcaatgagctgttgggtacctcctcccagacggggtggtggccgggcagaggggctcctcacttcccagtaggggcagccgggcagaggcgcccctcacctcccagacggggcggctggccgggcggggggctgactcccccacctccctcccggacggggcggctgacccccccccccacctccctcccggacggggcggctggccgggcagaggggctcctcacttcccagtaggggcggccgggcagaggcgaccctcacctcctgtacggggcggctggccgggcggggggctgaccccccaacctccctcccggatggggcggctggccgggcagggggctgacccccctacctccctcccggacggggcggctggccgggcggggggctgaccccccacctccctcccggatggggcggctggcctggcgggggctgaccccccacctccctcccgggcggggtggctgccgggcggagacgctcctcacttcccagacggggtggcagccgggcagagggtctcctcacttctcagacggggcggccgggcagagacgctcctcacctcccagacggggtcgcggccgggccgaggtgctcctcacatcccagacggggcggcggggtagaggcgctccccacatctcagacgatgggcggccgggcagagacgttcctcacttcctagatgggatggcggccgggaagaggcgctgctcacttcccaggtgggatggcggccgggcagagacgctcctcactttccagactgggcagccaggcagaggggctcctcacatcccagacggtgggcggccaggcagagacgctcctcacttcccagacggggtggcggccgggcagaggctgcaatctctgcactttggggggccaaggcaggcggctgggaggtggaggttgtagcgagccgagatcacgccactgcactccagcctgggcaccattgagcactgagttaacgagactccatctgcaatcccggcacctcagaatgccgaggctggtggatcactcgcggttaggagctggagaccagcccagccaacacagcgaaaccccgtctccaccaaaaaaatacgaaaaccagtcaggcgtggcggcgcgcgcctgcaatcgcaggcactcggcaggctgaggcaggagaatcaggcagggaggttgcagtgagccgagatggcagcggcacagtccagctttggctcggcatgagagggagaccatggaaagggg

SEQ ID NO: 30458 - DNA, 957 bp, Artificial sequence
  DNA replication origin
tgaggagaccctctgcccggctgccaccccgtctgggaagtgaggagcgtctccgcccggcagccaccccgcccgggagggaggtggggggtcagcccccgccaggccagccgccccatccgggagggaggtggggggtcagccccccgcccggccagccgccccgtccgggagggaggtaggggggtcagccccctgcccggccagccgccccatccgggagggaggttggggggtcagccccccgcccggccagccgccccgtacaggaggtgagggtcgcctctgcccggccgcccctactgggaagtgaggagcccctctgcccggccagccgccccgtccgggagggaggtgggggggggggtcagccgccccgtccgggagggaggtgggggagtcagccccccgcccggccagccgccccgtctgggaggtgaggggcgcctctgcccggctgcccctactgggaagtgaggagcccctctgcccggccaccaccccgtctgggaggaggtacccaacagctcattgagaacgggccatgatgacgatggcggttttgtggaatagaaaagggggcaaggtggggaaaagattgagaaatcggatggttgctgtgtctgtgtagaaagtagtagacatgggagacttttcattttgttctgtactaagaaaaattcttctgccttgggatcctgttgatctatgaccttacccccaaccctgtgctctctgaaacatgtgctgtgtccactcagggttaaatggattaagggtggtgcaagatgtgctttgttaaacagatgcttgaaggcagcatactcgttgagagtcatcaccactccccaatctcaagtaccagggacacaaacactctgcctaggaaaaccagagacctttgttcacttgtttgtctgctgaccttccctccgctgttgtcctatgaccctgcca

SEQ ID NO: 30459 - DNA, 854 bp, Artificial sequence
  DNA replication origin
cggcggcggctggagtgagcgtccgactcgccgcgccgaacgaggtcccggtgtagggccgcgcgccgtggccgcgtcccactcctcaggccggggcgcacgtcggctcccacgcttagccagctcccggtgagtaggccctggcgcctgcaaccccggcctccgggctcctgctagtccgggggcttccgagggctcccggggcagcagccgctgggacggtttctccgccgggcggggggtgtcgcaggcctgggcaggtcgggacccgtcctggccgcctggcctcttccactcggcagcccaggagagagccgggcgcggcggggagctcgggctgggctagcggaggcttatggagtttggaggaagaatgggctgtggccgggccggggctggccccgaggtgtcctgtgcggaggggcgtgcggagcctacagggcctgcgagggagagcgggcagccggtgccccgggtggggccggcgcaggtggcgggcctgggctcactgaggcggagttggtggccgacttggaagtgtagaaggggctgcggaggttgacagccatggacaagtgcgtgcagagtaaattagttcacctttctaacagaccgcttcagggtgtaatggcgaaggctgggtactggtggagatggcaaagatccgaacactataccttctgccgtttattgttggtgttttcttaagcgaagtccgtaagtgcacccctttttggggagagaggaatttgagaaactgtagttgtgaaatcagcctttatggagaggagactgaattcttcaaattaactggatcaggaatagtcatgtattaaaggaatggatgggaataa

SEQ ID NO: 30460 - DNA, 1938 bp, Artificial sequence
  DNA replication origin
gaaggtcttttactatcattagaagttaactttaaggattgagcaggcacgatacagcatagattgtttcgtgtgctatatagtaaggtcaatattcttgctccttctacaaataaaaaaaagttccacagaataacaagtacaggtggagttcccaacggaaatgcaggtactgaatacaaccaactgcaactgtttctctgctcctcaatcctgctggcgtagtacgcgagctgccgacgtcccccaacccaccaggtaagccggccgctcctgtccctaggctgtgaggggttcagaggtaagaccttcggtgtattcacttagctccctacggaaaacttcgagaagaaggcgactgagatcggttagcacttaaatccctttcaaagccccggctcccatcgcccctcctatggcctcctacctgcagagaagcaaagcaggtacacccagtgccttaggcgggccaagcctagcactgtgggagcaaaaaacatggcttcatcgtcagggtgcgctatgaccagcagggtccggctttcggctcccagccgtcctccctgctcccgactcttcattcgttctgaggagtcccaaacccagaggaagccccatgccaagaccgccaacgccacacacaggagccacattgcttccatgatgggtaagcagcactgagcctgcgcagtaggaaaggctgcctctgaccctgactccggctggaaaacttcaccggggaatgttgggttccgctgttaagtccctcccgccgacatgctccggaagcttgaggttttaacgttaagggttctcttgtgttttaacacagaagtctccatgccgtccagtttcctaccctagtcctaccacactgtacaatcggtttaaaaggaagcgtcttatatataagctcccacttataggaagagttccttcctcttcattttcgaattcatttcttaaaactcgggcctttctcgtaattatagggttagacagcccgttatccgtatgacagttttccaaaatagccagttacaccaactttgttattccttctcacttttggatggctttctttacctttttttttttttttgagaggctctgtcgcccaggctggagtgcagtggagcgatctcggctcactgcaacctctgtctcccgggttcaagcgactcttctgcctcagcctcccgagtagctgggactataggcgcgcgccaccacgcccagctaatttttgtatttttagtagagagggggtttcaccatgttaactaggctggtctcgaactcctgacttcgtgatccgctcgcctcggcctcccaaagtgctgggattacaggcctgagccaccgcgcccggccctttcttttttttttttgaaacggtctggctccgtcgcccaggctggagtgcagtggcgcgacctaggttcgctgctacctcagcctcccgcgttcaagcaattctcccacttcggtctccccagtagctgggattactggcgcgcgccaccacgcccgcttaatttttgtatttttagtagtgacggggtttctccatgttcgtcaggctggtctcgaactcctgaccttaagtgatggcccgcctcggcctccctaagtgctgggattacaagcgtgacccactgcgtccggtcgggcctggcttttctaaaggaacgtatgcgtgcggttacgaggaaccgtcgtttccccagcagggtgaggctgagcgtgcacttaacagtcgcgagggccacaggctcctcttgcaagtaacttaaggttaaggagcaacatcgtggacaaatcggcctcgcccagcatttcagtgagggcttggtgcgaattccagccagagccctagaaagtatcttgggcaggtcgaaatgcacccctccagctcccagccacgaggggaccggc

SEQ ID NO: 30461 - DNA, 809 bp, Artificial sequence
  DNA replication origin
gtgaggagcccctctgcccggccgcccagtctgggaagtgaggagcgcctcttcccggccgccatcccgtctaggaagtgaggagcgcctccacccggctgcccatcgtctgagatgtggggagcgcctctgccctgccgccccatctgggatgtgaggagcgcctctgcccggccgcgacccccgtctgggaggtgaggagcgtctctgcccggcctccccgtctgagaagtgaggagcccctccgcccggcagccgccccatctgggaagtgaggagcgtctccgcccagcagccgccccgtccgggagggaggtggggggctgcgggcagcccccgcccggccagccgccccctccgggagggaggtgggggggcagcccccacccggccagccaccccgtccgggaggttgggggcgcctctgcccggccaccccgtctgggaagtgaggagcccctctgcccggccaccaccccgtctgggaggtgtacccaacagctcattgagaacgggccatgatgacgatggcggttttgtggaatagaaaagggggaaaggtggggaaaagatagagaaatcagattgttgctgtgtctgtgtagaaggaggtagacctgggagacttcattttgttctgtactaagaaaaattcttctgccttgcgatgctgttgatctctgaccttacccccaaccctgtgctctctgaaacatgtgctgtgtccactcagggttaaatggattaagggcggtgcaagatgtgctttgttaaacagatgcttgaaggcagcatgctcgttaagagtc

SEQ ID NO: 30462 - DNA, 1162 bp, Artificial sequence
  DNA replication origin
agtggacacagcacatgtttcagagagcacagggttgggggtaaggtcagagatcaacagcatcgcaaggcagaagaatttttcttagtacagaacaaaatgaagtctcccaggtctacctccttctacacagacacagcaacaatctgatttctctatcttttccccacctttcccccttttctattccacaaaaccgccatcgtcatcatggcccgttctcaatgagctgttgggtacacctcccagacggggtggtggccgggcagaggggctcctcacttcccagacggggtggccgggcagaggcgcccccaacctcccggacggggtggctggccgggtgggggctgcccccccacctccctcccggagggggcggctggccgggcgggggctgcccgcagccccccacctccctcccggacggggcggctgctgggcggagacgctcctcacttcccagatggggcggctgccgggcggaggggctcctcacttctcagacggggaggccgggcagagacgctcctcacctcccagacgggggtcgcggccgggcagaggcgctcctcacatcccagatggggcggcagggcagaggcgctccccacatctcagacgatgggcagccgggtggaggcgctcctcacttcctagacgggatggcggccgggaagaggcgctcctcacttcccagactgggcggccgggcagaggggctcctcacatcccagacgatgggtggccaggcagagacgctcctcacttcccagacggggtggcggccgggcagaggctgcaatctcggcactttgggaggccaaggcaggcggctgggaggtggaggttgtagctagccgagatcacgccactgcactccagcctgggcaacattgagcactgagtgaacgagactccgtctgcaatcccggcaccttgggaggccaaggctggcagatcacttgcggttaggagctggagaccagcccggccaacacagcgaaaccccgtctccaccaaaaaaatacgaaaaccagtcaggcgtggcggcgcgcgcctgcaatcgcaggcactcggcaggctgaggtaggagaatcaggcagggaggttgcagtaagccgagatggcagcagtacagtccagcttcggctcagcatca

SEQ ID NO: 30463 - DNA, 1084 bp, Artificial sequence
  DNA replication origin
tctttccttcctcagtagctgggacaggcctgccacaccactgatcaggggcccaggagaagcactttgctaggggacaggaaacacatctatgtttgtatgactctatgtcactcaatacctttgagcttgcattttctttttattggtaaaatgcaaataaatatcagtaaaatcgggtgactgtgaagaacaaacacatttcatattatgtatgtatatcctccttctccaagaaagatttgagagttgtataaaacacatgacggaagtgagagtaaggggaagaagatggtgaaggtggaggcacactgattgacagcactcattccttaaagtcttgtccagtgccacagggcttgcaaatttggccctcaagcttcctgtggccacagaaaagagatgaataaagtcaattaccccattcgcagtattcagtgtataaaaaagaattcagctgtttaggagacgagcattcgtactaggacttgagagagatttctcagcgagaggacatggtgagatgcagtgagcaacatggccaaaaagggctagaagataagccagcagtgagtttcatgggctcagataacaagtgggaaagtgctttagactttaaaccatgagccctaatcaaataaacaaaccctcccccacatccatcacccggagaatcatacctcacagctgcatacagagcaatgtgattgctgtggccacttactccccctgcatcgaaagtcaccacctgtagagaaacacagggttttcactgaatgccttctccaccacctcaacttcaatggagctgtctccttcccttgggaaggagagaacagaaccctgaaacttttcaaatgcagcatctatctgaagtgacttctgagcagatcagtggtgtgtagctagtgctgtggttgaccacatagagactgttttccagggtttgatgttttactcttgttcctagccagtggagcagagtggaattcagccatgatagtaacttgggttcagaatatctttgttgcttattggtttagccatttattagcacatttagaattcctggctagcttctaag

SEQ ID NO: 30464 - DNA, 1308 bp, Artificial sequence
  DNA replication origin
tgcggcgatcgaggagctctgcggccgccaagctgcgcgggcagaagcggtccggggcctccgcggcccccgcggcctccgcggccgctgccttggcacccagcgccacccgcacacggcgctccgctagccaggccgggagcaagagccaggcggtggagaagccgccgtcggagaagccgcggctgaggcgctcgtcgccgcgggcccaggaggagggcccgggggagccgccgccgcctgagctggcgttgctcccgccaccgccgccgccgccgccgactcccgcgaccccgacgtcctcggcgtccaacctggacctgggcgagcagcgggagcgctgggagacgttccagaagcggcagaagcttacctccgagggtgccgccaagctcctgctagacaccttgtgagtgcggcgggccggggggcgcgggagccgttgccacgcggaccccctcggcaggagtcgggctcgcagcccgcgtgcaggccttgggcgcctttcagctctgagccttccacgttacggagccgacgcggctcccccgttagcactggggttattccttaattctaagggcggcggggcggggcggtgcttctagggctgtgtggcctgggaatggaaagggggcttcgtccggagcttgagggcgcgcgcagccgtcttgggacacaaagagtctttcccggccataagcatcgtgctcggggacgttgtctcttgctggcgcgcaaagggtgtgggggcctttcttagtgaaaagaacataaatcccacggctttctcttacccgaatcccctttttttttgtgtttgcacacgtgtttttgagggtgggtggaagggaaaggtagaagcgttgaaggaagcatgaatagttttgaactcactgggaagcaaaatcccgtcattgttccaggcactgccagggagggagcagggggcggaggttattgatccgggagagaagcgcgcgcgaagagatgctccggcctcgcgcggcggcggggatacctacgtagggaggcttttatgtgctcagccagctaatgctccctgccgctcgccctcctggctgctccgcagtcttttagatggcccgaggagcatctcgagtgtccgcgatttgggaaagagcttttaactgggctgttaaagggctgccttcttttctccaaatgcgatctggattcctgcctcggggaacagttgtgctacagagagatattttaacgccctgatattatatttcagtgtcaattttacgaattaaaaagaacaatcaaaacactagggggaaa

SEQ ID NO: 30465 - DNA, 1421 bp, Artificial sequence
  DNA replication origin
tgagggaaactctggtgtgctgaaaatgttctgtatctgaagtggtggtggtcacataagctgtacatctaagatatttgcacgttgctgtgtgtaaaccataattccaacaacaacaacgacaaaatggcaaggtggggctcggtggctcacgcctgtaatcccaacacttggggagaactaggcgggaggatcgcttgaggccaggagttagagaccagcctgggcaacatagggaaacccggtatctacaaaacaacaatagcaacaattcgctggggcgggggggggggggggggggcgccgcctgttgttccagctactcagctactccagaggcccaggcggcaggatcgcttgaggccaggagttcttggctacactgagccgagatcccgctactgcactccagtctgtcagatcctgtatggaaaaaaaaaaaaaaagacaaaatagttaaactatgcctttaattcaataaactattaaactaacaataccatgaagaaaatcagaataaagaagaaagataggctgacgcaggagaatcgctggaacggtgaggcggaggttgcgtgaaccgagatcgcgccactgcactccagcctggcgacagagtgagactccaaaaaagaaaaaaaaaaaaaaaaaaaaaagaaagataggctgggcccggtggctcaggcctgtaatcccagcgctttgggaggccgaggcggatggatcacctgaggtcgggagtattcggcaccagcctgaccaacatggtgaaaccccgtctctactaaaaatacaaaattagccgggtgtggtggcgaatgcctgtaatcccagctactcaggaggctgaggcaggagaatcgcttgaacctgggaggcggaggttgcggtgaggcgagatcgcgtcactgcactccagcctgggcaacaagagcgaaactcggtctgaaaaaagaagaagaaggagaaggagaagaagactatctgggttccatcaacgattctcgtgccttttgtctttaaactttggtgctgccttcatcaaaatcatactaatgaaattcgacgcgcgggtcattcatttaattaaaatgaaaccccaaatctgttgactattggtatcctcatgacactgttctataatgtgacagaaaagacgaaggtgaagaactatggtttcggccgctgttacacaggaggtagcaggtggcaggccgtttacacaaattagctcgtttttggagacgaagttaccccaggctgcccgctcggatgagcctgcgaattcaggcccaacccaggcccctccaggtcgggaaggtacgaagagcccgctggattcacacagggcaggggcgccttcgcaggtgcgagtggattctgggtatcgcgagcgtaggcccaggcgcagcccctctgcc

SEQ ID NO: 30466 - DNA, 834 bp, Artificial sequence
  DNA replication origin
ggcgcatgcctgtaatcccagctacttgggaggctgaggcaggagaatcgcttgaacccgggaggcggaggttgcgatgagccgagatcgcgccattgcactccagcctgggaaacaagagcgaaactccgtctcaagaaaaaaaaggaaagaccccccctccttctcccgccggaaataccctctttcaggacggcgcgcctgtgcggcgcacgcgcgctcagttacttagcaacctcggcgctaagccaccccaggtggagcccagcaacaacagagccaccgcgtcccccaccaatcagcgccgacctcgccttcgcaggcctaaccaatcagtgccggcgctgcaaggaagtttccagagctttcgaggaaggtttcttcaactcaaattcatccgcctgataattttcttatattttcctaaagaaggaagagaagcgcatagaggagaagggaaataattttttaggagcctttcttacggctatgaggaatttggggctcagttgaaaagcctaaactgcctctcgggaggttgggcgcggcgaactactttcagcggcgcacggagacggcgtctacgtgaggggtgataagtgacgcaacactcgttgcataaatttgcgctccgccagcccggagcatttaggggcggttggctttgttgggtgagcttgtttgtgtccctgtgggtggacgtggttggtgattggcaggatcctggtatccgctaacaggtactggcccgcagccgtaacgaccttgggggggtgtgagaggggggaatgggtgaggtcaaggtggaggcttcttggggttgggtgggccgct

SEQ ID NO: 30467 - DNA, 1100 bp, Artificial sequence
  DNA replication origin
agaggagaagggaaataattttttaggagcctttcttacggctatgaggaatttggggctcagttgaaaagcctaaactgcctctcgggaggttgggcgcggcgaactactttcagcggcgcacggagacggcgtctacgtgaggggtgataagtgacgcaacactcgttgcataaatttgcgctccgccagcccggagcatttaggggcggttggctttgttgggtgagcttgtttgtgtccctgtgggtggacgtggttggtgattggcaggatcctggtatccgctaacaggtactggcccgcagccgtaacgaccttgggggggtgtgagaggggggaatgggtgaggtcaaggtggaggcttcttggggttgggtgggccgctgaggggagggcgtgggggaggggagggcgaggtgacgcggcgctgggcctttccgggacagtgggccttgttgacctgaggggggcgagggcggttggcgcgcgcgcgcgttgacggaaactaacggacgcctaaccgatcggcgattctgtcgagtttacttcgcggggaaggcggaaaagaggtagtttgtgtggtttctggaagcctttactttggaatcccagtgtgagaaaggtgccccttcttgtgtttcaatgggatttttatttcgcgagtcttgtgggtttggttttgttttcagtttgcctaacaccgtgcttaggtttgaggcagattggagttcggtcgggggagtttgaatatccggaacagttagtggggaaagctgtggacgcttggtaagagagcgctctggattttccgctgttgacgttgaaaccttgaatgacgaatttcgtattaagtgacttagccttgtaaaattgaggggaggcttgcggaatattaacgtatttaaggcattttgaaggaatagttgctaattttgaagaatattaggtgtaaaagcaagaaatacaatgatcctgaggtgacacgcttatgttttacttttaaactaggtcaaaatgcagatcttcgtgaaaacccttaccggcaagaccatcacccttgaggtggagcccagtgacaccatcgaaaatgtgaaggc

SEQ ID NO: 30468 - DNA, 2011 bp, Artificial sequence
  DNA replication origin
tgcactccagcctgggcagagcgagactccgtctcaaaataaataaataaataaataaataaataaataaataaataaataagccagacatagtggcgcgcgcctgttgtcccagctaactggaggctgaggcaggaggatcgcttgagcccgggagatggaggctgcagtgagccgtgatggggccgctgcactccagcctgggcaacggagcaagaccctgcctcgaaagaaagcgtcccaaggcgcctggctcaccgctccagagcgcgctcccgggtcggcctccgccctccaagccggagggaaatgctgtggtcccgccgtccgcctgcatcctccagttcctttggagggcaggggagtggagcccacaggctctgacacccttacagtccagctctgtgacttggggaagggagtggcgcatgaggagggcgaagctggagtccaaaggaaggtccttccgttcccgcccccgacccgggatccgccgaagcgactgcggaggcgggtcccaggcctgtcccaggagggggtgtccgggagggggaccgatgcctacgtcagacaggagggcaggggactcgcgggattcgtggggaagcgagaggggaaagagcagggaacgtgcgctggggacgcggccgaggcgcagtgggagggggcccaggattctgggtagttagttgggcggggggcggggatgcgcctgaagctcggtagcgagaggtactggggtcgcggtgggagtcttagcagaaccgcggtggagcctactacccgagggacggggtagggggcgcggctgaggcaggtcggggtgtgaggggtgggaggcgcggctgaagtgggatggaagggcgtggagaggcgagggtgggaggcgtggctgaggtgggatgagaagaaagtagcgaagtgaggggtaggggaggcagaggcaagggtgggagggagatgggggtgaggggtgggggggtgaggggtggaggagccggaggaggggtgaggcagatgagggtgaggggtcgggggatgaggggtggaggaggcagaggtgagggtgggagggaggtgggggtgaggggtagtggggtgaggggtggaggaggcagaggtggggtgggaggcaggtgggggtgaggggtaggggaggcggatatggggtgggaggcaggttggggggtaaggggtggaggagttgaaggctggaggggtcagtggtgggggaggaggaggtgcggtgggaggcaggtggaagcgtgaggggtggggaggcagaggcggttgggaatgcatcctgtgcctgcggaaattggggaaattccccagaggggtaggggcttggggctgggctcccagatttggccaagacctggctgtagctattctgggtcctgggagagacggaacgtccgggcctggctgagctgtggcctctggggctccctggggcggtatgggaaggggccatgctttgcgtgagaaattatctcaggctgggcaggctgtgcccagccagctggtccccttgccctccaggaggtgtctggtcccctttggtcctctctggccctgtttgaggaccagctagcatttttttttttctccgctgcctcagtcttccttgctccaggaagcctgtgctgcctgctaaactgccttattcgtatttcttttctgtgagattcagacacaatcttctcagggaagcttcatctggccagttagacatagccccagccctggcttggggccaagtttcggaattagtacaaagagaagcaaaggctgcaggtccaggccctggcttgtctacaccgctccagcccctacccccagcaccctcaagtgtcccatctttttttacttttaaggccagggcagtttccaccttccagaccctgaaatgctctctcccaactctttttttaatttatattatgcacaggctttagacatgtcttgcacatgtgagttggatatttttctacatctaaaagagatg

SEQ ID NO: 30469 - DNA, 1074 bp, Artificial sequence
  DNA replication origin
aaggggaggagatagctgtcagtggacttggggaagaatcccccatccatggcagcttccatgggtggcaagtccccagcatccaagggctgcctctgagtgtcacccacccccacctgagaccttagtggctagaagggggaggggtgggggtggagcctgattcgcagcagggtgtgtccagatggtcagtctctggtggctagcctgtcctgacaggggagagttaagctcccgttctccaccgtgccggctggccaggtgggctgagggtgaccgagagaccagaacctgcttgctggagcttagtgctcagagctggggagggaggttccgccgctcctctgctgtcagcgccggcagcccctcccggcttcacttcctcccgcagcccctgctactgagaagctccgggatcccagcagccgccacgccctggcctcagcctgcggggtaagtcggtgggcaatgctggggacgttggagggggccgggtctccaagcctgacagtgaatgatggggtggggaaggcctagtgggctcctggcttctacagcctggagccagggtctgtgtggggctccagcaccctctccctggacctccacaccccttcctctgctgccagggtgggtgagggtcccaggaggtggggtgggggctggacagacaactgttgctgctggggcttgggagtctagggctggaggaatgggccagggtttggttggggacacagatgggctaaacggtatgaaacggaaagagcacccttctgccccagtgtgtgtagaaagggtggtgggtcacatctgcaaactgaggcagccaggcagctccccacctcccatgtttccatgggaaaataccccacccgggtccccagggcctggtcccagcctaccctctccacttccctctgctggtgccgctcctctctgctctctgccccctgccccctgcccccttctccacccttctgtctccttaccactctttgactccttcttctttctgatcctgctcactgggcccatgagggttccccaaccctgaccgaggccccacccttg

SEQ ID NO: 30470 - DNA, 811 bp, Artificial sequence
  DNA replication origin
caagcaagtgaaatttgtcaggaaagagatggagaaaggagaggaggtgaaccagtggaaggtgggagctattgaaggttctagaaagaaagggtatgcagtggggacagctaatcctcagaacaggcctctgagggtgggaggaaggaaccagtcttggtggaggcagcagggtggggacaggaggggccatcactacactggaacggagaggacacaggccacggacatggaggaagcatgggaagtggtttctcagaggtgggggacttggggtgtgaagggactaagggcctatgcagggcagttcctctgagggtccagggagatgctgcctctgttgtaggctgcgctgtgacacagcccttcctaacttattcccctgctgagtccccaggctcagcccaggcctggctggggacagaccctcgataaccaattgaatgggcaaagggtgtgactgactggcatcagagagagggcagccagaggctgggctggtggaagcgctaacagcctcagaggtttcccctggttcctgcctgaaagcaaggtgtgggtggaaaggaaaggagggaaccactgttttaaggaggcaatccctctaagaggagctggcatgtggggatctgcaaagggactatgaggaggtctctgggtcctgccccagactctccaaggctttgtggccaagcagcagagacacacaccccagggcagaggctctagtcaccaggctactcacgagggacacctgcccctgacgggtcctcacacagcgtaggcagcgtctgctcccatgaagcccagt

SEQ ID NO: 30471 - DNA, 1710 bp, Artificial sequence
  DNA replication origin
tatttgccaccagaattcactgggaccccagagccagcagatgtggttggaaagatcctctgctctgtcctctggcctcctgctgcatctgggccatcagttggactggaggagctggacgggcacatagttttcctcagaggcaccatcctcatcctccttgggaggggaagccaggacagggttctcgagagttcctgtaaacagatggcaagcactgtagcttaacccttgagtgtgtccccaggaagcaggcaccagggaaacggggccacagtcatgaaaacacgtcatgccgtggggacagcctcagcgatcctggaggccagcaatccttctccctgcttccctcactccacaagcatttcccaatcccctgccatatcaggggcttccccctgcccctgccacccccaggagcttaaagtgcctggaggtgacagacttgtgtgtcagagatcagaacacctgagacatgctgggggagctcagaggagagaggggacctgtcctgcaggggcggtggcagatttggacatccagaggggaggaagagcacttccgacagagacgaatccagagatgaaccaaggaaagcaaagaacaaggagtactgcagacatgtggatggaggtgtggggagtgagttagacagctttgggccctgacctccattctgagcagtgcggccttccaggtagtgggaggcattgtgtagcgtgggctgcatgtggtttttgtccacattagcaggactgcaatgggtaagagtgcaggctgggcccccctgcagtggtgcagaagtaagaggcagggcagggcagagggatgagtggccgcctgaggggtcaaggacactcagctccaggtgggagagctggtatagcggggggaataggctgagactctcaaggccttccacctgggtgaggagggggtggggtgacatacatgtgacctgctggggcagccccgaggctgttcctgttgggaatgtcacattggaggccccagcaggcagtggggtgtggagtgcttggggcaagatgagggagggacaaggtgactttcagaggtgactttcctggcattgtagtgaagagagggagatgcaaagagaaggtgaagggaaacctatctgtatgtgaggcagtggtcacggcccaggagcctgggaaaccagcaggctgtggggcagaagaggccagaggagcctccctacaacaggggccatgggagactcaggaggctattgtggggggcaacaggcacaagcaagtgaaatttgtcaggaaagagatggagaaaggagaggaggtgaaccagtggaaggtgggagctattgaaggttctagaaagaaagggtatgcagtggggacagctaatcctcagaacaggcctctgagggtgggaggaaggaaccagtcttggtggaggcagcagggtggggacaggaggggccatcactacactggaacggagaggacacaggccacggacatggaggaagcatgggaagtggtttctcagaggtgggggacttggggtgtgaagggactaagggcctatgcagggcagttcctctgagggtccagggagatgctgcctctgttgtaggctgcgctgtgacacagcccttcctaacttattcccctgctgagtccccaggctcagcccaggcctggctggggacagaccctcgataaccaa

SEQ ID NO: 30472 - DNA, 763 bp, Artificial sequence
  DNA replication origin
gggagcctgaggcccagagggctggggatgggcttggggctgatgggaaggcaagagaaggagactctgaggaagggggacaagagagagaggagttgggaagatggcagttgaatgtccaaaggagagaggcatctgtggagggacccaggaagcaaaggagggcccgagactgaacagaacggatttggaggaggcccctgggctccagttcacagcccatccccacccctgcccccagcttcctggtgcctggctgtctgatgaataagcttgtatcacctgccacttgcacctgtatcacacctgtgtgttacacctgtcactcctgtgtgtcactcttgtgtgttgcagatgtgggggcaggtgagcatctgcctttacggcttcattccccacccctggagctgacatcttttggttcctagacttagcttcttgctgaacctggccacatgactgtgtggagggaagcaaggcgggtgaagcaggaggagctggtcatgggggctgcaggggagtccctcaagggggatgttcctcagactgggagatggagagaggggtggacaggaggtggagaggatgactcagggccaggctattggaaggggctgaggggacagaggccacacagctgactgatatgctggatggagaaggtgtgggcagggagggtgaggagggtctaggctttgggcttgggacatgagtagaaggcaaggggctcaagacaagaagtgggtgagaaggcaggaggggg

SEQ ID NO: 30473 - DNA, 1763 bp, Artificial sequence
  DNA replication origin
ccaaagttgcagcccgggaggcgagcgcgcacgggcggccgaggggcgggcggttggcggggacgcggcctcgcggcccagagcggagagtcccggcgggcggcggcggcatgggcacccggcagaccaagggcagcctggcggagagagccagccccggcgccgcgccgggcccccgacgcgaacggccggacttctgggcgtcgctgctgctgcgcgccggggacaaggcggggcgcgcgggcgcggggatgcccccctaccaccggcgagtcggcatggtccaggagctgctgcggatggtgcgccagggccggcgggaggaggcggggacgctgctgcagcacctgcgccaggtgagcgcggggagggggcgcggggggcgcgccgggccagggggcgtgctgggccggggggggcgccccatccctaaccgaggaagccgggggcaccgaggggcaccgcccaggggccccttccgcggggatggagccctgtctggcagcaggtgcctcggcgcttccgctgaatgtggggcctcagggcagggcggaggaaggctggccgggtgaggcccgccgaaggggacctgttggcataatgtccccactgctctcctccgcaggcagagaaggaggctggtctccggggacagtcggtgggcggggaagcagggatgcctgcctgatctgggccagggctcttttcttcctgtctgcccactggcagtcactcccggccgagggtcctcaaggaatgcggttatcagttggacctggcttggcttcccgagagcgagtccaggggcacagccctggggccaatgagattccagtccctaggtccttcactcgcctgggaggcatcctggattgtagttcaaggaggagactgtttcctctcccctgactaacttcagcagatcctcaaccatgagcccctgcggaaagcggtagagacaggggagctggatttggtgccctgtgtgaccacctggccagcagcaacttcaggagactgccaggactctgtccttagcctgtgcctgtcccactggctagggacagatgttgcggaattggccagttccctctgctttggggctgccctgaggctaatgctatcactcacctctctgtggcttgttttcctttgtcagtttctttggtggggagaggagcatggcccatgccatggattttgttgagtataagacaggcaggggagtgcaaagctgctctcctgcatcaccaagcaggttgtcttggcctggctttggtgggtagacaatccaggccccatattcttgctagactgaccccattagaggtggagtctaccgtggatggcagagggaaaatctcaggtgacctttctggggttttccagtcgctgctgaaagaggctgtaggagcaccttcttgggaggagcttccaaaatctaatcagacccacatccctcttgggttctgcagcactcttccccacctttgtatctggtgcgctcttaccctaaagtatgtgtccccaagctgtgcactgcacagggagaggcaagcagagacgaggggacttgggaagatgtgggacttctgcttctgcctctgttttccccaacaacttccagaatgatgcccgagacgctgctggatccccatgtgccttctctgagttcagtcatcaaagaaagatgacattatgcaccactgaactttagcagtgtgtatttctttgtcttttgaaaattggaagctgacatatgg

SEQ ID NO: 30474 - DNA, 1029 bp, Artificial sequence
  DNA replication origin
ctgggccgcgaggccgcgtccccgccaaccgcccgcccctcggccgcccgtgcgcgctcgcctcccgggctgcaactttgggggaactgttgcgcgcgggcgtcgcgggggcgggcgggcgggcggctgtcggcgctccccgcgctcctccctcttggctacccgggcgcgctccccgggcgctcgccgccggcccgcccgccggccccgccccggcccggctcggcccgccccgccccccgcctccgcgccggagctccgcggcgtcgcgcgcctccctcttctcgggctcccgctccttcccgccccgcggctccgggctggggaccaccaccaggcgccccctgcctgcgtcctctcggcagtcgcgcctcctgcgggcggcagtgctgcgcttcccggggccgtggcgcgggggcgaggggaacaggcaggccccatgggccgtcgctctcggtccccaccgggctccccgacgcttccaccaccgcgcgcccggtgcgtcgggcgagatggggaaagtttggagcatgggggtgtgtgtgttggggggctctcttaggcccagagtcgggtttctcaaggtgggttccgctgagcctcagcgcccaaatcgtcggaggcgctggttaaaaacgcaggctctaaggcctccaccgagacctactgaatgataatctcctcggtggggcctgggatccgcctttttagccagcatgttgggtgattcccatgcacgctcctttgagacctggcctgcttgcagggcgctgtagtggtgtggttggtgcgtaaacctggaaactgtgcgagcttatgggttgtgtgcgtgcccttctatggagagggcctgttgcttccatcatgctctcaaagcatctggaccggagaggtgtgaactcctgtgttctcttgttctcactctcacagccctggagaagggtccctggggtagtcctggtacaacaaagcaaacgcacgtctgcgagtaggcccagcggtacaccctgctggcccaccttcctcccc

SEQ ID NO: 30475 - DNA, 1394 bp, Artificial sequence
  DNA replication origin
cggaggcgctggttaaaaacgcaggctctaaggcctccaccgagacctactgaatgataatctcctcggtggggcctgggatccgcctttttagccagcatgttgggtgattcccatgcacgctcctttgagacctggcctgcttgcagggcgctgtagtggtgtggttggtgcgtaaacctggaaactgtgcgagcttatgggttgtgtgcgtgcccttctatggagagggcctgttgcttccatcatgctctcaaagcatctggaccggagaggtgtgaactcctgtgttctcttgttctcactctcacagccctggagaagggtccctggggtagtcctggtacaacaaagcaaacgcacgtctgcgagtaggcccagcggtacaccctgctggcccaccttcctccccgtgcctctgccaggcccagtctgtaagggaccagagccctgggatctcatggtgttgccagggcttgccagagtgaaggcgaaggcaggtgggggagcttctctgttgcagaccacaggccgccctggtcccagcgcagggcagaagcaattgtgcaagctcgcctctgaccccagctctgggtgttgcttgagggtgtaagggcacgtgggctgtaggggcaggaggctggatcccaaatcacagggagctgagccccactacttagtgagcactgagtatcaggcgagtcttcagcttcttgagtcctgattcttcctgtcaggctaggataataacactgccaagaattgggagagtaaactcggtggacactgctaaaggaaaaaattatttaatgacatgagttaaagcatcgtaaggaagactttattcaggaccattaccataggtgtagggacctctgctatgagattttgcagttgcagggagagagagattgagctcaactccaattacagcatgggcaagtgggaattcgttgctaaggagcagggtgggggtcagcggatagaaacttaataagggaaacatcagggctgagggggattctggctaaacaggttgtatggagcacccttgacataagtaactccatcttagaaaaagggtccattttacatttgaaaaagcctcatgccaacaggaaccagatgttcgcctaatcaataaagactacaccccaccagataaagacataaacaggcacactctttgctatcagtcctcaccagaggattctgtagccataaaaagagcaggacttcagcaactggagatgaccgtctggatagaccccatcttgcccacactctgcccacatcaaagactcttccttgcaagacactgaggactgtttggatcaggccaggagactccccttgtccaagtcactctccttggactatattgttaaccgctc

SEQ ID NO: 30476 - DNA, 1063 bp, Artificial sequence
  DNA replication origin
aaagactccttggcctgcaggtggcgctgcagctccagcgccaacctgggctggctggtcctccctcggaggtttcggggtggcggtgcccagcctgcctgtcatgagtgccgcttcacagcgccgccggcgcacctgctcctaggcttgctcggttcaggggtacgggtcagttccgcccccggcttggccactgcagcaaagttgccctagggtccgcgctgccaggacgcaagcggagtcagatggctgggtcagagcggcctgtcagcccggctggaagggcctgcccgacgccgctgcccgcccagctcctactcggcctgcgcctggagccagggaccagctctgggcattctgctgccttaggatggggccaagcagccgctccccgccgtgtgccgcagccgctgcgcgcatctgcccagggtccgtgcagctggcgacccgggcgggtcggggaacgcctggtgccaccaggattgctcgcctctagtccgtcctgacccttcagcccgcgagcaccagtgagattgaagaaaagtgacggccaggcgcggtggctcacacctgtaatcccagcactttgggaggttgaggcgggcagatcacttgaggtcaggagtttgaggccagcctggccaacatggtgaaaccctctctactaaaaatacaaaaattagttgggcgtggtggcgcgtgcctgtagtcccagctactccagaggctgagacaggagaatctcttgaacccgggaggtgaacgttgcagtgagctgatatcgtgccaccaaactccagcctgggcgacagagcaagactccgtctcaaaaaaagaaagaaaagaaggaaggagagaacgaagcaaagagaaggaaagaaggaaggaagaaaggaagaaagaaaggaaggaagggtgacaaaggagaatctagagagcactcaaatactaattcttgaggacaattaagacagatagcattatgaaaaacagattttgtcactgaagcctcagggcttcagcctagatcctgcgctgctcacccacagaaagccaatcactg

SEQ ID NO: 30477 - DNA, 1402 bp, Artificial sequence
  DNA replication origin
tcgccagctgcacggaccctgggcagatgcgcgcagcggctgcggcacacggcggggagcggctgcttggccccatcctaaggcagcagaatgcccagagctggtccctggctccaggcgcaggccgagtaggagctgggcgggcagcggcgtcgggcaggcccttccagccgggctgacaggccgctctgacccagccatctgactccgcttgcgtcctggcagcgcggaccctagggcaactttgctgcagtggccaagccgggggcggaactgacccgtacccctgaaccgagcaagcctaggagcaggtgcgccggcggcgctgtgaagcggcactcatgacaggcaggctgggcaccgccaccccgaaacctccgagggaggaccagccagcccaggttggcgctggagctgcagcgccacctgcaggccaaggagtctttttctgggaggctggagctgcagcgccacctgcaggccaaggagtctttttctgggaggctggagctgcagcgccacctgcaggccaaggagtctttttctgggaggctggagctgcagatgcagtgaagtcacaggttccgtgatgtcacaggtgggcaggcgcactggtctgtaacggattggcttggccttacccacgaggctttgcggtggctgttggcttggcggtggtcgcttggcttggcgtggcagtgatcgcttggcttggcatttctggcttggcggtcctcctttcgcagattggaaaccgcgggctatcctgctgggaggttgtggccgaggcagtagctcgctactgatggcctcctggggtggagaaaagcggggaggggctgaggggtctccgaagccggcagtctacgccacgaggaagacccctagcgtcgggagccagggggaccagtggtacttgggctacccgggggaccagtggtcctcgggcttcccctacagctggtggaaaaacagcgtcggcagcgagagcaagcacggtgagggcgccttagaccagccccagcacgacgtccgcctggaagatcttggcgagctccacagagctgcccggtcgggcgacgtccctggggtggagcacatcttagctcctggagacactggcgtggacaagagggataggaagaagaggtaatggccaggcgaaggatgcgccgtcctgtcggggacactggctttctggtgcccgcaggccccacggcacccgggatggggaaacgtcagaggggtcaggggcccaggcctcttagtgagacgggatcaaatataaaggattattactattgcaaaagtgttggtctactttacaggagttttctttaaaaatattgcacttcccaactgtgtttatccattttctcaatttattcatcaaacataagct

SEQ ID NO: 30478 - DNA, 804 bp, Artificial sequence
  DNA replication origin
cccacctgactccaggctgtttcctggcctccatgaggccacccgccctatggtgtggtggatgtcagatcctcaccgtagggaggaaattagggtctgtgcccagggctggggagagctgcctggatttctctttgatgggggtgttggggtgggaatcaccatacacctgactggctgagtgtatttcagggatgggacaggcttctcagcacagcatggcaggtcaggcctgggagggccccccagacctccttgtctctaacagcgggtcatggtgagggaggcctctctgtgcccaaggtgaccttgccatgccggtgctctccagctgggtatctgtcccctgcagtggtgggcttcctctaagtggatgttaaaggcccatccagttcatggagagctagcaggtcaccaggtttaaggtgcagaggccctgctctctgtcaccctggctgagcccagtgtgcgggttcctgagggctgggactcccggggccccatgggaaagtgtagcctgcaggcccatacctccccctgtgaatcacgcctggcgggacaagaaagcccaaaacaccccaaacaatgagtttccagtaaaatatgacagacatgatgaggtggaggagaggagggacctggctgggagttggcgctagcctgtgggtgatgaaagccaaggggaatggaaagtgccaggcccgccccctacccatgagtataaagcactcgcatccctttccaatttacctgagcaccttctcttcactcagccaactgctcgctcactcacctccctcctcg

SEQ ID NO: 30479 - DNA, 838 bp, Artificial sequence
  DNA replication origin
agcagggactcagtgccgcctgtctggctccatggccagtgctgtttgtatggtgcacacacttctggagatcccgggggctcaaggcagcctccggaactggaattagatccaagaggggaaagagagtcataggatttttagaaccagaagggactctgcaatcacccagtccagcctggtcaccactgaggggaaacaggcccagaggtgggaggtggggagcctcaggccacacagcaagcagagtgaagacacgaactctgcccctgcccagagtgggacatgtaggatccccgcaactgctccccaagacagcccaggatggcatcactgaggtctctttcagccaaggctgtcactgtggggcagggagttcttctgaagggctgactcactgcctggggacgcagttgccacaaagccacctgtgccaaggccccactggccccaagtgctccaggaacgggagcctgattcccggccacctagcctgagtcaccaccgactcgcatttgtgtgtttttctctcagctccacactctcaaagctgggtgggaactctgagccagcacacagcggagttgatcctgggctgaataatccagagtgaggagttggacgggactgggagtgatgaaatccagaggggaacctggagtcagcagttaggagggccccgccttccccaggtgcatataaaggtctctggggttggaggcagccacagcatgctcttagccttcctgagcaccttcccttttttcagccaactgctcgctcgctcacctccctccttggcacgatgagcacctgcagccaccagttcacctcctcc

SEQ ID NO: 30480 - DNA, 766 bp, Artificial sequence
  DNA replication origin
gtgaatctccacctgtctctggttacccctctgtcccctctgatcaagaaaatgatataaatttgagatgcacagagagagggctcaggatgacagaacaggcttaggcaaggagaacaggcaggcaggttcacatctcagcttccagtgcctggtgtcttgggaagcccacttatcctccctggatcccagctccctcacctgaggactggtggcaggaataacgcccccgtcatccctgctcacagaaccgtacaacacacaccaggctctccatgcgtgcctgagtgggcccatgaccggtgctctcccccagctcagctggatgaatggagctgccaggcccagcgtgggatctgtggacacaggagagagaactgctgggaacggatccccagccagtcctgtttctacagggtaggggggaactctgaggcccacggcggggtcaggggtcacacctggctgcagtggcaggacggggctccctcccaccggcctgcaggtagggtgcctgtgattaggagagggcggtagaggagtggaggagctaggtgtggggctgtggtgttcttcagctgggagtgtgggggacgcagggccccgcgtagcggttcgggagggtgccagtgtgtagaggtgagtgtgaggagcaggtggctggagggggaggatgaggaggatgaggggcagggctggcccttggggaagggccggtggggtgcttcgcgcatgtttctttgtggctagtggtgtgtcatcccct

SEQ ID NO: 30481 - DNA, 824 bp, Artificial sequence
  DNA replication origin
ggtgcgtggagaccccgttgttgactggcaggtcagaggtcagcttagaccagcataaagagtaagtctggggagagtttggaggggggtgctcgcatctcccaagggctggagattttcagggggtggtccaggctgcgctagacccggggtggaggcggtgtatcaggtgtggtcctaggtcgccactgcttgccccgtgagtaactctgtgacctcgggaagttaggcagtcacttcccctgactgagccttgcttttccatccgtaaatggatgggaagatctcaggtgtgggagcccgaatcctcagagatgactcactcaatcagttgctccttcctgtcctgtgggctgtgccctccccctagatggggcaggaggtgggcaagggctgggataagcacaaagggagggtgggtgggggaggcaggctgggtgattggggccccgactcctgtgtgagtctcaggaaatccccaagaggggctcccattgcctctgccctgggaatgtgagcgggagggtggtgttttcagggaaggctgcggaccccaggcaggtatgggagaaagggtggggcctctctcaaggatgtttcctcacatggtcagctgttgctcaggatgcggacagggcagagtggggggcactgcagatggggtggctgtgcccagggagcagtgccactctccctggcggtctggatcctctttggttccccactagggacaggggtggtgtgagggagggtagaaactgcctcctaggaaaatgagaaggaacagtcctgctccagccactcccggcaccctctatgagctg

SEQ ID NO: 30482 - DNA, 728 bp, Artificial sequence
  DNA replication origin
tacagccgcttgctagaggttgaggacgcccggtgagtgtgcacccaggtacctgctggggcgggctgggggcccacttcacccagggagaagttggtgtctgagcaccagcaaagttcaggaggtgtgaatgtgggaacctgtggggtttgcaggaggtgaaactgacgatgcaggctggagtctgactgaggagccttgactgccaagttaaagcgtctggactagatcacgtaggcaatggggagccatggagggatttggagcagaagaggggaatgaacatcaagatattttagaacattcactctggctacagagggagaaatggatcagaggggtcagggtggggccagagagacgcgtcagggggctagagcagggagtctggccagagaagtcttgcggggtggaggctgggtgggggggcaggggaaggaaggtggtgcacgcagaagagaggttatagctcaaaacagcaggactggatgcctggatctcagggtaagcgtggctcacggtcaggactcagtaagcgttgggtgaacacatatgaaggagtgggcattgatggccctgggtttctggttccgatgactgtgtgagtccatcagccacagggtgaagagcatggtgggtggtggtcgggtttgcagttgggaagggtgatcaggccttcagctgagtgtgtcctggagtctccatgcttagtcacacgttgcagcttt

SEQ ID NO: 30483 - DNA, 1337 bp, Artificial sequence
  DNA replication origin
ggctttgttgatgatgaccctttgttcctccatggcggctccgtctgaggagaagttttggaggctgttcattctcctgcttcccctgctgccgccccagaggcaaggagagcagcctcccagtggcctgctggttgtaagagtcaggtgtgagaggttgcatcacgtgcttctctggactcgtggtctgcaaggacgtgtgacaagtgtggctgtaggttgatgagctgtgtgtggcctggtaacgggcagtggatgagccagggggagcagcaggtggcccagccccagcgatgaacatgggggaactgggtccgttgtaggcaggaaggagacatcagcagcagcagccccggggcatggtggggggttgcaggggggccagagacaagccagagatgcctggatgatccattccgcagaaataacaatctcgaatccagggctgggcctggctgtgacttggtctggccaggggtcgtgagcagcaggtgtgctgattgtagttaagaagccatcggtgtcagaccagagtcctcgggctctgcacctgagtctgctgcgagaggaaagtgataggggctcgggcatgtcaaggaggtaggtgggcacgtgaagatggggctccaggaaggggacatgaacacagcagttcttggggctttctccttcaggggcaggggcaggaggaccgccacctggcttcaccatgaagggcccaagagcatggcatggagggagaggcagatctagagagaacaccggctggtctgcggagggaggcggaggaacgggttgaagagggaagaattcctgacacaaactctgaaatgacaaaggaaaagaatgacaaatctgattacactaacatgagcaacttccaaagaccaatcacaagaaacaaaacaatcacaaagtccccaccaacatggctgaaagtaaaacaattagctgagaagaaatatttgtcacctacagaccatgtcacagaggattttattttaaagcaccctacaaatcactaagaaaaaagccccaaagaaatagcaatctggaaaaggttaaaaagaaatagcaatctggaaaaggatacaaagagagaatgtgcagaagaagtgccagcagctgcaaaacccacgttccacaaaatcctggatcaaacaggcaggagacagcatgacaaggtgccactctctgcccatcgggtcggcacggatttaaaaacaaggacccggtattgccaaggatgtggggaaagagccctgtgggtgagggcgtcagttggacaatggctgtcaacttctagaataatcatgtgtgcttccctttgatccaag

SEQ ID NO: 30484 - DNA, 1572 bp, Artificial sequence
  DNA replication origin
ctccctggccctcgctgggtcacagggacgctgagctggggcagcagtggacacagagcatgagcgtgttgacatctggaaattcaccagtcgtctctgggttgtgtggtgagtcctctgtccccccacccacaagtctcacctcagggatgggttttgtttttagaaaggtctctctgaggtagggcaggcttccctggctcaggacaatctcctctccagggtaagaactcctctctgcctctcctgcaagtccagcctgtggtcagggttagggcagagcctcaaggcccatctagggagctcgagagagcgggtgggacagagagggggctgggtcaggcccggggctttcagcactgagctctccacatcagcaggagacgagggggcagcctaagggtctggccctgtccccttggggcctgccctggtgagatctgagggtggtggccacagggcaaggggacacctggccaggcctgtgggctgttgtgtagcaggtctccaagggctcagggggcccactggggcatcctatagggaggggcatggggacagcaagggctgtgaccctgggaggctgggggagaagaagtgtagggcctgtcctgggcatcccacagtgaggcctggggggcaacagagcctgaagctgaaggccccaggagtggtggtgctgggaagggacctgggcctggtaaggggagcccagcctggagccggcccctcaggactcacaggatggagagagggaggagcctgggattggggggcggtgagccggtgagacctgccacttctgggatgcacctgaaccaagctggcccagggtagagctgatagtctggggaggaaaacagatggggtggtcagggaacagcggctcacctgggacccctcagtgggggtgactcagtcagtccccaagctctacgtggccctccagagactctgcttcctgctggctcagtcagcaccacagaaggtggacgggaggctgagtcggggcaggcaggacagtagggggaggacagccaggcatcccatgtcctggtttttgcagtggctgggaggaggctgagggttgaaggctgactgccctgagagccagctgaggctgtaggcagggtggtggggccagccccactgcctgcagggcccttggtcacccttgtcaccccaggcttctccccagcagcgctgagcagcccagtaagagacctggggggtctcatacctaggctctgacaggaagagggtcctggaagggccagggtggccggagagagggtcacagtctctgtggcgggcaggatgggggaagatgaggaataggcagggtctgcagccgggatgcagggagaggcaggtgaacgctgggaggtcacaccctgcaaggcctatggggagtgtcaggtgggacaggtcccaggtgcgtcctcagggcactaggcagctctcaggccaggctccctggactctggtgggtgatgtggtcactcacgaggcactgctgtcagtcagggctcagccacccaccctgggtggcacccatctcgtctcaggact

SEQ ID NO: 30485 - DNA, 957 bp, Artificial sequence
  DNA replication origin
caggctcggtgctggacagaagtgagagccaagaattgcctgcccacccctgccccggcacaggttctggtcagcaactggcggacactgacacctgtctgggggcgttctacgctggtgattgcccttagctcctgggtcgggggagagtgcggctgcccacaccgtcacccctaccctagtgcagggccaggcctggcccacgccctccactctcgcctctgcagatcacgcgatggaagccggcagccctgtgagcacatcccccgagccagtggagacctgcagcttctgcttccctgagtgcagggcgcccacgcaggagagcgcagtcacgcctgggacccccgaccccacttgtgctggaaggtgggggtgccacaccaggaccacagtcctgcagccttgcccacacatcccagacagtggccttggcattgtgtgtgtgcctgcccaggaggggggcccaggtgcataaatgggggtcagggagggaaaggaggagggagagagatggagaggaggggagagagaaagagaggtggggagaggggagagagatatgaggagagagagacagaggaggcagagagggagagaaacagaggagacagagagggagagagagacagagggagagagagacagaggggaagagaggcagagagggaaagaggcagagaaggaaagagacaggcagagaaggagagaggcagagagggagagaggcagagagggagagaggcagagagacagagagggagagagggacagagagagatagagcaggaggtcggggcactctgagtcccagttcccagtgcagctgtaggtcgtcatcacctaaccacacgtgcaataaagtcctcgtgcctgctgctcacagcccccgagagcccctcctcctggagaataaaacctttggcagctgcccttcctcactgcattgtggttggg

SEQ ID NO: 30486 - DNA, 1770 bp, Artificial sequence
  DNA replication origin
gtagtcagtgacaccaccactcaggatccaggagagaaacattttcaccaaaccctgctcaacacactgactccctcatttcagtgaggaggagagtgaggttcagagatgttaagtgaacttgctccaggtcacacagccagtcaggacagtgttgggactggagcccagctcgtctgatcctgagtccagtgacctgtcctcctgccacacgggtttcctacagccggggaaaccaaagcatagggctgggagccccattcgagggctctgactctcagaaacccatcatatcccctctgaggcccttggctggcatgaatcccagccaggtaagagaagaggaggtgttcaggcccctgagcctgggagcggctgctgggtgccagctttctccagcatcggtggagggacagccgccagggggcgtctgcttaggaaaatcacagcgggttgccggcagcatgggcatgcggggcgcatggagcctgtgggctgtgtccgggtgtgggcgtgtgcgcagggggtgtgtgtgtatggggtgtgcctgtggggtgtgtgaatgtctgtgtggggtgcctgtggggtgtgtgtgtgtgggggggggagtgtgcctgtggagtatgtgagtgtgtgtggggtgcccgtggggtgtgtgagtgtgtggggggtgcctgtggggtgtgtggagtgtgtgtttggggggtgtgcctgtggggtgtatgagtatgtgtggggtgtgcctgtggggtgtgtgagtgtgtgtgtggtgcctgtggggggtgtggggtgtgtgagtgtttgggggctgtgcctatggggtgtgtttgtgtggggggctgcctgtggggtgtgtggggtgtgtgtttggggggtgtgcctgtggagtatgtgagtgtgtgtggggtgcctgtggggtgtgtggggtgtgtgtttggggggtgtgcctgtggagtatgtgagtgtgtggggggtgcctgtggggtgtgtggggtgtgtgtgtttggggggtgtgcctgtggggtgtgtgagtgtgtggagagtgtgcctgtggggcgtgtggggtgtgcatgtagggtgtgtgtgagtgtgtgtgagaatcagagtgtgtgagtgtggtgcatgtgtgaatgtgtgtgggggtgtgtgtgtgtgtgtgtgagtgtgcatatacctgagctctttcggctagaatgggaggctttctgatgaggtgatatttgagatatctgactgaagcagtggggggcagggggatgaccgggggcgttggggaagagcattctgagcagagggaacagcagctgcaaaggccgcaagcaggccctgcctgatgtgtttggggaacctaggctggggtggagagagccaggggggaggacagagaggcagtagaggcagggcaggcagggcctccaggccaacaaaggctggtgagctttattctgagcaatccctgtgcattccaacagagttaacccataaacacttcccagagactcctggagcttagaggaaggacagatggcttcaggcttggggcagagtggaggagagcagccaagacaggatgtagtgtgattgggctgggaggcaggagatgacattgagagagtgcctctgagcagggaggttccctgaagacctttctgcagctgggcacccgcccctgggcacctgtccctggatacccttccctgacatgttgaccatgttgaccaaagtgagattgggcttcgccctcctggcagctccatcaccatggccagt

SEQ ID NO: 30487 - DNA, 1156 bp, Artificial sequence
  DNA replication origin
gtcaggtgtgggaggttgcatcacgtgcttctctggactcgtggtctgcaaggaggtgtgacaagtgtggctgtaggtcgatgagctgtgtgcggcttggtaacgggcagtggatgagccagggggagcagcaggtggcccagccccagggatgaacatgggggaactgggtccgatgtaggcaggaaggagacatcagcagcagcagcccaggggcgtggtggaggggtgcgggggggccagagacaagccagagatgcctggatgatccattttgcagaaataacaatctcgaatccagggctgggcctggctgtggcttggcctggccaagggtggtgagcagcaggtgtgctgattgtagttaagaagccatcggtgtcagaccagagtccccgggctctgcacctgaggctgctgcgagaggaaagcgataggggctcaggcatgctgaggaggtaggtgggcacgtgaaggtgggcctccaggaaggggacatgaatacagcaggtcttggagctttctccttcaggggcaggggcaggaggacggccacctggcttcaccacgaagggcccgagagcatggcatggagggagaggcagatctagagagaacaccggccagtctgcggagggaggtggaggaatgggttgaagagggaagaattcctgacacaaactctgaaatgacaaaggaaaagaatgacaaatccgattacacaaacatgagcaacttccaaagaccaatcacaaaaaacaaaacaatcacaaagtccccaccaacatggctgaaaataaaacaattagctgagaagaaatatttgtcacctacagaccatggcagacagaagattttattttaaagcaccctacaaatcactaagaaaaaagccccaaagaaatagcaatctggaaaaggacacaaaaagggaacgtgcagaagaagtgccagcagctgccaaacccacggtccacaaaatcctggatcaaacaggcaggagacagcatgacaaggtgccactctctgcccatcgggtcggcacagatttaaaaacaaggacctggtattgccaaggatgtggggaaagagccctgtgggtgagggtgtcaattggacaatggctgtcaacttctagaataatcatgtgtgcttc

SEQ ID NO: 30488 - DNA, 750 bp, Artificial sequence
  DNA replication origin
gagttctgtccacagcaatcctgtcgaacctgtctggccgggtacagagcttcagggcccatatccacgctcaggggcaggtgtcctcaggcgaggaccatcaggcagctttccccctccagggcccctccctagacagggctcacaccagacttgcccagggccacagcccaggacagagtgtttggcctgtctaaggcccaatatagattccagaattcattcatggttgctgaacattccagttcagctggggacatgggacgggcaggaggggtctgctgcctaatctgatggatcttccatcctggtggggcagggggcagatgagaaccaagtgggcacacagggagatgggaactcaaggcagggggatggtggcagctccatgggcagctctgagggccaaggacagaggaggttgttttgggggagtggggaaggtggcttggagggggcggactacaaagactagcttgggttggggcatggtgagtgcaaaggtcccgaggcaggaaagaatgaggattttgaggtcctgaacagaggctggcagtggggagaaaggacatggcagcgggggtggggagcaggcctcagggccaggaagccatgggggcaaccaagtgtggttctgggggcatggaggagccaagaggagagggtgaggtggaaggtggccagactcgatttgtgtttttagcagactctgcagtcaggacttgggatctggaccacaggaagggagag

SEQ ID NO: 30489 - DNA, 1674 bp, Artificial sequence
  DNA replication origin
ggcggcggcggcggcggcgcaggcctggccggcctggcgctcccggcgggctaggggctcagcgcggccgcgccgcatccctcgccggccccgccgcaggcccggcccggcctccttcccggcgggcggttcgctgcacgcgccgaggctcctgagccgcccgggcctcacagcgcgcgcgacgcccagctcccgcccgcaccgccgccgcccggccgccgcgggcccatggacgcggcctcgggcccgctgcttcccgctgcggcccgcctctcaggctccggtcgccgccgtcccggctcgtccgcgccgccgcagctgccctcggcgccccgcggccgctgcaaatgggaccggagcgcctcacgcactacgggggcgggcgggcgggcgggcgggcgggcggccgggcgcggggaggtgccggggcgtacggggcggggccgcgcccgacgcgatcggcagccccaccggccaatggggttggcgcgctctcgctaacaaaggaacctctgggccaatggcagtcgggggcgggaccgagggccgccgagcgcaaggtaagttgtgcaggccgggaaggtgggggcgccggcatgggacgttcaggtttggtggactggcgccgaggccggccgggctgacagctgcagggcccgggcgggggatgcgggggaaggcggagccgacctcaggctgcctctctgcaaccccctcgctcccaggctcgccttcccgcgcccacgctgtacacccaacggaggcatcttccccaagcccagctcggagaggattagtttagcacctactgtgtaccaggccccctcgtaggagtcagttagcgtcgggaagggctggatactccaagggctcgctcattaaaggttcgcaacctctcctttctcatccccattttacataggaggagactgaggagcagagaagtaacagcgggtagtatttcaagggatgactaagagaagatgtcagcggacttgaagagctgtcagctccattaggggagatgagcgaaggctgactctctgccaggtgctgagctaggcattctttcccccatgatgtgcttgaggaaatgaagggtcagacacctggagtaatttgtgtaggatcactctgctaggaaggggccgagctgtcactcccgtcctccattgtccagcctcctggccaaaagacaacctggaaaaggctgtcaaaggctcaggcagaaggttgcaggagcccagagaggggagaaatgcgctctttagaaaaattcgggtggcttcaaggaggaggggaagtttaagtggacagtgagagggttgagtgtggctggaagtggagataggggaagaaggagcaagagggattggaagagggctctatcacccaggccttgtattccaagcccaggcgtgcacatgtcatcccactggcagctgggagtcatggtgagtctttaaacaggggggtgagctaacccagccttcacggaggaggtgacattggagcatgtggtagtggcagccacagcagctgtcgctcagggaatggaggaggttttaggaggagaagtagcaaatgcttccagagctgtgtacttttccacggatcatctggtaaatatcccagggaggtggatttcaacttagtgtaagaaaatgcttttcc

SEQ ID NO: 30490 - DNA, 2071 bp, Artificial sequence
  DNA replication origin
aaccccattggccggtggggctgccgatcgcgtcgggcgcggccccgccccgtacgccccggcacctccccgcgcccggccgcccgcccgcccgcccgcccgcccgcccccgtagtgcgtgaggcgctccggtcccatttgcagcggccgcggggcgccgagggcagctgcggcggcgcggacgagccgggacggcggcgaccggagcctgagaggcgggccgcagcgggaagcagcgggcccgaggccgcgtccatgggcccgcggcggccgggcggcggcggtgcgggcgggagctgggcgtcgcgcgcgctgtgaggcccgggcggctcaggagcctcggcgcgtgcagcgaaccgcccgccgggaaggaggccgggccgggcctgcggcggggccggcgagggatgcggcgcggccgcgctgagcccctagcccgccgggagcgccaggccggccaggcctgcgccgccgccgccgccgccgtcgccgccgcgccgaccatgtcggcagccaaggagaacccgtgcaggaaattccaggccaacatcttcaacaagagcaagtgtcagaactgcttcaagccccgcgagtcgcatctgctcaacgacgaggacctgacgcaggtgagcgactggggccggcccggacacctccgttctgggagccgcgggtcggcggccggggcgccgccaagggctgcagggaaaataaaaatggagcagggaaatgcgcgagtcctggggcatggggacggggacgggaagtgcattgacagagctgggacaaagggaaaatcctcgagtatgccgaaaaataacatcctttcccgttcccattgcccggctgtgtgattcatgctttttgggtgactcaaaagtgcctggtttcgcttagtaggaacaaagcgcttagggattgcatgccgcttgacgggacccccctgagattctggcttgggactggacttggatttgtccagccagagtggcccaggggtcggattgttggggaggactgtgggcttccgtctagtgggacgcagcctgccccgattctgaatcatcgtcactgtcaagcactggagagaggtgaaggggtgtccaaatctggcgaggagggtcttgttcttgaacttagtttggcaggccgtagtttagcggggagctgggaccagttccctggtcactggccgaggggtgaggagacctgtgggtcctcgggaaagttgatttctgtctcccagccttaactgtcaaacagggctttgaactagttatgactcccaaacgtgcattagagtcatagccattaaacacagagttctggggcccccgccctggagtgactggggagatggggaatttgtattgatgaaaggctccaagaggcttggctgcagcccccatggcccttgggaacccctgcagtgattgctgtttgaactcctagtgttccaggattccgagccttgtgtgcacctccttgggatgtgcctcggtaccctccccacggccatcatctccatcctcttcagagctttctctcagcctcctgaatgaagccaggggaagtcccttcacattccagtccagtgtgacctagttgtagccactcctgtcgcagaagaaccccttagactgaaaacgagtgaacgggcctggttgtttttaatgccacttcagtgcacccagggtttgacttgtttacatggccgactggagtagggtggtggggcaggggttacggcctggggcacggggcctttctctgaggtcaggtttccaactgccaggaaaagattcctttcatctaaaccccaaaagcttaacgaaacactcaaggctgcaaagtcatagatggttaagataccaagggttttaaggacggtcagcttgggacggatagaactcatttacctcggagggtgttttggagtgtaaaggagaacttgattccttcttctcatctggatgcttttttggatgaaacagtttatgcgatgaggagttgttaggagactttgcttcaggtcttggctgtcacttccagctgtgtgaccttgaacaaa

SEQ ID NO: 30491 - DNA, 1518 bp, Artificial sequence
  DNA replication origin
cccaggactcccacagcctcagaggcaggacgggccagccctgccttgctcagggccaagaactacattaggctgcacctgggcacagccaccgtacctgccaggtgaggcctgggccctgtgcacccctggactggacagtggtgacagaatgagggaaaactagcactttctagaagggcttaccttttaataagcaggtaacgtgatcagatctatgttttgttttttttttttttgagatggagtttcactcttgttacccaggctggagtgcaatggcgcgatctcggctcaccacaacctctgcctgctgggttcaagcgattctcctgcctcagcctcccaagtagctgggattaccggcatgcgctaccatgcctggctaattttgtatttttagtagaaacggggtttctccatgttggccaggctggtctcaaactcctgacctcaggtgatccgcctgcctcccaaagtgctgggattacaggcgtgagctactgtgcccagcctgaatctatgttttaaaagcccaatccagctgctggcatgacagatggatcagtatgaaagactgggacctcctaagggtgagggaaacaggaggcccaggtggccacgagttcacaccatgcagtagccagaggcttggagaggaaggcagaaggggagaaggacactgggttacctgccaccttgagcaggcaagcggcagccagcaacgggacatgagctgcgcaggtcgtgctcatggtgctgctacctgccctgcagtaagtggagtgaagccaggtctgcctgaggaatccatgtctagtccccatctgctagaagcagagattcctggggaggcctcgtctgcagtagggcagggacagggacattgctgatggcaatttgtcaaggaggctgggagtgtttgaggcaaaggtttgtagactctagagataggccccacagactgccagctggtccgaggctgactgaggggcccctaatctcacccaggccctcagaaggcagttgcaagcccacctgaggacagtgagggcccaaggaggagctccagggagcacatgtgtttcaattagggccaaaaggaaaggagtctttagagagagaaccaaggaaaagaggaaatggttgccgtcaccacctggagcaagggtcacctgtccaggcagcaatcgagtgagaggcaaagtgcttcacagcaacaggatctgcaggtgtccactgtaagagcacgctaacatctggatgaaaacgacacagggcagatcttgtgacgtcactgaactaagagctcctggccatggagagtgtcaggatgacacatagggcagggcatgcatggaggcccccagcctggccctgacagccgccaaagtcacagccacaccagaaccggccgcactccctaggagaaacctccccacaaggctcctctagtgccaaaggcgggaagcaccctgcaacttccccaccccaggacttcaagatggcgatgagagc

SEQ ID NO: 30492 - DNA, 1788 bp, Artificial sequence
  DNA replication origin
ccccctcccccactcagaaccagtttgggaagggatgtggggtaaaggcagagtattcctgtcctccctgcacttaggaagctgggattaggatagaaaaaggatgtggtgctcacaggggctgggttgtggctcagcattgccagcttctgcctggcaggccacaccagagccgcccctgacaggctatgtccatcctcctgccccacagctcgttgccagaggaaaaaaacaagagcagctgctcttttgagacctgcccgaggcctactgagaagcaagaggcagagctgggggagccggaccctgagcagaagaggagccgcgcacgggagcggaggcgagagggccgctccaagacctttgactgggctgagttccgtcccatccagcaggccctggctcaggagcgggtgggcggcgtggggcctgctgacacccacgagcccctgcgccctgaggcggagcctggggagctggagcgggagcgtgcacggaggcgggaggagcgccgcaagcgcttcgggatgctcgacgccacagacgggccaggcactgaggatgcagccctgcgcatggaggtggaccggagcccagggctgcctatgagcgacctcaaaacgcataacgtccacgtggagattgagcagcggtggcatcaggtggagaccacacctctccgggaagagaagcaggtgcccatcgcccccgtccacctgtcttctgaagatgggggtgaccggctctccacacacgagctgacctctctgctcgagaaggaggtaatagcctgggaccagatccccaccctgctcccagcagcctttccagagcatcagctgtgcccagctgtggcctgaggggttcatctagacagtcctacccgcgagggacttgcagacccctaggggagacagacgcatagatgagtcctcatagttgaggcagacctgagagctgtgggagcgtgccagtgcatgcagggcagggaaaggggccttccaggcacagaggaattcttccgatggtgggggcccctgccattgagaggcaagcggcgttgcagggcctagatggtttcctcgttctgactcccgatggcaggaggggcgcgagcagggcaaggcttttgcattacgcagccctggcttggacaggtcaaagctgtaggcagagaccagccccaggtgctcttacagtggcttggggacggccgatcagatctgaagccaggggcatccagcaggagatgacagctgggtcctaggtcatgaggatatgaagcagaagacagtggtgaggcagggtaggctgtggatgaaggctgccctgtgactgtcactcctccacgaggccttcagtgcacctaggtacatagatgaacaagctggcccccgaactataaaataagatgttctttcatggaaatgtatgcagaaatccagtctgcagaacttcagtggtagattgacatgtctgggcagggagtctcgtagctggggaggtgtagcgttacagtttttgtagaactccctgtttcactctccatttagggacagttttcaacactgtgtttcaaatgtgttctcttacgtaagtagcttgttaaagatttgccacttgggtatgcctcaagcttctcatcttttttgtattttattaactgtatgaggctgagttaccaccagcactaatacttgtactttttcattttcctcatccattaacaagtaacaaaggcaagatgaaataaaataacagttgaaactcacattacttcaggctacc

SEQ ID NO: 30493 - DNA, 1773 bp, Artificial sequence
  DNA replication origin
ctggcggtctagggctgggggcgcgcagactccgctgcggcggcgtggctgtgggtcccggattagcggcggcatgggacggttgagttggcaggtggcggccgcggcggctgtgggcctggctctgactctggaggcgctgccttgggtgctgcgctggctgcggtccaggcggcggcggccgcggcgcgaggcgctgttcttcccgtctcaggtgacctgtaccgaggccctgctgcgggctccgggcgcggagctggccgagctccccgagggctgcccgtgcggcctgccccacggcgagagcgcgctaagccgcctgctgcgtgccctgctggccgcccgcgccagcctggatctctgcctgttcgccttctccagcccgcagctgggccgcgccgtgcagttgctgcaccagcgtggggtgcgagtgcgggtcgtcaccgactgcgactacatggccctcaacggctcgcaaatcggtctgctgcgcaaggcaggtaggcccggcggggtccaagcggagaaggccggcttggcccacgcggggtcctaggcgcaaaggtggacacttaggggagggggtctggggacgggctgaggcctcatttactttcctcgtggccttgtggggtcggggtggtgtaacgcggagaaagcagagcccccacagaaggtctagccggctgcgtgggcataagcgagccggaccctcggtgcctccgcggtgggggcggttctctcagtgaactgtcccggcatgctggaagcaggtgggcctgcgtgtgccgggttagaggcggagcagattcccctagcaactcctcgggcgccgccggcggagttttcgtgactgctgcagcccgggcccgccctcctacgctgccggagatccccggacggcctctggtaacctggatcctggtggcaggggagctggacgccagggttgtgcttggacttccagactgaagggctctggggagaggcggccacctgctgcccagtgaatctcaggccactgggctctgggagacctgaacatgttctagaaagcagcgccaggacattcggttgttttcccagctgcaaaaggaggggaacacatatttctggcgggggcgcctctctcatggggtggggacagaagggaccaggaaatgtgaataattgggatccttgtcccacctgaggattctcagtccatcctggcccagttcggcggcccagcctgctgttgccttttgtgtatctgcactcacagactcttgggcctgtctctgtctccatcactcaggcacccagaaagtcacgcctgcacgtgcaacggttggatctgataatactggtggtcgcagtgaccgagagatgtgtggagccctgggaattgtccaggctgggcagtggtcaccgccgcgctgttccttctgcacagccatagcctcttgttgacttgggcctcagagcagcctctccagagtcagccagggtccctccctgctctgggtggtgtggggcatgttgcacgccatgtgggagcagagtggggcacgtggttttcatattgaggatgtctccttctctttggggcagccacaagagctgtcctcccatgtgttggtcattttaacgggaggtttggggacctccaggcatgcacagtacagttctgtttgagttgcttttacagtcgtagaagctgaggttggtgaagacccttcaagggcccctagaccaaggtcccatcggatcccctctgggatggcctcccag

SEQ ID NO: 30494 - DNA, 1352 bp, Artificial sequence
  DNA replication origin
ctcccacctcagcctcccgagtagctgggatcacaggcacgtcagcgcactcagctaatttttgtattttttggtagagacagtgtttcaccatgttggccaagctggtttcgaattcccgaactcaagctgtcctcctgcctcagcctcccaaagttctgggataacaggcatgaaccaccgtgccaggccacttcattctattttattgctaaatagcattcccttgtacagatatacaaaagcttatttacctgtttacctgctgacgcctttttgggttgttctaggcacatacgcctgccaggacacgtgcttgtgttaatggatcccgccctttctcctaggagtgggatagctggatcatatggaaggtgcaagtttaatattttaataaacttttaatttagaataatttgctttacagaaaagtttcgaatatagaacagagagatccatttacccccacgcagcttcctttgttaaccttttacattcctttcatacatttgtcaaagctaagaaactgacattggtacaatgcgattaagctccagactttatttggctctcaccagtttttccgtgaatgtcttctttcggttccaggatccagcccagaccaccacattgccccgtttccctatgcccccggcccagtgccctcggctgccttagtctcttcctctgtttatgcttaaagcagggcaggccttccaacaacgccggctggaaaaaacctcttgggctaggaaaaaacctctgggccgacaccgcctccagtatgctgggttccaatgctgcctccagctgtgttgattccctgattatctgtgttcccaggtcattccccagcccagcctagctgctcccgagaagacagtgaaggtgtgaccccacatttccagagcagctctgctgtgctccatgcgaggaaagccggggttgctgtggcttctagcgcggagagcggtctctggcctgggcaggtgacgggtgtgctagggcccgtggcccgcgggtgtgcaggtgctgcctggtggcgcgggcttggggacgtggcttggcacgtggtgggaggtggaacctggagggcgtggccgagcgcctggctggaaggaaaatggggggcacagcctggcgttggggggtggagggtgtctgtggcagggggcgtggcctggcgcgtggagggaggcgtggtcacctgttgagggttgggggcgggctgatgggaggcgtgggttcagcttggtgcgtgacagttgtgggggcatggcgcggcctagcgcgtggccctcgggggctgagggcgtgaccttgcacgtggccgttggtggggcgtgacgggg

SEQ ID NO: 30495 - DNA, 1892 bp, Artificial sequence
  DNA replication origin
tttcttttatgtaacattctagaaaatactatccaatctgtactgatggaaagtagatgggtggttgcctagggccccaggggcagggagggacgggagggacagctgggagagataacaaaggagaacctttgagggtggcaggcgtgtttatttcttgattgtggtgatctgggtttcccatgtgtgtcttttactttttttaaatatttctttctttctttattttgagacggagtctcgctctgtcgtcaggctggagtgcagtggtgtgatctcggctcactgcaacctccgccttttggattcaagtgattcttctgcctcagcctcccgagtagctgggactacaggtgctcatcaccacgtccggctatttttctatttttagtatagacagggtttcaccatgttgaccaggctggtcttgaactcctgacctcaggtgatctgcttgccttggccactgaaagtgctgggattacaggcgtgagccaccacgcccagcctcccacgtatgtctttatgttcaaatttattgaattgtacccttttaatatgtgcagtttattgcatgttgattattatattatttatacctctgtaaagctgtttaaaaagagtgggtctggatgctgggtggaaatggcttggaggggtgagaactggaagttgaagagtcagtggaggtggttgcagccgctcagtgggagacgactcagtttgactagggtgaggtctgtggagagaggtgggtggatgacgtgtgctttggcgggacccataagacctggggatggatctgatattgggggtggaataaaggtaggaaaaataggtgatttttaggtgttttgcttgagcagagctctgtctttatcatctctgtttatctaaaatagactaggaactgagggaagactcggggagagacacgctttaggagtaggggatcacgtttcccacgttggaaatcctgtgtgaggtgtgtgaggcgtccaggtgggtggaaacttggtgctgggagaggttgggacgcatcagcatgcacatggtgtttaaagcaggagtgcaggctgagagcccccgagggcctagacccaacctggagcggtcaggagaggagtagacggggagtctgggctgggtggctggcgaggatcaggaggccaggagcgcaggctaggacccaggataggggagcccaggagagctggcgtggccagctgggctgagtacctgtgggtgaggatggtgagatgggcattggacagagggacactagggtctttggtgacaaggagcaatttctgtggagtgaaggggcaggcccagtctagagtggattgaagcaggagcaggaggcgagggagtggggtcggtaggtggaggcagcttgtcggggacattctgcttcgaagggagcagctggaatgtgggggtcaaggctgtgtgtgtatatatctaaggcgggaggtgccagcacacgtttgaatgaggagtcatggaggaggatagcaagcgggcattcgggaggtgccagcacgtgtttgaatgaggagtcatggagaaggatagcaagcgggcattcgggaggtgccagcatgcgtttgaatgaggttcatggaggaggatagcaagtgggcatttgggaggttccagcacacgtttgaataaggattgtggagaaggatagcaagcgggtattgcagggcatagtgtctgtgaagggcagagggggaggatccagggcacaggtggagcccaggagaagggagtggtgtggcttcctcctgtgcagcaggaagggaggaagaagtgagcccggcggcaggtgagtctccagatccatgatgaggtgggcttggagtctcacccacaagaaggttgag

SEQ ID NO: 30496 - DNA, 885 bp, Artificial sequence
  DNA replication origin
aactgatgatgtgaattttcttctccggcaacatttagttgcttgggtgcaggtgggagcagtgggatagctgggctccttcagggcctggccagacaggcctgggtggaggatgagaagcacaagcagaggatggcagcgaaggctgggccccagctggatgaaggcaggccgctaagctgggacaaggagggtgtctccacgaggctgaagagttgagtacagaatgagataatgcatttgctgaagcgtcgtgggtggtggccagggaggcaaagcctgagacgaggttttggggggaagtgattccaagctccgggggtgacactaggagaggtattggaggttgggtgtttggaggtggagaggaagttgtttggaggtggggagggttaggaactgagcgacaaggtgttggatctgtacctatgcacacacatatatgtggacatgtgtgtgtcaagtcactgaggatggtgatagagcaggaatggagaggatggcgagccagcgagtgaggtgcataagggacagtaactggcaatggtaggtgacagtgagtaggaagggctctaggggtgtgctgtcgagtgtgggcattggcatcagggatctggaaggagcagtggagaaggcagacgctgccctcacctgccatctctgaagtctgtgggggatgaggaagaggcagctgtcactcagaggcgagttggggaggtgctcccttcgtgtgaggccagttttggttggggcaggagtgaggatgctggggagaggctgagtctttaggagaggggattgcgtggttggtggaggtagtgccaagtatcaggtaatgagagggcacaccctgtgcccagggacccgggagtctcacctctgcct

SEQ ID NO: 30497 - DNA, 986 bp, Artificial sequence
  DNA replication origin
tgttttccaaagtcacttcttgcacctgagttcacccagggcccatgggtggctcaggcctaatgacccactccccatgtacagggcattagtgctgttctagaatgtgcccacccacagcttcgtgggctgggacctgtgcagggagaagggcccctgctatccctaccttcaaaatcttttacatttttgaacaagaggccctacagtgtcattctgcaccaggccctggaaattatgtagctgggccttggggaccttctcaatgaggacaagtactgtgtccccagcctgtgaacagtaccttgcccacagcacaggttgggtgtgtgtggactggataataaactttcaggttcactgcgaggggtgcctccccactggtgctcccagggcctggccttcctggtgaccccatggaccatgggagggaggtgaggtgaggtatggatgctgcccgggctcctgatgcccttagcatgggaggtaaggcagggtcccgagaactgggcatcgaggtgttcccctgccacttgcaaagccctctagcctggctgcatgtgggattcagccaggaggagtgctggaacccggtccccagaagggaccgtgcagggtcaacctcagaggactgccctgctggaggaaggtgccccaggaggtccgggatgaaggagaaggaagctcagtaaagagcccaggtagccccaagaagatgaccaggtgtgggagggaggcttggcttggcaggggagcgactgtgaaagtttagtgacgctggttttatcttgctctagtttctctaagacacccacgggcgttgcaaaaccatcttccactcaatcatccatgtcttcagctacaaccccaagagtgctcgaaagcaacccacggtgtggcagttcctcaagaggttacaggcctttccgctcggctgttttcctgctcaggagccgcagggccgtaggcagccatgacgcccagcc

SEQ ID NO: 30498 - DNA, 866 bp, Artificial sequence
  DNA replication origin
ccagccgtcccggtaccgggagggaggtggggggggtcagccccccacccggccagccgccccgtccgggagggaggtgggggggtcagccccccgcccggccagccgccccgtccgggagggaggtgggggggtcagccccccgcccggccagccgccccgtcagggagggaggtgggttcagccccccgccaggccagccgccccgtctgggagggaggtcggggcgtcagcctcccgcccggccagccgccccgtctgggaggtgaggggcgcctctgcctggccgcccctactgggaagtgaggagcccctctgccaggccagccgccccgtccgggagggaggtgggggggtcagccccccgcccggccagccgccccgtccgggaggtgaggggcgcctctgcccggccgcccctactgggaagtgaggagcccctctgcccggccaccaccccgtctgggaggtgtgcccaacagctcattgagaacgggccaggatgacaatggcggctttgtggaatagaaaggcgggaaaggtggggaaaagattgagaaatcggatggttgccgtgtctgtgtagaaagaagtagacatgggagacttttcattttgttctgtactaagaaaacttctgccttgggatcctgttgatctgtgaccttacccccaaccctgtgctctctgaaacatgtgctgtgtccactcagggttaaatggattaagggcggtgcaagatgtgctttgttaaacagatgcttgaaggcagcatgctcgttaagagtcgtcaccactccctaatctcaagtacccagggacacaaacactgctgaaggccgcagggtcctctgcctaggaaaacc

SEQ ID NO: 30499 - DNA, 1235 bp, Artificial sequence
  DNA replication origin
gatccaaggaagctttccaaagtgactctgtccctgggaagggaggaagggaccacaatatgcctgtatcagatttctactgctgtgtaacaaatgaccccaaaacttagtggcttgaaacaacaatgaacatttattatttcatagtttctgtgggtcaggaattcaggagtggcttagctgggtggttctggctcagggatttcatggggttgcagtcagggtatcagctggggttgtgtcattagaggctgaactggggctggaggatttacctctgaggtggtgcacccacatgcctggcaggttggtgctggctgttggtgggaggcctcagtttcccaccacatggactcctctacagagctgcttaagtgtccttacaacatggcagttggctgctcccgaggaagtgattcaaggagagcaaggcaggaaccatgtcttttatggcctagccttggacatcatttctgcagtcctactggttgccagatgggtcctattcagtgaagaggggactctccaggatgtgactactggggctcactgggcagcatctcagagctgccaccatgctgctgcgtggttggcccatctggaacacttagtcttcagtcacttggtttgattcaagaacaaagagttagaaactcttcaccttttgaatgcaaggaagtaggctgacccctcaaagtgtgccagacaagccattttaagcatagttgggtgagatgcaaagaggaagcctgcatattcgctgcttacgtgaaatgtttggcgcctactcatgctttctatccacagagtctcactgatagtttgtcagccttgcatcccatctgccccatgtgggtcctgtgaagctgctggtcaacctatcccctggctttgggggaatgcaacccatgtctggccaactgtggtgccccatttcccagtctagagttgttggtccaagaggaggctctctcttactctgaaatcatgagctgagggtttactgtgtatgcctgaagctatcagacaatgaagaaagaagagagagaaagagagagatttgagcacctgggtccagctatgactgaagctagcaagacacccatctttgttctctgaaattatgtaagaaagtaaactccctttttggaattttgcttgtttacttttgcttaagttaacttgagctggaatttcatcatcacaattaaaaacatcctaacaacttatccctt

SEQ ID NO: 30500 - DNA, 837 bp, Artificial sequence
  DNA replication origin
tggcgaagagcgcgcggaacatctggtccaggctgctgttcttcttggccgagatctcgaagtaggcgcagcgctgggggtcgtcgcccaccagctgctcgatctcgcgctggtccacctcgcggtagaagtcgcggtcacccttgttgccgcagatgaccaggggcacgtccacgttctccttggttttgttcttgaggcaagacttggtgtcgaggatctgctgcctgagccgctgcacctcctcgaaggagtcgcggttgtccagactgaacaccaggatgaaaacgtctcctagagggggcacagagagcagaaaaggagaaggtgagggtggccgcccaggggacaagtcgggctgactttgaggccgcgcggggcgcgctagcctctctaagcgcgaagcgcactactcggcgcgcggcagccggaccggcgctcgcggggcgccctggccgagggttccccgcccttccctcccgcacctgcccggcccccggctcacctgtgaggatggagaggcgccgcatggcggggaacgggtggttgccggacgtgtcgaggatgtcgagctggtagacctcgccgcggatggagtagaacttgcggtggaagtcctcgatggtaggcgtgtaggcgtcctcgaagcggccggtgaggaagcgcgacacgatggccgtcttgcccaccttggacgagccgaggatgaccatgcgatagcagttcttggccgggatactcagctccgagtcgctcgggcacatcttcttgatcatcgcggccagtttcattgggcagaggggccgcgagggcgggcgcggggccgagagaagggca

SEQ ID NO: 30501 - DNA, 1428 bp, Artificial sequence
  DNA replication origin
gaatcactgtggctgaggacacaggctagatcagtgcctgccagtgtcatgttcctgatttaaggggccagcctggacactgaccaggggagagctgggctgtgatccttgaccctcgggccctccactcatatcaaatggaccctcttgggactagagccccaggaggcaatggctgtgtggggtccaccttcactatagccctggccatcagtcatcccaagttagagcccggctgcccatgcagtgccgctgtgggaggcacaggaaggcggtgctcagtctgaaggtggttcaggtccgtaccttaactgagcccccccatgtaccctcaactggctcctttatgcagtgaacaccctgcaccactgcagccctatatccagggctgcgactcagttccttctccccttctcccagactctggcagacatacctcagatgggggcaggaaccaagaatggcggggctccagccccagctagcctgtcggataactgctgcataagtgacaccaggaatcagagccaggccagggccactgatgagcccttggatgctcactgtgtgatgcgtgcatttgaaatatctgacagtaagagtgaggcctgggagagatgcagggactctgaggatgggggccaagctgggctgagaaacaagttagtggtgtcctgcagcagcccctacagcaagtgccagcgtgggagggaggtgggtaggcatggggtgggtggtatggcactcacagcactgcctgcagaccaccacctgacagctgggccggtggtgccagctaatggctccctagttttctcgtaagtcagacgtggccaaagcaaaacactgagcacacaggttgccttgaggagcagtgactgcctcaagagctcagggctgaggagctggctccagacagcctgttgccaatgttcagcaacatcaccccactcctggttactgatcgacctggtgtgctcttgagagtacccccaccaggcctcatgggtcaatactactgttattgttgctattgttattaccaggccccgccctcctaaagcatttgcatattttcatccttaatcacagaaccagaatcagtatcttccagaagagaaaactgaggcccaggagaaagcaagaggctgtgctgtgctcccagggccttcctggctcgctgtggctttgagctccaggtctctcagctagacaatgagaacgtcggcccacgcgcggcacagtaaaagcccaaaatgctatgatggacggggtgggccgctggctgcagagccctccataccacagagcatctctggctgggagaaaggagcaggctgaggcctgcagcagagcgcggggttggggaccgctcctgttgggccccagcaaggcgccctgagacccctgctccatccctgccgctcc

SEQ ID NO: 30502 - DNA, 1461 bp, Artificial sequence
  DNA replication origin
ggccggttgccagggaaccaggcttcctccggctgcacacacagctgggtgctgagtaagtggtacctaaaaataaagccccccagtgggggctgggactgatggggagtggaggtggggagcagggaactgcctaggaacatgagcagtgctcaggctgagactttctggcacctcccacccatggcccggatcccaggccgagcatcctggctggggagacagggaaggaggcccagagagagaaggagccagcacagctgagggatggagaggctctgtggcccagaccctgaaggccacctgcctgggctgtggggcccggtcaactgggcacctgggatagcgaagacacaggtgagggtcagccttgcccagcaaccctggcaccatcatccactctacctccatatgcagagtgggaagttggggaacctgcccaggtccaggggcgagggggctggggctggggctggggcaagaggagttcagggctggcagccctgcctccaccatgtgccctgggggccaaggaagtgggacaagaggccgtgtgatgaaagggtcaggttcactcctcggaagccctgtggcttctgacagctctggcctggggactcctgtgctggggggtgagtctccttgcacccgcctccagccctccaaggagagggccaggcttgcctggaaggctcaggaatgcggcccgggaccccatcttggcggtgtgagcacgaagatcctggattgagggcgctttgtaaatatccattcaggccgtggctttgcagccctgagcgaaagtaacgggaggtcaagggaaagccggccctcggccactgtctctgagcttgactgaggacccctggagctggaggagggcggtgatctgcctgaggtcacaggtggaagaggagaggggctggaacaggtggaggcctctccccgcagaaccctaatccccacacggcctccgggagcccctgactggccttcggggctcacagagagaccctgagggataatgttgaccaaagctgaagggctgagggcctctagcaccccggggagaatcaccccaaagcccaccaagcatagaagtcctcgacctgccccagtcagggggcctggagtcctgggggctgaggggtgaccctgccaccagcagcagaactgggatgaaaacaggaagtggcggcatggatgccaggaggagagggggagggtgtcccctctgtccacctcaggagtcccagtggcaatggctgagcctacactcctggtcactgtgccctgcctcccccagatgaggcttacccttgcagggcccacccctcacccccatacagacacatagggtgcccagcatgtgtccagctgctggtcagcacaaggccattcatttaggaatgacagtgtcatctgcccagctagactggggtggccaaggacaacatgccc

SEQ ID NO: 30503 - DNA, 1465 bp, Artificial sequence
  DNA replication origin
ggagctgtctggcgggcacagagggcgcatgggcaggcctgggccaggggctgtgccctccttggctgcccctgtgccaagctgccccctccccagccaaaccatcacaagaacctcaggcagggctggatcgaggtgagggctggaggacacctgtggaccccgtggggaccctctgccctgcccactgccttccacccctggacctcacactggtctgcctgtctgggagctgcaggaggcagggcagacgtaagcaaagatccaagcccaggctccaaccccaggcctggcaaccagcagcgaccccactgtgggcgccgagggggacaggagtccctgattgcacaacacgaagcaggaggcccacctgtccctcacagccaggccaccacctctgccatctgtcccctggcatcgggctcactgccacacagcctgctggggtcctacatgccggggagctcagacacctggaagcccatctccggggccctggcaggtgagagacagatgggccgtgggaggcctgtgggggtccccgctgtgtcagcgtctggccagataatggctcatctctaatgagctcctggaccattgatgccatctctcagcacgctgcatggctgatgtcctctggaggcggcttatgcgtcccccagagccctggcctggctgccccgagcccaagggtgactctcactccagggcacaagacactgctggggacactaagccactggggaggcaccgaaggttggggggttagggagggattcgtgcaggagggaacacttgacgttgggtttggaaggactgacaaggggcataagtgggagggttctaggcgagggaacagtgtgtgagtgcatacatgcatgtgtttgtgcacacagaggagaggggggagccaggtgtgttgggaaccctaagcctgcagggacgacctgggtgggggggattgttttgagtttgggctcatcctgtggccccagtgggggtgctccatggccggtgagcctgggggcacatagtctgggccttagcaggcagagggaccaggctagaaggcaggtaggacgtgtccctggggactgcctggcctggacgtggggtgggggtagggtgggtcccagccagacccacagccccccttctagcttctgctgtctccaacccccgctgctacggtcccaactgctgaaggtgggagccaggaggcaacatcttgcgcttgacattcactgtttacgattcactcctttgggatcctcaggtcttgtggagaacctgtaaattctaggccagtggttttcaagtgttaaacaaaagcagtggaacactgtctgccaaaaaaccttctatggaagaaaatggctaaactagaactgctggggtgggggctgggtatgaagccgagggcagcgcccgctgtgccatccttgaccgcaggtcctctgacccg

SEQ ID NO: 30504 - DNA, 1350 bp, Artificial sequence
  DNA replication origin
ggcagcaacttccagctccttggaatctgggaaagaaaagcagccatgggaaaggcagtaggggtcggggtgggaggggagatgggggcaggggtgggggacaagagggggccttcggaacctggaaggagagaaggaggcagtccctgtccaaggggagcccctcccagtgagcagggagttggtccagctggccgcattgcccgctctccgtcatgggtgggaaggcccacgtcttcctccccatcagccctggccagtgcaggagcttggaagtcactcggcttcagtggcctcagtagcctcctgggaccaacggtgtcctgaggagctcccgggcctgcctgccatccccatcctcagatgccggctacagctccttgggcccagcccccagggcaccgtgggctgtcacagggcactccaagttctcaaggagcttgtgcctgccagtaggggtccccccgagggaggaagtggcatctgtgggtgcagcattctggatcgcccatggccaggcctctctgggactgtggggggcacccacaggcagttcagtgcttcctgctcaggcagacgctgtagggagtttggtccaggaagggggacagcagccaggagcgtctggatctgccaggtgggggcaggtgcgggcaggtaggaaagagaaaaaagccttggtgcaaggagagggaggttgagggcagagtagctggcagctggaggtggggggcagctggactggccgcacaggtgctgtcggttgggacagggcaggaggatgagccgaggccttgaaggccatccaaggggctgaggctccatccccagagaggtgggagccatagggggggtcccagcaaggaagaggttggaccgatggagccaggatcagaggtggggctcaggaggagctgtggaggggcccttccaggatgtgagggcggtgagggccccatgggaagggggactccgggctgtgcaatcaggtcctgtgggagaccagcggcgggggccctccagtggccagtgctcgggtggatctggacagggagggctgcagaggcagcgtaaggagagccaggatggtgggtggagcccctcagcagtggaagaacaagctgggggtcctggacagtcagagggagggaaggagcctgcaaacaccagtggccacagcctcctggcggccctgccagcagacatggcctagaaacaccgaggaccagcagcgcggtatgtaggcaaaggtggtcacttcctgctgtgactcagctcgaattgggtttctgtgccatctacgcacaccctgtgccccacttcctgcttcctgggaagaaagaactttcc

SEQ ID NO: 30505 - DNA, 1573 bp, Artificial sequence
  DNA replication origin
tggccagacagacagacagctctgctcttccctcccgtgtctgtcgctggctggtgtggagtactaggcgcttcctgccgtcttgccttggggatccagcagccattgggctgcccaggctggcgtcaggatggtccaggactgtaggggtggccctcctaccctcacaagaacctgcaggagaacgctgccatggtggggctgccattggtcacatgtgcctggcagtctggtggccttctcatgcatgaagtgggttgcccaggaagtaggggctctcttccctctctgccatgtcacacagtaaagccacttgcttgtgaatctcccacccctcgtgtgttccacaaacatggttatttttcccacatgaggcttcctgcaaaacggcctgcgcattccggacctaggcgagctgggtggcaggagcaagccggcatgagttgaaaggaagccaccagcgtggcaccagctcgtgatgggtgccaggggatgtttgggtgcccgggcaccagcaccgaggggtgggtggactgcatgggaagtgggctctgggcccttcgaggaaagtgtgggaggggagggccgtcagttccttctgcagcctttctgagatgcctcccacacctcccagactgtggggtgaagctcttggggttcctggcccgctctcccaaggctgtctctggggggtgcttctgggctgcttcccggggatcctgctgggggagtgggtggtcctggggctcagcgggggttgggcttgctgatgcagagccctgagcgtcctgtgatcacccccgaggctaatctgcagagtaaggccaagatcagcgtcagcagcacattgttccagacagttttcatttaaggtgaacccttgatcccagggcagaacaggacatgtttttcatttagtttatgacttgagatttttctccatctggtgagagaagtgggtgggggccagcctgctcatgtcaaagacagtgcattccaaagaatgccctgttcctgctgtcctgaacatgctggacacactccgaggatggatgctctggcggcccacaagggaggggcttcgaggggaggtccagaggtgggagtgagactggcgagcttggtgtagccaaacacaggcctcccggacacccctttctcctgagaagccttggctgggctggggagcacctgtactctcagccacaccgtccccagctggccccagcctcctgacatgggcctctggagccagggctgcagccgaagtgcctggccatcctggcgtttcctcccactgcctggcctgcatgcttcctctctcctttcacctttgcacacacccagcatgccagagatatgaggtggtgaagggtgaggagggtgtttggaggctgaaaaatggtcctgcaaagacgtccacatcctgtgaaggtctcttatatggcacacacacaaggatctttgcagacgtgatgaagtcaaggagcttgagctggggagatggccctgagttacccaggtgggccctaagtgccattgtgtgtgtccttttaacaatggagtggcacag

SEQ ID NO: 30506 - DNA, 845 bp, Artificial sequence
  DNA replication origin
gacttgtagttctcggctcctctagacgctgtcgcgagcccccagataaagaggcacttcgcggtgacggggaactacatttcccagaaggccggaatatgttgggggtcaccgggaaagcgccccgactggcggcacttacccggctctataggtccggttccgggggcgcgtggctgcagcggggcccgcgtggtgcctcctgaggcggcccccggatgaagagatctgggaacccgggagccgaggtaacgaacagctcggtggcagggcctgactgctgcggaggcctcggcaatattgattttagacaggtactgaccgcaccggaccgccgcggaaactgggagagggatctgcaaggcccgaggggcgtgaaggcttgcggcgcctcaaacgctgcggggcggggccgccagttcccaggcaatgggggcgtggcgtggcgggggtgggggagccgcgtgcgggagcgccggctggtgtctgtgtgtgtgcgtgtgcgcgcgcgtgtaaacctcagattgcgtgtgtcagagacgggggcgttcctgagctcgtctgattgtgtgcctgtgtgtggccctgagattgtgtgagactcagaggttgtccgtgttagtctttgggattgtgtctcactgaaattatgtgatgctctgagagtgtgccggagagtgagtgtgagtgtgtatgaccgaggctgtgtgtgactgagcgtgggcgagggtgaaggaggccgattatatgtttgggagtgtgttgtgtggcccctgctcccgtccatcccccagggtcaggaggccagcttttgcccagaggcaagagagtggtggggaccctgc

SEQ ID NO: 30507 - DNA, 864 bp, Artificial sequence
  DNA replication origin
caggtgattcaccctcatcggcttcccaaagtgctgggattacaggcatgagccacagcgcccagccttttttttttttttttttttttgagacacagtctcactctgtcgcccaggctggagtgcagtggtgagatcttgctcactgcaacctccgcctctcacgttcaagtgatcctcctgcctcaacctctggagtagctgggattatagacacttgacaccacacccggctaatttttgtatttttagtagagacagggtttcaccatgttgagcaggctggtctcaaattcctgacctcaggccatctggccgcctgggcctcccaaagtgttgggattacaggcatgagccactgtgcttggcctgatttaatttcttaaagcctctcgtagagaagggcccgtagttgggcatggttaaggcaccattaggtgggacgtgctggggggctaggccgtaggagcgggatggtgagaagaggcgatctggagggatcatggaggcatcgcccccaggatttgcagcgactgggccagggggggatgagggattgcaaggagtggggaggactcgggtttcaggcctgagcaagtgggacaatgggggtgccaatgtgaggtggtggagactgtgagcggggcagcgccatggcaggggatcagtcaaaagtccactcaagaattgagagtacgggggaggtgctgctgcacaaacttttagcacaagccaagcctgcacccactggaatgtgagcatcggagtgggtggtggggcaagtgacaggcacagtgctcatcaaggatggtgggccatgggtcatacacctccaggttcttttggtgggaacaacaggtcaat

SEQ ID NO: 30508 - DNA, 1136 bp, Artificial sequence
  DNA replication origin
actcttgaacctgatggaggttgcagtgagccgagatcgtgccattgcactgtccagcctgggcgacagagcgagactccgtctcaaaaaaaaaaaaaaaaaaaaaaaaaaaaaaagaaagaaagaaaaacaattcatcggcaaagaagggagaagagagtcccaggcaagggaaagggccggcacagaagccagcagcgcgggatggcttctgggagctgcagactgcccagagcactggcaagagagaaggctggacacggccctgagtgccaggaaagggatttagaatttcctctgcgccaacaggcagcccacggtggctcttcagcagggaaatggagtggtcagatttgcacactgggaaggcttctagggcttcgaaggagaagggggatgtgcggggagggaattggaggtgggttcaggggctgagagggggaagggtgatgtgggggtagggataattggaggtgggttcggggactgtgagggggaaggggatgtgagggtggggattggaggtgggttcggggactgtgagggggaaggggatgtgcaggggaggggatttgaggtgggttcggggctgcagggggaagggatggggccaaggagttaggaaggggaagtgaggagaagtgaggcactaggaaacccaagattgaagagaggggacgtgggaggtgagggagagaaaggagggagacaggttagtggctcaatactggggctcaccagggtggaaagccctagggcaggagcgctctgggaagaagatgaagaataggtccagaatatgagtcggaggtgcctgagagacatccaggtagggacaggagggtcagcctaaggggagggtctgggctggtgacaagaccctgggctcaaatctgagggcttggagagtacaggtgccagatgattgagatctcccagaacgacagatctgaaaccttgtgacaccaacagcggtggtttcatgggctctgaagccagtggcctgggctcgaatccgagcactgccatttacaagctgcatgatgttgggcgaattactgaatctctctgagtctccttcccctgtttctaaagtggaaggaatccattcctatctcacagagttgctgggaaga

SEQ ID NO: 30509 - DNA, 1989 bp, Artificial sequence
  DNA replication origin
ttaataaatgcacaaattgaggcttattaacaatggctagtatatcttgagcatcagccacaggccaaactcaacataggtttgtgcttatgtaatgctcacagctcccagcagccctgtatggaggggtgccatctgtctgtatggagggggaaacaactcattgatataagtgagcagttacagaatgctgaggacggtgtgggcaggtgggaggcctcaatcgggcactggagctgtagtttggcatgaaagtgggggactggcaaggtcgagaccaggagcagatggggcttgggtgggtgcaaggagccccccaggcccctccctgtcagccatgagcagccgggaggtgtgcaggccctgtagggaaccagcattgatcccaggctgtgggatgggggtggggagggagtaggagaggggctggggcagggagtggggaagggaggatgggatggggagggagtgggagtgggggaggggaagggaggatggagggaggagggagtggggatgggggtgaatgggagggagtcagtgaggtccttgagggtcaccatagtaacaggagccagctctgctctgaggcctgagtctgagccaccacggggaaggagataaaaggttttctatcgatctctgttgggaaagtcatcagtgataagctgggctggaggggccggctggcgggagtgtgcatactggctgcacacgcatggctcaagggtgcccagggagcccccacagactgcggtcagactgtttgggaggtgaccgcttgagccagggaggggctgggctggaagccacgtctatctgcttctcctttaacgggggcagctggctggctcagcctcctgcctcagccttcccttctgctcagtggggcagttgggcctaggctgcctccctggggtgggggatgagtcagggatgcagaggcgggagggagagaggagctcagatgccgtggctgctctgtggtctgcactggaggtttggctgcaggaaactggtcctttctcttcagaagtgcaggcccatctggggcatcagcagccacagctggggtgggctggcagtcttgggtgaggacaaagactccagctgcccaagagccagggccagactgtcgtccaaggccccactgagccaagggcattcagctcagggcccgtgtgtgtgtgtgtgcgcgcgcgcgtgtgcgtgtgtgtgcgcaggtgtgggcatgtgcagctgtgccagtgccccgctaggccttgagtgtgtacaggtcacctgcccctgcctgtctctgtctgcactctttccctccacaggtgttagagcctgcaatgccccggatgctgggctgggtaggggtgcaacagtgactgaagcagacacaaatccatgtcctcatggagccaacattctagtgggtatctggggcaggagagagacagacaaaatagaaaggtaaatataggagctatggatgatgagtgtcccagggggtgcgggagggggtgggagggggaagcagcttgttagttaggtgagagaaggtggtcttagagcctctagagacctgagggaggcaggggacagatgtgtggggagctgggaagaggagacagcaggtgtaaaggtcctgaggcaggagtgtgccgggagcagtggggaggcctgtggggctgaagagcaatgcatgggggcagagagcaggaggcaaggacagagagggtcaggaccagcttgggtggccacagtgtacagtggggcctctggctcagaccctgagtgacggggtccttcagggagagctgggatctcccctaggtcctcacagtgcaccctggctgctgagaggggccagggcaggagcaggaggcctgggaatccagggggccctggccagggtggggctgtgggcaatgaaaagattccaattccaaatataccttgaaggtagaatagacaagaatttctgacgtggggtgagga

SEQ ID NO: 30510 - DNA, 1441 bp, Artificial sequence
  DNA replication origin
gccaggcaggaaggagggtgggccgcggcgccccctcctcgcgccggcgctagggccgcgggcagggcggcctgctcggctcgcctctcgccctcgctgcactcgctctcccactcgtctctcggagcccagccgcgggcgggggcggcgcccggggacgcggggagcgggccttggccgcgcacccggccgggcctgcctggtgtccgcgggtgccgcgaggaatgcgatcccctccgcacaggaagagcggacgagcggacgggcgggcgggcgacgcgcggggggagaaggagagcaagagcgcgaggaaaaaagttcccgggcggcctggctgcgctcgctcgcggccccgggcgccaggtgggccgtgcgcgccccgacagcaccccctggcggtccgcgcgccccactgcgcgccccccgcccgctggccggcctgcgggagggggcctctgcggtgggatcccggtgcggcctgggaggacactagcgccctgcgtacaggagcttccagcgtcaggccaggcccccaccctcaccccaccattagccctcacctgtgcccacttctttgcagtttgagaaacattttcgatttcaaaactccattggcttcatgtaaacttcatttactgggcacctggcaccttgctgagtcttgaggaatcagcagagacaatgcggtccctgctgtcgtggagctggcatcctggtgggaagagacagacagcaaacaaatgcttagatacatgacgaagataattttagagcagtaagtgctaggacgaaaattagcaggtgaagtgacggctagggctccttggctgggggagagagaaggaggcctgtctgtgcaaagatctaaatagcaagaggaaccgccatgggtagagtctgggaagagcattttgttcttttagaggcagggtcttgctgtgttgcccaggccgaacttgaattcctggcctcaaacagtcctcccacctcagccttctgagtagctgggactacaggggcctgccctcctgggaagagcatcattggcagaaagaacatcaagtgcaaaggtcctgaggcaggagagaacttggtgagtaagtggaattgtgaggaggccgtcagcaaggggacaagtaatgggcacattgaagtcagagccatatcgggagggccagagcctgcagggctgcagagagctcagtgaggaatttgtttgcaattctagtgcaaggaaggtagccactggcagactttaaacagaggcatgttgaatgagagagtccttgcatgaaacttaaggtacagacctcggagcaatttcatgcctaggtctctacttgccatagctcaggtgggagctcactgccacctgcttgggaagcctctcagccccacccaggctctagggtctgtgggatatgaccccattaacagcccc

SEQ ID NO: 30511 - DNA, 921 bp, Artificial sequence
  DNA replication origin
ccgcccgtccgctcgtccgctcttcctgtgcggaggggatcgcattcctcgcggcacccgcggacaccaggcaggcccggccgggtgcgcggccaaggcccgctccccgcgtccccgggcgccgcccccgcccgcggctgggctccgagagacgagtgggagagcgagtgcagcgagggcgagaggcgagccgagcaggccgccctgcccgcggccctagcgccggcgcgaggagggggcgccgcggcccaccctccttcctgcctggccgcgggccggccgggccgccgcgccccgacccccatggccacccaggcctccgggccgcgaagtcgcagcgccagacccaaggcccccgagtgagcgcgggcgccgaggtgagcagcgagcgccggggcgcggggggcgcagtgtatcctgccccggggcgggggcggcgcgaggcgtcgggatcctaggccgggtgatgagccgaggcgggttcggacgccgagcgcgcgcgctgggtggagatgtggggtccgcggggtccttgctttgtgtggtgtggggggtgcgcgaggtcaccggatggacgtctggggagctgcagggtgggggcgccctgcgccgcggctgagggtcttctgggggatgtgcggccagctgaggtcgggtgggggcatgggggcgcgaggggcgagtgtggcaagggatctgcttgcgccgaggcgcggagtctttgcggagcgtggggtggggacgtggggtgcattcgcggggcgccgggggcggaggtgagctttgtgagtgcgtccgaggtgggggacggggagctgacttccccatgcgtgacccgggcccggcgtggccatcgcttgggagtcagggccggcgaaggccgtgcgtggcgagatgggtgctcgggctctctgcggtgtc

SEQ ID NO: 30512 - DNA, 1218 bp, Artificial sequence
  DNA replication origin
cgaggccggccccccctctcacgcgccttgaaggcagggaacccgggaggaggacatgggggccgagtgcggcggggacaaggggtggcaggacgcgagggtgacatttggagcctggtcgcgccaggggcctccgtggtggggcggaggggaagcgaaacaccagccaggccctaggccgtcgcggccccagcttcctggggcgcccgttttcccggctagcagttttctttcttggggctcttggtcgttatccagtccacgcaggggccggagtgcgggctgccgcggtgctctcctgcgcggagcccgggctggcgggggcgcggcgggcctcgggctctgaatggatgggagcgagtgtaacaatgcgccggtgggggctgggggaggggaggccgcgcgcctgaatggcggagccggccgggcgctgctccgcgcgccgcacactctcccgcgccgccttccccgcggtttcggcgggcccggattcagggacccactcgggatctgcacggttcctcccaccaatactgtcccccgccccccttttatgtctttccaatgcagtagtgtgttgagaattcaagggcattacatctggttgcaatccagtttcatgccgctgccgggctgttaagacctcgcgctgacgtcagagcaggggaattacttctttttattttatctttttttagttgtctgctgccctgggaggagaggcgggggtgggttaggctagctctgatgtggaggcgccagcgtgatgggagccccgagctgggggctctgcttctcttcctgcccctgcccccctccattctccatacagtcctcgctctgctcagggtcaggcccaccccaggtggggggcagccctcgctgcagactgaatggtggcccctccctgctgaccacacagctgggttttcagaggctttcctgggacgtggccctcgggatctagaaactggaaaggaatcttctagtttcccacccctccccctcttgacaggcaagccggtatattcggggcccaggagcaaggaaaagtggccttttgcgtgacacagaagtggacacatcattctgatctcagggcaggctcagccccataactctggcaaaagctctcacaagcaaaagccttggagaggaggagaatgtatcaaggtgagatccaggccccagaagccaactgtggagtgggcaaaatag

SEQ ID NO: 30513 - DNA, 962 bp, Artificial sequence
  DNA replication origin
ccccagaccaaaacagacgtcctgtctcctcctcctctgacctccgaggcagaatgagtcatctccctttgtctatactcgtggcatagcgtttatcacggaattatcggcaattctgccagtgtctgtcctccccatgaggctgaagcatcgaggcctgaaagcacgtctccttgctctctccggcccagtgccaagggcgaggcctagaacacaggacgctcagaaatgcttcctggcaggagggccaggtgaggtggagagggtgagagccccaacattgtctcccgtgggcccctttgatctttagcaagggcatgctcaggtctgtgtggatcttgtgctgtcagcctttagatgagtggggtgaggggcttggtggggtcggggggcagggggaggtggcgggcagcttccccaggctgcttcctgagggggctgggagaaactggctcatcctgttccccagtgattgaggcagagctgtgccctgttcctggtgggtcactggggatctgagattggaatgtgacaccagggaaggggaggcagggtgggaggcagggcttggaggtacaggctggggcttggctggcaaaggacagatttcgctccactggttcttgaacccgtgtgtgtgtgtgtgtgtgtgtgtgtgtgtgtgtgtgtgtgcacgcgcgcgccggggaggggagagatggggaagagaaaaacatgagggcagagaggtggagtgggggtggaggacctggggagtggtgagcagggacagggagagatggaagtggggggacggcaaggagtgagggagaagttcctgctgctgctgctggagagtatgaagagtgtgcttagggccaggaaggaaagcagccaggcgcatcgtctcacaccaccatcagccatgccttccttcgtctgtccagcagacaaccctaagtgttctcttgcttggctccatg

SEQ ID NO: 30514 - DNA, 1087 bp, Artificial sequence
  DNA replication origin
ggggaagagaaaaacatgagggcagagaggtggagtgggggtggaggacctggggagtggtgagcagggacagggagagatggaagtggggggacggcaaggagtgagggagaagttcctgctgctgctgctggagagtatgaagagtgtgcttagggccaggaaggaaagcagccaggcgcatcgtctcacaccaccatcagccatgccttccttcgtctgtccagcagacaaccctaagtgttctcttgcttggctccatgcttgcatggccccagacaggagcaagcctgtggtccaggcttcgcacccttgaagtctaggggccaggtgaacaatgagcatccggtttctttcttttttttgagatggagtcttgctctgtcgcccaggctggagtgcaatggtgcgatctcagctcactgcaacctctgcctcccgggttcaagcaattctctggctcagcctcccaagtagctgggattacaggcgcccaccaccacgcccggctagttgagcaacctctttctgcacaaagtgatcaggctgggggagagaaggtgcccagaatgctgtgcagaggcaggagaggagggtggagcaggcgagcatggggtagggggcagggaagccatgtgttaggcactatggtggggagccaggactgctggggagtcttcctttcctctctggcctcggtctcatctgtaaatgggggaagagtggactgctcttgcactgatggtctgtggacccaagtcacccactccttgggcatgagaaaccagggaccccgtggagacagctgatagaacagggacagcaggcatgctcagagcgtctgcaggcccatggtcagggggcttgagggagaacatgcagaatccagtggagcttgggttcgcctcctagagttcccttcttggagactgtgctcatctggaaggcgagatagggtcggggtaggggaaggagcactggattcggaatcaggaaaagtggttgagttttaactgcagcatccctcgggcaagtcactttccctctgtgagggtcagtttcctcttctgtcaaaaatgtgaacggg

SEQ ID NO: 30515 - DNA, 2132 bp, Artificial sequence
  DNA replication origin
aggcccagagatgcgcgccgcctggcccggtaacccgcaagcgccggccgcaacgctgggactggaagcccccgcgttcccggaaaaagacccgggatccgccagggggcggggcctcagcaccccgccccgccccgcggccccgcgaagcatgccgggccgggcgctgccatggcgacgcgagcggcccgccccgcctcgccccccgcctggcctcagcgccccgaaggtcccgggccccctcccggcgtcggcgtcgcgggccccgaccgcggcctgtgggacgccaccgcggaggaggctccggcgcggccaagatggtgggcgccgcgggcggggaggggcgggaccggcaggaagcgcgggcatttgccctctcgccgccccttctcgaggtcggggagagaggaaaggaaatggcctcggaggcgagcgtggagctgcccgggcgtctggcctgacagctcctacctatgcctttcctcgaggcccgggccctcccagccctctgagaggtgggccaggttgggggctgccctcgctgggatccagaatgtgactcacaccccagaaaagatgcccctccctccccacaggaaggcccgtcttcctggctatgttcctccccgcacctcgtgcgtctccaccgcgacgaggagggggcagtttggttcctcaggcctgatgccagcctctgcccacctacaccccaggcatccgttattgggcagagaacccgtttcccctcagcacggctgcctccccggtcaaagactccaaagtgcccacagatctaagcagaagtcgctgccctcccaggagacccggcaaggctagcagctcccaggagaccctgaatccctttgattctgtgtcctgccagcaatgacgggacaagggtaggatgagagcagacactgactgggccaggacaggtgactctcctcctaagccagcgagtcctacgtgtgaatgactgcccagattaggtgggcaaacaagcccagatctgttaaggagtgaagtggcagagctgggactcggccaggctgtgactccagatgcctgtccacacgtagtggcactcgctacttcccggccgcccagcccgggctggtccagccgccgatctctggcccagagcaatggcctggtctcccgttccttcctctcccttccccctaccacaggcctggcttcccttctgagccgccaatctgcagccacacaaagccctgtttgtttgctttctctgctgctccccctggatccgatgtctttctcagctacctgccgcctggcttcctctccaagctgcctgcccagccagctgaagggaaggaggggcggccattgcagcaagcgccgcctcatggcaaccccatcactccttgaatccacctccccagtgcaaggggctcctagcctgggtggcctgaccttcgacaatggctttggagccccctcgcagcatcttagaatgtagggtgccagttgggtggagcaagaaagatgcctggggcacggggaggggagctggagaggcccagccagtctcccctctccttttgtgatcaagcttgttttgtttgtcaatcaggaaggctgcccctgccttcccagcaacccactggctgccaggagataaggagatgaatgggaccaggagggcctgatcagaggaggtggaggaatgatgccctggtttcatggccctcacccatcctcactctttctggggactcccaggtatcccaggcactgtgatgagagcttacaggctgcacgggggcgtcacatggtggatgccctcagtgcccaccctgggcagatgcctctgcatggcaggcaccccagagtgtgcagatgtgcgcacccatggcagtgtcgggaagccctacacagcctgagcgaaaacagggctttcacaggcaaagaaaaataaatacccgcattccacaccaccttctctacctgcagagtggagtctgccctctctcccctttcaaataaagaaacccaacactgataggcacagagatattgcaatcttgcctggctccctctacctaggactcttttattgcaccctgccaagctgggtggcccaaggacctcctccttccccttcc

SEQ ID NO: 30516 - DNA, 1483 bp, Artificial sequence
  DNA replication origin
catctcggaagttctcccaagaacgtggttcaggagcatcttaaacagcattaagtaagaaaagcggaatatcaactgctatatacagaagtaatgatggcatacctaaacagacaaaaaacacaaagcgaaaaaccccatgaacgggtggtgggggggttgagggaagacaactgtggctgcctttggagactgagagtacgggtgaatttttttttaatttgtcatattttccaaaagtctataataagcctgtcctccttttatagtgagaaaaaagctattaaaaccaccaagtgccttacaaaaccaaatatacagcatgactccgtagatgtatcataagtggtttatcatacatctacagaaagtatgttgacagtagttatatactgctggtggaattataaagtttttacttttttcttgtatttttggatatctctacaaccaacatatcaataatctgacaatttcactaagaacaaaatgcttaggactgggaagttctttccgatggcaaccctgagtctcttctgctgcaactgtagccgattctcagcctctttgtgcatgtgccctgggtgaggagggagaaaggcgcgaggacagcctctcaaccagcatacagcctcccttcggagacccaaaggccgacattcaatttagctgcctactcagtacaggtaggaggtgacaaagggtagctgaatcggtgcctcttaagagactaggggaggccgggcatagtggctcacacctgcaatcccagtacttagggaggcgaaggtgggaggattacttgaggtcaggagtttggaaccagcctggccaacgaggtgaaacctcgtctctactaaaaatacaaaaaaattagccgtggtaagtgcctgtaatctcagctactcgggaggctgaggcaggagaatcgcttgaacttgggaaccggaggttgcagtgagcggagattacgccactgcactacagcctgggcgacaaagggagactctagctcaaaaaaaaaaaaagagagagagaaagaccaggggaaagaaggcggctgtggagtagtaactagggacttagggcacgagaaggccgggtggggacagggcagtgttggcagcaaagttctggaagaggctcccccagggcaggcggggtgcccgagctcaggaggtaggaatgtgcctcccagccagacagtccaacgactgccaactaggggaggcctgtgctcctgggctggagggaggccggccgaggttgcagggtccaggcctggaccgggtgaggtgtgcagtcccggcccccttctttctcctgccctagggcaaagggtaggtcctcactgacccatggacagttccggggaagagctcgagacccagagactgcagctgagaggccgcctggcctccacttttaatagcccccaagcggtaggggtccagtctccccattatcctggccctcggaagcg

SEQ ID NO: 30517 - DNA, 1366 bp, Artificial sequence
  DNA replication origin
gcggttgaacgccggggagcgggcgagcggatctccgccgaggcagggcgataaattaatgaaacgaacgcgccgcgccccgaggacgagaggggccggactgcggcctcggcggacgaggcccggcctcgcggaggccccgctgctctcctcttctctcccatcccctcccctccccgccgggcgtcgttttccaggtaattaaggccgtcccggccggcgcgcagctgcttccgcggccggccgcgcctcaggcccgggcaggtgcaattaaacccgcgcgttcgcagccattaagctttaatggggctcattagcataagaacgagaagacgctttgatggcggccacccccgcaggggctgcgcgcgaacgccgaggggcggcggggcgcggccgctggagccccgagccgggagccgcgcctccagctcgcggcccgagtcctgccaaggcagtcccgcctggggccgggcgacaggaggcgggccgcggagcttgacctcgtctcaggggttccaggctgcgtccgagagccagaggtttcacagggcccaggccccaagaataggtctttgaaggacgagggaggaggcccaacctagagagcagatgtgctttcccaaagaagcagctgaggaaactgaggcctagaggtgccatgtgacacacagccccggtctcagcctgcaagtggttcatttattcaacaacgatagcagccaaggcttatgtgagttttaaggatttagcataaattttctcacttaatctccccaagagccccaggagtagtggatacttgctcttgtgatcccattttacacaagaggaatctgaggcttggagggggacacccaaggtcccacaagccacagtgagctttgaacctcgacagtctggctcctgaggctgggctcataactaggaagccacactatcatgtgtgacatgaccaggagaggcacagggtggggtggagtggtgggggatgggaccgtgaccagctggtgggctgggtgggccatcctacccggcagacagtagccatctccaccaactgtggccgggggaagcagggtagaataatccagaagaaatgtaaactggaaattggaaatgaagtcactcaacgattactcactggcaattcatttgattcccccccccccggccccccgacaatggatgggctttcaaaacaggtctgtggtcaggacgtggcaggaggaccaccactttgccatctcagtccaacatggagtgcagtgtgcccagcaattactaggtgttcaggaaacactagtcaagcaaatgaatgagtgaatgcatgaataaatgcttttctctgcaattttggggcaaa

SEQ ID NO: 30518 - DNA, 1497 bp, Artificial sequence
  DNA replication origin
tggtacaagcttttgtgccaactgaagggtctgaatttggtcctcttggcaatagggaggcagtgaaggttgctaggcaacagaggaccctctgcccacctctccagcctcatgcctccacactttggagtgagctcagtttttctgtggttgtcccttactccctctcccctcatgtcagccagtgttctgccctagccagggctgaactccaattgtttccctacctggaatgctattcctgccaattagctcacacttatccttccttccaggctgagcttagaagcctctcccagccttcccagtttgagctcaaagactgttctctgcttcctttaaattggtcctttttccattagaggacaagtattcctttcgagcgctgcctccccgactggagtccttggagggcagagcccaagtctgactcccctctgtgctctcagcattgcctgacacaggcaggaccagggctgggtggcctcccagtgggcactgtgcaatgcttcaggctttggtctctgagacgcacaaagggaggagggatgggactggaaggggcagaaaggaggggcaaccaggcatggtggtgcacaccttgtagtctcagctacttgggaggctgaggtgggagggttgtttgagcccacgggttgagggctacagtgagccatgatcgcaccactgcactccagcctgggcaacaaagcaagatgcggtcttcaaagaaagaaaaaagaggggctgggtacaaggggacatggaagagagaggggagggaaaggggaccatctaaaaactgcatgagcggtctgtctattccctcttccgttttccttccctctgcaaaaagagaagagtgagagaagggaatgagggagagaggaggggcaggcgcctatcccaggatcacttgatggggtggggaggagcacagggaagtcccacagagaataccattaggtctcaaggtttccctgaggttcccatcagtctcacagccccctgcctaggcagaaggctcagggcagcagtgcagcccccacaaccccagggccatccccagggagatggcaggggcatgcagagatagggcagtcaggcagactggcctcagtgaaatgtcagtccagagggaggacacacccagacaaccttcaccatgggctagcccacccctcaacaaagggcccagacccatccccaatcccatcccaggaggacaggggctcatcttgttggaggcgcaggggtgggtttcagggaggatgagcgaggagggagaggggtctttgttgcaggcagaggtaccagcttctaaagacgaggggagtaaggccgagatgaggcatctggggtctctgcgaggtcacattcaaccctcaagagcgcctggcacgtaatgtgcaaccaccattattattgttcgtgcagagcagggtggcactgggtcagtggcagcagcggtcccgaagggccttgaatgccaagccc

SEQ ID NO: 30519 - DNA, 927 bp, Artificial sequence
  DNA replication origin
gtaatcccagcactttgagaggccgaggtgggcagatcacgaggtcaagagatggagaccatcctggccaacatggtgaaaccccctctctactaaaaatacaaaaattagctgggcatggtggcgcgtgcctgtagtcccagctactcgggaggctgaggcaggagaatctcctgaatccgggaggcagaagttgcagtgagttgagatcgcaccactgcactccagcctggcaacagagcgagactctgtctcaaaaaaaaaaaaaaaaaaaaaaaaaggcaacaaaaaccaaacgccacttgaccacctgtttcataggccctgaggtagcgcacaggccagcagggagctatggatcattctgcagagccacggtgcttgcccagaggtcagcagccctatgggatgcttggggtggggcgtcagatttgcagagctggggcgagggaaggaatggcacttgggggagtgggtctgctggagaaaggcctacaggtaacaggaagcactaggcagttgggtccggccagcagggatgggaccgtgtagtggccaagctggagggggactttggtccctgggtcatggggtgtgcagtgctctgcactgaatgatgagagggcatgcataggtgaaacaagaggccagctgctgaagggaggaagaccaggtaggcagctgggccaaggatccaggtggacaagggctggcatgggtctgaagaggaagagcagggccagggaaagcccagggctggatggccagtggttgtgagctgcaccagcagccagagggagccggggactggatgggggtggccctgtgcagtgacggggaaagtttgagggatcagagtagagttggggcacccgagcggcatccaggggagatgtccaggatgtagggtggtgaatggacaggaca

SEQ ID NO: 30520 - DNA, 788 bp, Artificial sequence
  DNA replication origin
tgttttcaagagaagctggaatttggatttttatgtgaactctcctgattctcaaatgctggctccgttaacaaaaggcacagtgtggtttaaaccacacatgtccgcaggcagaggaccaccagtttctaatgtctgcgctgtggggcgcttgggtttttgcatttggttcttttacattccttattttattggaaacagcccaaatagtcactgagctgcaactctgtgctaggtgccggggctctatcagcgaataaaacaacatgtgacggagctgccattttagtgggagaagacagtgaataaacatatatcaggtgatatgtgttaggaagcaaatggaagcagggctccagaacagagagcggctgcaaggccaagcccacatttgggtggaaggggcagctagtgcaaaggccctgaggtggggctatgctaggtgtgttagaggcctgtgtggctgcagcgggagtgggtggggaagtgggaggaggtgaggtcagaaggtagcataggtcaaatggcataggagactgtgggctgtggtataagcttggttttaagtcttatgtgaggtgggagccatggaggattcctagggagggagggtcaggatcagacttggtttaacaggctctgtctgggtgttgtaatggctgagtggggcaaggatgggcctaggaggcccagaaggggctattgcacttgtctggctgagtgatgatgcggcctgaacaggaagggggtagtcaccagagggtgacctgaggaaactgtggtcaagc

SEQ ID NO: 30521 - DNA, 885 bp, Artificial sequence
  DNA replication origin
gcagatggatcaacaagtgcaaaggtcctaaggtgagagtgtgcctgctgaattcaggaactgcaaggggcaatgtgagtggggcaacaggctgggactgagggcaggagttggtggggacctgattgtgtgggctgtcatcaaccacctgggggactttctcctcctcatcactcagaaactgaggaggggagggaagacattccagccaggttggtgatccccagcgggcatttgggcttttccgttgccaccttaatggtatacacaatgcgcatctcctggttcactcagcagcctcaggactgagtgaccctggtccccaagacagatattgaagacagagactaagcagtctgacattttaaatatggggagccccgagtggggcggggctgcccaggaccttagggattcacttctggtagggagggctgctaccaggcttcagggaatgccagaaaaaaggtgcccgaggcccacctggcatgtaatgatgggcaggattggctgtaggatgtatagagactttagtatgggcagggttgggggttagtaggtggagaagggagattgggacatcattgagcagcaaaacccaagtgtgacaggtggtcggtgtgctcctgccagagcagaggggcctgagtaggaggaagtggaggtggaggccgaggagaatgagacagacagactcactggccagcgggagaaagtggtgggacgagccagggctgacacatctgtgtgatccctggtgcagtaactccggtagatggatggacacgtggatggatagaaaggtgggtggatgcagcgacggatggatggatgaatgaatgaatgaatgcatgcgtgggcggtgagcggccgggagaggggcgg

SEQ ID NO: 30522 - DNA, 1119 bp, Artificial sequence
  DNA replication origin
agaaacaaatgtgagcgctcgcacgaatcctttctctcgccagccgcttgcaacggccccaggctcgctcctttccctcgcgctcccgcgcgcgccgcgcctctcgcgccccgcgtttccttcttagcagcccctgcgagcgccctcagtagccattattcacaggccgccgggggtcaggaggtaattagagacggccccgtggccgcatccactcggtaagcgcgatgctggcgcggggcgcgcgcggggaggggcgcgcgatgagggggcttggctgcgcgcagcccgcgccccagactcgggggaagggaggaggaggagggggcagggaaggaggaggcgggcgggggggcgagagatgagctcgggaagggagcgggaggagggggcgccggggagacgctcccttggctctcaccgcggggcctcggggtcacccgctgcgaggctccgacgcgcttagggacggggggtgtgagtgtaagagtgcgcgcgcgcgcaggcgtgtgtatgtcaaagatagaggaggggagggagggaacgctttaatatttttccagtgacttacgagcctgcgggtgaggtcttggctgtgcgtttaggtccgtgtgtgtatcaatgtggctgtatatttctggtctgtcctacgagtgaatgtcacggggcttgggggggggggtctggatacaagctagtgaatgtgtttctgggtctcagtttgactgaatgatgtggcgctgcgtggggctgtgtctgtgcgattgtttataggggggttgtgtgactccgtgaggtactgcgtgggtgggattgcgcctgtgtgcggttgtgtgtatatgggattgtgcctgcgtggggctgagtgtccagagggcagttgtgtggccatgtgggcctgtttgcgagtgggctggtgggtgtgtggggccgtggggctgcgcatgtaggggcagtgcgcctgtacggggctttgggttaacttaaagggctgtggtgggtatctgcaggcggttgcgtgtgtggctggatctgcgtggggtctgaggcctggcgggtgggggttagtcctcctggcgtcggggatcgcaccgcggcagaagagccgcttaaggcgcc

SEQ ID NO: 30523 - DNA, 846 bp, Artificial sequence
  DNA replication origin
ccccggccgcgaacccaagcctgccgccttcgccgcgcccaccccccagccccctccctgccccggcgccatcccaggtcgacgtctctaaccaaaacaagcccctcccccaggagccccctccccctgcccgaggcccagggtcagcagccccaggagggacctcctccccaccccactccccccggcagaggtgcgagatttcattgtcagcctggccactcgaccgcgcgtgagactggggcgcagggcaggggggccactgggcaggctctcgtgcggggagtggggaggggtctccaggggaagtgtttgaagccactcctgcagctctgtccagatccggaagccgccgaggaagggaggaaggcgggggtggggagagcgcgaccttaagcgctggcgggcggcgaggaggggccgcagcggcccgaggaagcgcctggaggcgtcaggggcgccgagtccccagggaggccgcgctctcgggaagtttcccatcggttgcccggagcaggatcggacgcgcggatcgccctccccggtccgaccagcttcggggcgcagattgcgaacttgaacagaactccttccttctctggcatctctcgcctccccatccgtggccaccagccccgccatctcagccccatgccttccgccaataccacattcgtcaagaccgctcaccaatgctttgtggaggaaaggggaggggggaatccccagcacaaccaaactgtggccaaaagcggccaaaaaaaaaaaaaaaaaaaggaaagaaagaaattccttcttctgagaccgattccctcaaccagcgtggaaaacccccaaacatgcaaa

SEQ ID NO: 30524 - DNA, 1915 bp, Artificial sequence
  DNA replication origin
cgtccgatcctgctccgggcaaccgatgggaaacttcccgagagcgcggcctccctggggactcggcgcccctgacgcctccaggcgcttcctcgggccgctgcggcccctcctcgccgcccgccagcgcttaaggtcgcgctctccccacccccgccttcctcccttcctcggcggcttccggatctggacagagctgcaggagtggcttcaaacacttcccctggagacccctccccactccccgcacgagagcctgcccagtggcccccctgccctgcgccccagtctcacgcgcggtcgagtggccaggctgacaatgaaatctcgcacctctgccggggggagtggggtggggaggaggtccctcctggggctgctgaccctgggcctcgggcagggggagggggctcctgggggaggggcttgttttggttagagacgtcgacctgggatggcgccggggcagggagggggctggggggtgggcgcggcgaaggcggcaggcttgggttcgcggccgggggtcgtggatggcagcccctcttgggcttggtgattggctggtgacttcaggcacgtcgagggcccctccaacctcagcctcctcccctctggtacaatgcgggctgaaagaggtgatcccgagggtgctgtgcttgtgtgacgaagtgtttgtctcctgcgatcctcagcagacgctgctccggtgacccggagatccggacgcctcgacccctccctcagggccgggaggagaggaggatgaagggggaggagagtggtgggaacttctcctttcccattgaggccatgggaagggaatgctagcccagaaaatttctggggaccgcagttctgaggcggggactcaatccaaggggggaccaccgggtcagaggcttcccggcacgcagaagcccccagattattttgctccatcgggggatgcagaggaaggggagaggtggaagagcgaagggctagctggactggcgttgcgggggtggagagcccgtggaaatcagccttaattggattcccaggcaagcagccaggctatcaaggtgccccctcccctttttcttcctggggtagagagccaggtccagagacaccaagctggcaacccaggcaggtgaaggcaattcctctccctacttaaaaagagaattcctgggggagaggggaggcaccttttgagagggaggggggcggctagactgtgttcaggctgttctgtctcttggtccaggaatagaaagagttaaccctcccccagaaatttgtcagcccccacacagcagggaaacattgttggaccctctgacatgctaacagtgtgacaccggctgactggagctagcagattctagaccctggactcccccttcaaagcccaacaggactcggctgggtggtgccttgttcagggaccttgtgggaggcggaaatgagagcccagagagggtcaggcagcaaagcagtggccttgtggcccggagggaagaggggttacaagccagggccatcggaaactggaagggaagtcgccatgggtctggggtagagggaagggagaggcccttctaccctttgcccagactcctgagcaaggctttgccctgctccccacccttcccacacacccactcagctgcaggcctggccattaaatgtgggtgtctgacccataggttggaccatgagaccctagtggctgagggaggcctgggtgaggctctgggaggcaggactgaaaccagcaagggattcactgctgctcatgccctatggcacaacccccttatttatggggctgccttcccttccccagacctcgagtttccgttttcaagaacctttttcttcctatcttccttagggcccccagggcctagcacacagcagtcac

SEQ ID NO: 30525 - DNA, 727 bp, Artificial sequence
  DNA replication origin
actgaatggttaaatttaatttaattcaattttgtcaagccagctgaggcttgctccccagccccctctgccagaagcctgtacctttcctccagtcccccgccccatatccccctaccatggggatacctgagggtggccttattgcagcagacagatggaggggggctacaaggctgaacatgggcaagggtccagggcccttctcgggctcagcctgatttcagggcggggggccccagccacctccgcctactccagagaagcagatattgaggcctgtcaccacttgagcaggcctggagccccagagtaattatttctcttccttaattgaaatttcagcctcagtgatccagcctcagaagtgtaaggcaggcacagagaccctgcccctggtggggggagggggcgccccccaccctggccccagaaggagggaggcagtgccatcccaggggggcaggtggcttcacatgctggtgggtgggcatgaggtggacggctgctggtcaaggaggcagggtcaagggggccagtatggcatagtatggcctgagcactcagtatggcctgagtatggctcaggccagtatggcagctgccatgggaaggttgggcctctccctctgactcctgacagaggaaggtgagggggttgatctaggctaaggtagcatgagggagtgagtaccaggagactgctgcctcctcccacatctggcgg

SEQ ID NO: 30526 - DNA, 900 bp, Artificial sequence
  DNA replication origin
cttcacatgctggtgggtgggcatgaggtggacggctgctggtcaaggaggcagggtcaagggggccagtatggcatagtatggcctgagcactcagtatggcctgagtatggctcaggccagtatggcagctgccatgggaaggttgggcctctccctctgactcctgacagaggaaggtgagggggttgatctaggctaaggtagcatgagggagtgagtaccaggagactgctgcctcctcccacatctggcgggcactgaggggtgggctggggtgggtgaggggctatggtgtgagtggggcgggctggctggcggcaggcccagttcctggttcagggctgggtgaggcggctggcctggcggggcggggtggggtgggcaggagggtgcagctgaggagcctgttttcccggctgctgcggtcaggctgggaggagcctccgccacctgggtggtccctgctgccctacacggccttgggcctggcctgtctgcgggtgaaggcgggggcagaggactccagggaccagcaggaaactgggagaagccatgggcttgaaatgagcctggggtccacccctccgtgagcttctcaaggtggctctgaggtgctggggtaaacgtagcaactgccagcttgcagctgtgtgtgtctgagctcaggcaacccaggcaccacacaggaagctgctgtactcactggaccctgatgggctgcagagggccagagagtctacttgtgggcccttctgggtgtcagtcttctccatctggggaatgggttggcttggtgggagttttcaggcctgcattaccttcaaagggctcatgctgcaagcatgggctgtcctccctgtttttataagtacacgggccccagccttacccagacag

SEQ ID NO: 30527 - DNA, 1294 bp, Artificial sequence
  DNA replication origin
gctaagagcctcagtctgctgttctgtaaagtgggtccagccatttctgtaccctcagggtggccatgagggtcagtagccagaaaggcaaggccccacacagaactggttcacagaaatagcaggcagtttgtcaggggcagccttggcgtggttttcattcaaaatcattttttaattccaaaagaaaggaaatggttgtaaataaagaagggaaggccgggcacggtgggtggctcacgcctgtaattccagcactttgggaggccgaggcggacagatcacgaggtcaggagttcgagaccagcctgaccaacatggtgaaaccctgtcttactaaaaatacaaaaattagccgggcgtgatggtgcgcacctgtaatcccagctactcaggaggctgaggcaggagaatctcttgaacgcaggaggtggaggttgcagtgagccgagattgtgccactgcactccagcctgggtgacaggttgagactccgtctcaaaaaaaaaaaaaaaaaaaaaaaaggaaaactgtagaggcacataaacaggtcagagttcctgtctaggcttccctagaggtctttacttttactagtgtaatctgagtctttgactctgtttgtgggcatttacatacacaattaaatctttactgtgtacctactgtgtgctgaaccccgaggatttcagaccttgagccctgctgttaggggctctcacagtcctggtggggagactgacccctaagctgataaatgacccctccatggggagtgggcctgtaaagtgatgatggaagagggtccacaaaggagggaactaactgtgggttggcaggacagggaatggggatcggggaaccttgaagggacatggagtgtgaactgggactccacagagatcacaagtttttaggtagaagaaaggagagggaaaagcttggaagagcatattctaaggaaagggaggtatttgggatgtgctgactttggagtccctgtgggatggccatgatcaacccactgtagggagccaccaaggggttctggatcttggatgccaggccatggagtttctgttttattctctaagtcagggagccattgaaggcttttgtgtgtgtgtgtgtgtgtgtgtgtttgtttttgtttttgttttttttgagacagggtctgttgcccaggctggagtgcagtggcacgatctcggctcaccgcaacctcagcctcctgagtagctgggattacaggcacgtgccaccacgcctggctatttttgtattttttggtaaa

SEQ ID NO: 30528 - DNA, 1514 bp, Artificial sequence
  DNA replication origin
tggcaaagggtggccaggaggccagagcagcactcacagatgaggtgggattggggccacctgcatgtgtggggaaggagcccccaggactcggtgtgtgggcctctggctgacaaaggccactctgcagaaaggaaattagaaagaagaaatgatttcttggctcatgtcttcacgaacaagggagaaagttgctggcgtggtctcctcacagaagagccagggtatctgaggggagccctttctctgccagctgggtcaccctcagggctggaggtgctggatgccagagtagaagtggatggatgggggtgtccccccaaaaggagagggagacaaggtgaggctgtgccttttaagccttctgcgcaggcctccttgggacagcccgggtcggatctcagactgcagcatgtggggctgggagccagctcccccgaggcacgggggctcaagaggtctgagcagcatgctgaggtcagggctggaggagcagaaagtagtagggagccactgatggcgtcataatgaaggagcgacatgacaagcttgtgaggggccacacagggcagaggctagggacgaggagatcccgctggcagctgggcatggaatttctggtgggtagtgaaacagccagacctaggacctgtggcagtgaggatggggagggggccagatgggcacacttcaggcaggggaaccccaggacttgggggcctcctcagagaggccttacagaaggactggggcagcaagcaaggcctgtggggcgaggaggcctaaggacaccatggatgcactggagccaagccattaaggaccctgcaccccggccagaggcctcactcaggatggctgcagtggagactgaagagatgggtcgggtggagggaaatgggctttgccctcaggaggtggttgtgggaggagatgcggtcacccgggaagagaggccagaggatgggaccgaggagcagcgacacgggaggacggcagggcgggtgagcgggggggccctgcccagggtgacagggctttgctgggccctccaggaccctaggcagggtctcccctggaaccaggcggtacaaggcctgtgatgggaggggcgggaggatgagggattgctggcaggagggcctgggaccagaagtctccactgcagccatcctgagtgaggcctctggccggggtgcaggatccttgtctacctgcggggtagggagacagcctgtctcccaaagggcggtggggtggctgagcctcaaggacaaaggcaggcgggggcaggggaaggagcctgtggctgggagcttaatggccccgaaaaaaaaacataaaaccagagaattatggggagacataaacagagctgtcaggcattagctgcagggagacggctcagcctgggtaagagatgctggcggctgagctgggatccttgcgtgtgcataaaaaagacagaagttataaaaggagggagattaagaagatactgcctcttccatgat

SEQ ID NO: 30529 - DNA, 1196 bp, Artificial sequence
  DNA replication origin
tcccttgctaactccggcacatcccctaggtctcaggtgaagtgtcactcccctgggaagcccctctgccctcctgttcccactcaggtatgacgtagggccctttcccatgcgctggcacttacttgccttctccacgaggctctgagcccacagctgtctctgggtgctcagtctctagcaggtgtatggcatacagtaagcacttagtaactgcttctgagatggacagatgggtatgtgcaagggtggatgggcaggtgggtatgtgtgcatggatgcatggatagaaagaaggtaggctggtgagtggatggatgggtgggtgattgtgaggtatacaggtgagtgagtggatgggtggatggatagatgggtgtgtgtgcatggatgcatggatagactgatgggtgggtgggtgggtggatggatggatggatggatgggtgggtgggtaggtgaataatagatgggtggactgttgtgtgggtggatggagaggccaggtggtctatgaggtgagtccagaggcattagaaaatggagttctaagcctttggctttccatgggccccaatttctctgtctgtaaaatggtcagctcagctcctgtgcccagcgtggaggctcaggatgagctggagagaaggtggaggcttcagcaggcagcacatcaggcgctccacagacagtgcatgggacagaacaaggttgcttggcgtccctgcagcccaagggctcccttcttcagggggacaccgatgccctcctccatccctgcttgctcccaggatccttgcccaggtagcagactgggaaccagacccatagagttcaaatctaaacgttgctgctcaccaggaaattccctttgcctcctaggccttaatggcacatctataaaatgggggtgctcgtgtattcatgttctttgcagtttctctggggatcaaaacaatgtgacgaagggaggcagagagaaaaaatgcaatgtgacagggaagatggcacctctcctgatgcccagcacacagagggtacccaggaaatatggggcttagaatctcaacacctgaaagagcagcttctgctgcagcccctgccacaggcgccacactggccacagtgctccctcctagcccttcttcccctggccaaagctacctctggaaactgagttcgaagtttccaaacct

SEQ ID NO: 30530 - DNA, 1298 bp, Artificial sequence
  DNA replication origin
atgacaggtgatgtcacctcccagaagggcagtttgagagaagtaaaatctattgaggcaccttggacacaggagggggtcagacggcatcagcctttgagggtgctgcagttacacggctccagcagtctgagccttatcaagacctttccagatatgagggaagtccatgcccagtgtctagctggctgggggagaagccccttgagaacccccactctgtaatgctaggctctgcatttgcttaggaggctgtgtccctgtctctccccttctgggccagccttgctttctgggcaggcccaggagtgtcccgggcccagcactcagagtcagcgctgtctttaatctgtattccacaggcatcctcaccccctcccctcccaggagctaggaacctgccaggcttcttacctctctgctggaatctccaccccccaccagaggctgccctcttggggaaggggcccagcccttgaggcctgtctcctccagactagctaaaccacagagagaactccatctcaggttcccaaataggcggtattcttccccgccaccaagctaggcagctcctggcggctggaatgccctgctcctttctcagcccaccacttcctccaaccttccgtcctctgtgctgcagcagggagtcttaccccacctccttcaggagggaggtgctcacgggttcctatgcctgtgggtctccaggattgggcacggagcagtctgcaaaatgtcaagtgagggagagatccagtcaaagccccaggggggcctctgagctcagtcagctcctctgctgctccccacctcttgggggaaggacaggctggggtttgcatgggtggccttttggagagcagagtaatgggagcctacttgaacttcctgcggcctcattccctgactgggggcggagggtagtctgagctgctggcctggggtgcttggccgcaggggaaggggctgggagggaggggtctgggtgagtctaagggagggtgagcctgaaaaggggacggcagcactaaactgccttcggggagtccccactgtgcgcccctggcactttcccagtcccctggcgcggtcgcaggcacgggtggggtctgcctcaaagttgttggtacggccagcccgctgctgtttaaatggtgtgtttgtttagagcggcttagggagggaactggaaatggggggcgggggcagcgccccacttggcgccaccgctgccggagggtctgcgtgttagaagccccagcttcgtaaatgaccgaagaagggtgggcgtt

SEQ ID NO: 30531 - DNA, 787 bp, Artificial sequence
  DNA replication origin
ctctgtccttcgcgtcctcgcccttaccgaggcgtggggagggagctgcggaggccgtacgccccgccctgcgcgccccttgccgccgccgcgtccccgcggcagccccggcctcatttatcatcatctttggtcaagtggagtgtgcaaggaacagctgcttcactcggctgacttcgagggcggctacgggagaatcagggagatgaatgatgggggctggtggcagccccccgcggtccccgcgcaggcgagagggaggcggggacgtccagggccgcctccgcctcatggcgagtgcagcgcccccttcctctctcctggcgcctgcagcgaccggggaccgggggaccggggcaccgaggaccgggcccgccccgggaggggactgggcgcggggacgggggggcgcccttcgccggcggagaactggcgggcgcgctgccggcagagcccgaggttgccgtgaccttgctggggtcagcgggctgggctgcggaggcggcggcgcggcgtctttggtgcgctttccggattggcgcagaggccgggaaacaaggcgggggcgggcgggggaacacaaatagaaggtgaaattttacctgcccctgagggagtcctgcggattttctccggcagcagcaggcgctctgcctttgtcttacacggctgaaacatctgttgcagaggggcggagaggccgcaacaacccccacacaccctgcgctgctccccgtccccctctgccccagccgggctgcaggactccaggcgccgcgttaaccct

SEQ ID NO: 30532 - DNA, 1306 bp, Artificial sequence
  DNA replication origin
cctggccggggcgcccggtgacccccctccacctcgatggggtgctgaggtgtaggcggggggcgggggcggaaagggttaatggcctagtcgcagaccctaattgtcagagccggccccgcttcgtttcaattaccctaagtagagactgaatgcgcaattaacgaagtcagcttgccaactggaaagccggccccgctttcacgttgagcagaatactccaccagctgacttggacgaagcaatttcctcctctctctctccccttttttctctccttctctcttccaatccccctccctctttttctctctccttaataataaaattataccaagcagtttgcggtgtggcaggcggccagaaaagcgtttctttaaacgccgccgtctcacaattaggcagcaagaggatttgacacgccgtggcggcctgacaggcggcttcctcccctggggactggggggagggagggggtgccaattccccgctcccccaggtggaacggggactgggaggggctggcctgctgtgcctccccggctgtcagaatggctgcagcgagggggtgtcaaaggcagggaagcgaggggcggttccgcctaggctggggaaggcggaaggcagcggcacattccacgactcctctgggaagctggcgtatccaggagggagaccttgttcccctttctgtttgacagacaggcactctggggcatagagctgtagacggatctcagccctgctgggcgtcctgcacaagccactggcccactctgggcttcttccattaatccctcggcaaaatgagggggagatttgacctagaatgtgctctgcaaaaagtgtcttcccgtggctcgttgcccttaacagctggtcttgtaggccaggagagggggggtgtaggcagcaccacgtagaagcaagccggagacccctatgccgtttgggtggcagacccatgggcctcaaggcacacaggagggtggctcggcggggagccatgatgcaggcagctaatagatggggtgactttgcaggattgccagggattggtgccatgaggacagaggatactgaacactagctgcagcagccgggccacttgagctcggggaaggcccagagaatttggcagaggtgggaggtaactgcaggggtccccatttgctctttgcagccccccagtcccacccaggctgctgcttacatggggtgccttcatccttccccacatagttaagcccttcttccagccttccctgatcacctcctctccccacccccatgggcccctgggtgt

SEQ ID NO: 30533 - DNA, 1397 bp, Artificial sequence
  DNA replication origin
aggcggatttcaggctctgcgggatccaggggcagcacctgctgctgtcgtcgtcgcttggcacgccccttacagggtgaagaggtggtgttcttggcccggccccgagtgaggcgcttccgcttggaatagctgctgtagttggtgtggcctggctgtttctgtgcccttgtctggggctggcagggcctgccctccgggggctgggaggccaggcccagctcctccatctttggcttcttgcctcctccaccagagttgtcctcactggccccttgtgtgccactggccctgtctcggggagtcaggagcagagccgggccaagatagggccgcttctccagcgggcctttggagagtccatgggcccctgcccggcctttccggctcctcttcttaggcgccagggcagtccccccaggctgcagggcctccggggatgtgaaggcctcggttttgaaacagtcagtagaagacagtttcttactgttcatgagtttgccttttaaggatctgttggttggatttctgcataacggatcagccccagaagttgggagcttctgcccggtgcccacatttaccaggccttcttccacccccactgggctgcccccagcacccttgagcccacggtctttgtcggaaagggatgggctcagaggattaccaggagaggcccctggcgctttacatgcgaacttcttgaggctgggcgaggtgatcttctgcacgatggcttccagcttcaggccccggcccttccggggtggcagcaccttggtcttcatggccccctggaaggctgcccgagaggcgagcttgaggcaggcatcgggggtctccgggggtgggagctttgtggcaggctcgccattgcccttggtgggcttggctttcttgggagaagacatcctcttgaagagggtgggggaaccctcaggcctctcctccttcccatctcccccattgccactggcgttgctgctgctgctgctgcggctccgcaagaccaggttccgcttcttggtggggaccggcgccatgaaggccgacttccttttgagcgcatggaggggccggtcagagagcttgctgcctgcaccaggtttggggacccttgcccgctggctcaccctgccctccttctgggggctgctggagaccttgaatgtggcgggcaagtggctgttgtcgaggagcttcttggtggcacggcagttggggagccggccctcagagggcctccgccgcttggagtggaagatctcctgggttttggtgcgtgaccgaaggatcatggagcgctggtccttgccaggcgtgctgggtgagtctgtctccttggtcttggagcccatcgggctgctgtcggaggccacaggcagggcggccgg

SEQ ID NO: 30534 - DNA, 1119 bp, Artificial sequence
  DNA replication origin
ctggctgggctggcctcttaccatgtccacggccaccttcatggcctcctgcagcccaaagagcttcccggccaccaggtagacgccgccggtccacacggcacaggcctcatgcacccagtgctcctgggcctccccgccgggctctgccggagcctccttgctgcactcatgtttgcgacccttgtcggctggggctgcctcctcgcccccatcctcccggccatcacagcagtagcagctctgcagcctccgggacaggccccgggcactggtgcgcagtgggccctgcttggccgggtcagctgggccgtcaggcctggggggcttcccggcagtggcggcagctgcacactcgggacctttgagtgttctctcaagcggcagcgaggcctcctcacaggtgccttctggccgcaccttctccttgagttttggcttctttttggggaggcagtgttcagggtagtagggcccacagaggtccccaaggtccttgaagttggccgggttttggcagaggcagcaaacaaggcaagaggtactcagggccttggaaaccacaggccccaagtgcatcgtggaggagaggggcaaggagggccgcggctgcaggatggagcctccagggagtgtggccagggaggccccggctgcatccaaggagaacgaggacgaggatgaggaagaggaggcagaggaggaaggcttcctgtggggcttgggcgcatctccaggggagttgacaacagtgcatatggtggtgaacgcgtctcgcttctccacccgcacgaagggtgagaaggcgggggtccggctgtctgacctcagccgcttgcaagaggaaatgtacttgaggcggatttcaggctctgcgggatccaggggcagcacctgctgctgtcgtcgtcgcttggcacgccccttacagggtgaagaggtggtgttcttggcccggccccgagtgaggcgcttccgcttggaatagctgctgtagttggtgtggcctggctgtttctgtgcccttgtctggggctggcagggcctgccctccgggggctgggaggccaggcccagctcctccatctttggcttcttgcctcctccaccagagttgtc

SEQ ID NO: 30535 - DNA, 940 bp, Artificial sequence
  DNA replication origin
ctgtggtttccaaggccctgagtacctcttgccttgtttgctgcctctgccaaaacccggccaacttcaaggaccttggggacctctgtgggccctactaccctgaacactgcctccccaaaaagaagccaaaactcaaggagaaggtgcggccagaaggcacctgtgaggaggcctcgctgccgcttgagagaacactcaaaggtcccgagtgtgcagctgccgccactgccgggaagccccccaggcctgacggcccagctgacccggccaagcagggcccactgcgcaccagtgcccggggcctgtcccggaggctgcagagctgctactgctgtgatggccgggaggatgggggcgaggaggcagccccagccgacaagggtcgcaaacatgagtgcagcaaggaggctccggcagagcccggcggggaggcccaggagcactgggtgcatgaggcctgtgccgtgtggaccggcggcgtctacctggtggccgggaagctctttgggctgcaggaggccatgaaggtggccgtggacatggtaagaggccagcccagccagggtggggagtgtggggttccaaaggacaggcaggcaggcagtcggggagccccttgtttctagtgctacagtgtgggccaaatgtgtctgcagtctcgggacaatctgcagagtcctgagcctctctggggtgtgtgggggaagtggaggcacccatctggctaaggcaggtcacactcacctaccctgtcccaggagacttcccgccggggcccgtatgcccagccaccgccactctcccactcacctggcatcttcaggctccagccccacccagaatccactgggcccctccccatgctgtcaccggagatgccaaggcccagagaacacgaggactcccaagattgaacatcagggctgccccgggcggt

SEQ ID NO: 30536 - DNA, 1344 bp, Artificial sequence
  DNA replication origin
ccttcggcggcgggcgggcaggcgggctccggcggctcctccggccgttggggtggattactacggcagcctctgcaaaagacgcccgcccgccagttaccgacgacctcggacttcacagtccataggccccgcccccagtgtgggccccccgcctaagccccagacccaggcgaccccagagcgcggctggggtctccgcccgaggccgtcggcaccaccccttctggccccaccccgtccagcttcaccttcaccttcgccttcagctccgtgccaccgtcccgcgcccccgcctgccccactctgtcacctatcttggggagctgcagggaggccgtcccagggacgccctccagcccctggctgcccatgccccgacgcctgcgggttttcggcggcggcggcgcgcaagtggacagggacctgagctggacggcggcgggggctcctgggggtgggcggggagagctccctcccctagggctgggccctgcggggctgcgcagccaagggggcccaggggactgtgaaggaggtgcgaggtggggctcctctcccgcttgacacccctcgccctacaaaacactgtggtcccctaccttatgtttgggacatttcaaagaaaagttctcttcgatgaatatgcaacctgtgaccaaagagaagtttcggtggttaggacagggtgggggccccacagctgtggggttttgtctgcagccaggaggggagccgcactgcccgcgaggctccagactgcaggggctcttttcaaagagttaatcagattctgcacaaaaccctccacactccactccactccacggcgcgggtgcggcccctggcctggcagtcttgactcacctcacctcctccgcggagagcttttccccctgagttccacgtgccgcccctcctcacttgaggcagtccctcagtccctccctccctcccgccttactctgccagccacacttgtcactgcctcctaagagactggcctgtgtgatcttgtcttgctccttgtttcttccccactggcaggcaagctcccagagggcaccagctctgtcttcttccctggatgtatgcccagcccctggaagagctcactaacttccagtgagcatgtcatgaacccctgtggacggactggtagtggtgttgcaagcctggatttgagcatctgctacttctctgagcctcagtctccacatctgtaaaatgggcattatgccacctactgtatgcctatcatggagattgaggatgggagtgtatagaaaccatcttggcagcagcagtggctcatgtctgtaatcccagcactttgggaggatg

SEQ ID NO: 30537 - DNA, 1145 bp, Artificial sequence
  DNA replication origin
aggggtggtgccgacggcctcgggcggagaccccagccgcgctctggggtcgcctgggtctggggcttaggcggggggcccacactgggggcggggcctatggactgtgaagtccgaggtcgtcggtaactggcgggcgggcgtcttttgcagaggctgccgtagtaatccaccccaacggccggaggagccgccggagcccgcctgcccgcccgccgccgaaggagaggagccgcctgcgcagcccccgggcctttgagctgctcccagcgctggtccagagccgatccttgatccgggtcccggatcgtggatccggccgcctagggctcagacttgcggccccgggttgggaggaaaacccgttccggagccgcctgctcccggaaccggacggcacagggcgttcttgcccaccccaggggccaggcttgcggagggggagcccgcggagcggccagactccccggggcgctcagcctccggcgagggtgggagacggctttgtcctggggacactttccctctggaatctcaagacgacgtggcacacattccacgtgggtgctgccgccaccccagtcggtcgtggcgtgcagctgggagccctgggcttgggggtgggggtcgaaacagtactggaagaggcggagggcggctcctagctccgtggactaggcgggggagaaaggaagcctttctgagagcgggctaggccggcactggagaggccggagcctttggaacaaaccgtgcggaacgcgtccaggggccttcccgcccagcctttgccagatctctcgtgcggttcgggcaaagccggggtagacctgggctatgctcagttaggggttgcgggatccccgagtgtgggcgggactgggacaccctttggcctctgtttgtcccctttccagtcctccaccccacccctggagcccagcctgggagcgcaaaacccaagaagcggccagaacgcacctccggctccggcggacgcgcgaccgttgtgcaccaccagggaccgccgcgcctactctgcacgggagcagggacagcgctagatttcgtgtacaaaacctgtgtacccctctatatatatgttacatagaatgtatatatgttgggaacatgctcgcttctcc

SEQ ID NO: 30538 - DNA, 864 bp, Artificial sequence
  DNA replication origin
cgtccgcctgtccgtccgtgtcctcagctctgtccacgcttcgataggcctgacgcagcccccagcccagggccgccctagcaacttcctgtacatatgactgtaaaatggtaaacgtgtgtattatatctggcctcgttatatagtgtatatatatgtatacatatacatatatataatatatatgaagactgtaaatgttaagacgactagtgttcttattagtatattgcttcacactgaagattgtgtgtatcgagctgtttctaaaagatgtttattttccttaagagtaaaaaacagtcattgcattcagaaaaaaaaaaaaaaaaaagtcaataaagatacaacgattgttttggaaaatctgcagcccgtggattccgaccagattcagctgggagccgggccaggctttaggttggggaatgggaatgaagggaggggctgggggggggggcatgaatggagtcagggagtcggcctttcacagaacaggaaacctcccccgcccctgtgccccctctccagtgtggcggcaggtcgggagggaggaggcttctttgctgtgagatgaccaggggccgggatgggggaggtgagacgtgccagacttcttgcagggagacccaagctgtagctcctgtcacacaacaggtcctggaagtcagtccatcctcccgtgccacccagggacctgatggggacagagctgggaggtgagaagggacaactgaccccatggaggccctaagggttgacacagcccaaccatgtgccctgggagcagggggaacaggtaggctggaggccatacagccagccctccccactcctcccactaacaaacaaacatcgggaaga

SEQ ID NO: 30539 - DNA, 1012 bp, Artificial sequence
  DNA replication origin
ggcggccccgcggtgcattgctgttgcattgcacgtgtgtgaggcgggtgcagtgcctcggcagtgcagcccggagccggcccctggcaccacgggcccccatcctgcccctcccagagctggagccctggtgacccctgccctgcctgccacccccaggccgtgcagctgttcctgtgtgacctgcttcttgtggtgcgcaccagcctgtggcggcagcagcagcccccggccccggccccagcagcccagggcaccagcagcaggccccaggcttccgcccttgagctgcgtggcttccaacgggacctgagcagcctgaggcggctggcacagagcttccggcccgccatgcggagggtgagtgcccgatggccctgtcctcaagacggggagtcaggcagtggtggagatggagagccctgagcctccactctcctggcccccaggtgttcctacatgaggccacggcccggctgatggcgggggccagccccacacggacacaccagctcctcgaccgcagtctgaggcggcgggcaggccccggtggcaaaggaggtgagggggcagctgctgaccagggatgtgctgtctgctcagcagggaagggcgcacatgggatgtgataccaagggaggctgtgtgtgtgtcagacgggacagacaggcctggcgcagtggctcacacctagcactttgggaggctcagttgggaggacagcttgagcccaggagttggaggccgcagtgagcctgagtgacagggagagtccctgtctcaaaaaaaaaaaaagaccaagcatcttcttgatggttacctgatgacaattcctttcacaaggaatcagtggggtgactgtcatttgtgggatacatgactgcacgtgcgtgactcagtctgtggactttgtgtgtgggctgagactagggtggggagaggggaacccgccaggcccccgccaggtacctgtgtgccaggtacaggcggctggtgccgtggcttgtgtgtg

SEQ ID NO: 30540 - DNA, 1320 bp, Artificial sequence
  DNA replication origin
tgcaatgcaacagcaatgcaccgcggggccgcccgcctctctcggcccccacacccgccaccggcccgggagcagctgtccagccctcctgatgcagggcctccaaagggatcctaccacaccatccacccccctcctcccagggatggggaaactgaggccagataggggcaacccctctcctctggacagaagccttagccaaaaagcagggtctgctggaccccctatcctgtgctgcttgggctaaccccatggtcttctgcagcccctgggggctggggagaggaaccagggaatggaaagctgaatcccccagccctgccaggcccctgaccccacccctcaccttgtcaatggagctgctggctggtgtggtagccaggctgtcctgcaggtacccactggccttctcacagatggtcaggctggctggaccagactctgccttggcacagcccagcagggcccgggcagccttgaaggagtgcagagctgccctgggcaggggtctcctgttgggaccagggcagaagagtgccagtcagaccagtccacaagccctggctgagtgccccccacttccctggctcgagttccctgaggaaaaaaggtggtgactcctcctgcacagaacaaaggctgagtgaggcacagtgcccaggggatgaggaaggctgagcccgggaccaggcaggaggaacctgccgtgcactcactcagactcctgcagcacccggggcaggtgctccaccagcgggcacagccgctcagccgcctcctcatcccgccgcagccagtggatcaccacagctgtcagagaggcccaccacttggccaccgggtctacgcctgcagaagagggagggtcccctgaaccctcagtcacgctgcacgggggagctgagaagggagccaggacaggggccggggactcaccggtggtggtggccatgctggaactgatggagaagctgtaggcaggagcccccgcagcatcagaacagctgttcagcagctgcaggtacccgagggcatccgagaattccctgtggaaggagagagctggctgtcggaacagatggcaggggtcctaggagggtgctccccacctgccctccagagtacagcctggcccctggctctgcaaagtgccactgtctcctcccacaggctggtggggagaggaaactcagagaggaatgaagcgtgcatggcacgcacggtagcccagctctgggctctctccacagggttgaggccagagctattctcagaatcccgccggaggggccttgcctggaggagggcacaacgaca

SEQ ID NO: 30541 - DNA, 954 bp, Artificial sequence
  DNA replication origin
ggcgggctccgaggtgctccctgctgcctgtgctccacccacagcctcatgcctgcttgccttccagggaagcacacaggcgggcacctcactgccaccaacctggcgctgagtgccctgaacctggcagagtgtgcaggggatgccgtgtctgtggcgacgctggccgagatctatgtggcggctgcattgagagtgaagaccagtctcccacgggccttgcattttctgacagtgagtgggttggggggctgggggcttatccctgcagctctctccagaggctccctgggtaagagctacacgggatgtggcagtggttaccagggggactccaggccaagctgggactcggcccggggtctggccccaggctgtgtccactgtgacagcccagtaccctcccctacagcgcttcttcctgagcagtgcccgccaggcctgcctggcacagagtggctcagtgcctcctgccatgcagtggctctgccaccccgtgggccaccgtttcttcgtggatggggactggtccgtgctcagtaccccatgggagagcctgtacagcttggccgggaacccaggtgctctcttaccccttccctgtcccctctcctgtccctcatcctcattcctgtcctgtcccttgtcgcctgaatctctggctgtctctggccaccccagtccttctccctgccatgggttgttgctgtgggggttgcaggaagggaaaggcctgggtgcctctcgttcccattggggctttcagaagcacatgcagggattgatgggcagatggctaattggagaagtgaccccaggcagtgccgctgtggagtaaggaagcggagccaacaatggcatcttctcaagtcggttttcctttggaagcagtgtagggcaggcctcagtgttgtctcctggccaaggctggtgctggtgatagttatgtccacc

SEQ ID NO: 30542 - DNA, 1009 bp, Artificial sequence
  DNA replication origin
cagccgccacatagatctcggccagcgtcgccacagacacggcatcccctgcacactctgccaggttcagggcactcagcgccaggttggtggcagtgaggtgcccgcctgtgtgcttccctggaaggcaagcaggcatgaggctgtgggtggagcacaggcagcagggagcacctcggagcccgccccacgctcagtcctacccatggtgtgcagctggtgcagcttatggtagaccagggctgcgtctcgggcgctggcgctagcatccactcgcagagcacagtcctgctgcaggccccctgcccggcctgccagccagcggcccacccagagacgctgcagcaggtgacggatgaggttccagaggaggctacaagccaggtccaggtgggaggtgggcaggggccggcccagtgcccgcagggccagccacagctgctgggcagcctgggcaaagtctccctgtggatgagggttttccaggtgagaaaagtgaggtcagagcagctgccccaaagctcagaagagccgtccacagcaggctctggaggggtggtgggggtctgcggatgcgtggctaggcacagggaggacgggacagattcatggtgtgcacagggagcaggaacaagggttgacacccagcaccttcacagcctggggtccctgccctgcccactctgccggggccagccccttacccgggccaggtccaggtcagcctgcttgcgatgcctccagaagtacacggcggggcctgagtggggccgtgtgactggctcaccgtagacaaagagaagcaccaaggagacgagcaccaacagcccattgagcagccagaccactgggggcagcagccactgggcccagccagggccatctatggacagagggaaagctggggacacagctcccaggaaatccagagccccaagttcacaagcctgggggctcaccccgagtgtccctcccaaagatgcccaggctggccggtcccacctctgct

SEQ ID NO: 30543 - DNA, 929 bp, Artificial sequence
  DNA replication origin
cccgggccaggtccaggtcagcctgcttgcgatgcctccagaagtacacggcggggcctgagtggggccgtgtgactggctcaccgtagacaaagagaagcaccaaggagacgagcaccaacagcccattgagcagccagaccactgggggcagcagccactgggcccagccagggccatctatggacagagggaaagctggggacacagctcccaggaaatccagagccccaagttcacaagcctgggggctcaccccgagtgtccctcccaaagatgcccaggctggccggtcccacctctgctctcggtgcccagcacgttgcgcccagggctatggtagacgctggtggtatctgaggggctgggaagcccccgggcccccagcaaggaggccaaggggttgcaggacaggcagaggaagacgagcgtgcacagggccaggcgggagcggtccagcatgccccggctgtgcagagacggccgctgctctggctttgcctggtggggttgggcagggtggtgagggcagaatcggagggaccccagagagcatggggctgggaaggggggggtcaggattctgcccaccttactgtgggaccccacgtggctccaggcctcagttattctgtctatgaaatgggaggtaggatctgttagggtcttcccggccctgtcatgaggctcagaggatatggctgggagtggggaagggggcaccgtggcagggcccaaccttgctgtcctcaaagactgggctgtcaggctccgagtcactgccactgccaccgctgccactgcccctgctgccaagggacaaggggctgctctggaaaggtgagccagcatccgaggggggtggggtcagtgtgtcctccacctcagtcttcacgccctccatgagcacgtctgtgttccctccactg

SEQ ID NO: 30544 - DNA, 797 bp, Artificial sequence
  DNA replication origin
tcaggctccgagtcactgccactgccaccgctgccactgcccctgctgccaagggacaaggggctgctctggaaaggtgagccagcatccgaggggggtggggtcagtgtgtcctccacctcagtcttcacgccctccatgagcacgtctgtgttccctccactgccacaggccgacaccagatccttcagagattctgtgggccgaaaggaacagagccaggagtaaaggctggatatgtgaccccaaatcagagcctaggcccttggaggcctagggactactgtagctcctaaagctagcccaggacgctttgatggggctgggttagggccaaagggaggcaccaggtctctttcaggaccagaggtaaccaagggactagagctgaatgcagggctacagccaagggtgaggtgggcagggcagagggtgggccagaaccaagggtggggtggggctagggatggggtggggccgggaggtggagcaaggctagagaagaggccagactggagctcaataaagccaggactcactgcttttgtggacagcagtgcgcagacttaggttctcctgcttgagtttctggttgctgtgttgcagaaagcgaatgtagtcgatggccttgcgcaagacagcagatttattcagctgcacggtgtgggagggagggggagcgcacaggtggcctgtcaggtcgggggttgtggggttggagagccctagcaagggggtgcggagctgctttgcaacattactgcctcaggacctttgcacttgttccttctacctga

SEQ ID NO: 30545 - DNA, 1294 bp, Artificial sequence
  DNA replication origin
cccgctttgggacaggaccaggaggaagcagggaggagggcccgttgtccctctgccacagcgtctgccctattcagcacccctgcctattgtgggcatcttagacttttcaggaagacagtgggagccctagattgtcaaaattgtcagtttttctttcaggcctcagtttcccccatctatcgaagaggctcacacggactggggtaaagggatgggaaaccctgcagttgaaagtccattatgacttgatgacttgtgacctggggggtccacaaaccaggagagtttctacttgagaagccaggaagactggggctgccaccccatcctgttctgccaactgctctaggaaattcccctcctgcagtagcttccctgcctgggtacctgtcagtaggcaatgttgggtctccactcggtgccagctgcctgccaagcaaagcctcgggcagccgtaccaaaaggggtttagtcttttctgttgtacagatgaggaaactggggccagtgagaggaggctgttggtccaggctccacttcaagctggtggtgggcagggctgggagctcaggctggggatcctgagagcactggaggcccccatgggtcctgtagagcattctgacccagtgggtgccaccacgagtgggttagagggccctgggctgagccagataggctgctagtcaccagctgggggagagggcccttggccaggtggggctgaggtgggagtgtgtcccagtctgtatgaggaggaaggagtcaggacagacagcacttgcttttacagagatgaaatcaaagccctgagtggccaggcctgggtcttgaggctacttggctgcaggcaaagcctggacttgagcccagaactctacacagagacacactggttggccatgtggccagcagctggcttggccctaagccttggtctgttccactgagtaatgggttggtgatggcagcctggctcttggcttcttagtggggcaagaaaaggcagagagacaatagatttgggattttgtagacctgggtttgaaccccactgcatgctcttgggctgcttgtggtcctccctgagcctcagtgtcttttcttgtctccaagatgaggtgagctaatcttttgaggtagtctagggtagtggccagtggttggggcattggagtcaaaatagggtctggactcagttgagtctctgactctataagaacttaggccagtaagtcacctctctacagctcagtttcttcacgtgtagaatggggccaatgatcacatc

SEQ ID NO: 30546 - DNA, 1265 bp, Artificial sequence
  DNA replication origin
ttctggaggagtaaacggagggttggagcggttaaggctcgctcagggtgccagcgaaccagtgatttcgaacacagagttctggtgtgttgggccaggacttctctgctttgaccctttaacgaagggggcgggagctgagggccagtgaccgccagtaaccccggcagacgctggcaccgagcgggttaaaggcggacgtccgctagtaaccccaaccccattcagcgccgcggggtgaaactcgagcccccgccgccgtggggaggtggggcgggggccggggccgggccctagcgaggcggcagcgcggccgctgattggccgcgcgcgctcaccccatgcccggcccgcagccccgaagggcggggcggggcgggacctgcaggcggggcggggctggggcggggctgggggcggggcggggcggggcgggcgcgccgcagcgctcaacggcttcaaaaatccgccgcgccttgacaggtgaagtcggcgcggggaggggtagggccaacggcctggacgccccaagggcgggcgcagatcgcggagccatggattgcactttcgaaggtatttttggaggcctccccaccagccctttatacaatgcctccgtctcctgcaggttctcctggggtgggcgggcatgcgggctacgcaacttgagcaggaaagagccccttcccgagggagaaggtgtgacagttaccagctcgctggggaagtggagggctacctccaaccaaattagtgtcccctgcaactcaagggggaagggtttgcttagagacccaaaagcagcatcccgacctaagagggtttggagggagagggtggtcttctctacattctctgcacccgctttgggacaggaccaggaggaagcagggaggagggcccgttgtccctctgccacagcgtctgccctattcagcacccctgcctattgtgggcatcttagacttttcaggaagacagtgggagccctagattgtcaaaattgtcagtttttctttcaggcctcagtttcccccatctatcgaagaggctcacacggactggggtaaagggatgggaaaccctgcagttgaaagtccattatgacttgatgacttgtgacctggggggtccacaaaccaggagagtttctacttgagaagccaggaagactggggctgccaccccatcctgttctgccaactgctctaggaaattcccctcctgcagtagcttccctgcctgggtacctgtcagtaggcaat

SEQ ID NO: 30547 - DNA, 898 bp, Artificial sequence
  DNA replication origin
agtatctgcttgttggtctcaccacattctaggctcagaaactggggagcaaagtaatgaaagaaccaggctgggaggccatggggaactcatgcctggagttcagctctcagtgtgcttttgggtcaaggacgcttccctgtcttaagtcactcatgtcagagcctttgccaagagcaatgctgtgttttgttttgggggtgagggaacacccgcgggctgaggggagggttgggccatgctagagaggccgtctgttgtccttgaacctcccaaagctgggaaataagggcctgggctggacggcggtggcgaggacaggttgcgagagagacatggctgggttttcttgcttagggtcctgaatagagagcaaggttgaggccgcagggaccccagcccccaatggactgctgagtcgctgggtctgcccagggttcaggcaccctctcaggttgcagccaactggggtgtggaccaggcagaggcgctggcctgcagtttggggcagaggcaggctttgctggtggtctacttggctgcaaaatcaactggccaggctctgatcactttgtgtgtgtgtgtgtgtgtaacttttacctttgacaaaagagggaagacaggcccaggcacctcctcaaaagaaccctagagcctgtcaccccttccttacccatcttctgtcctagggactgcagcccttcctggcttcccagggccctacaatgaatagtgggtcgggactcacttggtgactgctgggttgtgaggccttgagggggaggggcagacttcacccatctggcagagggacatcggtgctggcagtcaggaaacccttatttccaggcctcagtttcccggaagtgacctgttttcaggagtggcctcatcccag

SEQ ID NO: 30548 - DNA, 901 bp, Artificial sequence
  DNA replication origin
actccagcctgggtgacagagccagactctgtctcaaaaaaaaaaaaaaaaaaaaaagaaattggccagtagatcagccccaggggagagtgagccagggtttggccaggccttgagtttcagaggctggccatggccagtggcacccaggcccttcccccttcctcggggcatcttagcttagtctgtgccctctgcccaagggccagccctctgttcccaggtcacaccccctcctcttggaaggccccccccgccccacccccatcagagtctttaatgactctgctgcccctggggctcagagagcaaccgccctctcccatcgcgcttcctcagtgggatgggagggggttagagcaggaagatgagacaaataaagacacaataagaggcaggaatatgtggtaaagccaagatgggtaaggggaggggacaggcttgactgttcacagtggccctggccctgctgtctcaggctagtatctgcttgttggtctcaccacattctaggctcagaaactggggagcaaagtaatgaaagaaccaggctgggaggccatggggaactcatgcctggagttcagctctcagtgtgcttttgggtcaaggacgcttccctgtcttaagtcactcatgtcagagcctttgccaagagcaatgctgtgttttgttttgggggtgagggaacacccgcgggctgaggggagggttgggccatgctagagaggccgtctgttgtccttgaacctcccaaagctgggaaataagggcctgggctggacggcggtggcgaggacaggttgcgagagagacatggctgggttttcttgcttagggtcctgaatagagagcaaggttgaggccgcagggaccccagcccccaatggactgctgagtc

SEQ ID NO: 30549 - DNA, 949 bp, Artificial sequence
  DNA replication origin
tgggactttgggcacgaggcctccgtctgagccttagtttcctcaagaggacctgcgcccaggtgcacctggggctccagccatgggtgcgtcccattccgggaagagctggcacacacttgtgcccccggggcagccatgagtgcacaaagggcagcctgtgccactgctggatacacgaccagctgagaacacgaggaccgccgactccagttaggaggatcaaggaagtgcctggtgggagcagaacagcaggtggggtgcagcccagctccctggagggatggtgggcacccatcctcaccctgctgcctccattagcaggccgagagggtgtgctctggaatcccatgagcacctgtgccacatcctcccctgtggctgacccttcttcacagttggtgcagctttgtggtctgtagtgcagggatcaattggcaaatccctttcccacccattccctggagaattggggtccttggctcagatgacagaccaacctgagttggaatcccagctccttggtggccgtcctggcctccaccccctcactgcctccgctcctcctatcctgcccacgcccactgcagggcctttgcacacactgtttcttctgccctcccttccggcccactccctcatatcattcagtcctcctttcagatgtcacctcctaagatgggctgccctgaccacctcatctataatggccccagtgcctggcacaggattggcacacagtagatattgtcagagatggatctgggttctgtggacaaggctgtgggggcaggtgaagagctccctcttccaggaggttgtttggggttcaaggccttgtttgggttgtaggcttctgtgctggtcagcgttgggccctacaagcgcatgccatgaggcctgcccaggatttccctcatggcctcacagaatacatcggccagagtca

SEQ ID NO: 30550 - DNA, 1866 bp, Artificial sequence
  DNA replication origin
gcaggcgctgggcgagccgtgcgatctggacgcggcgctgctgaccgacatcgaaggtgcgtcagggcgggcagggcttgaagctgcgccgggtggcgcgagtagggggcgcgcaggtgtctccctggcctttgtctcccccacgggcgccagctccgtgctgtgctcgcgcgggacttcccggtgtctctgagctcggtgtcccgagcctcaccgagcctccctggttcccgcgctagcgtctcgggccgcgcgcttgtgggtgagggctcctgggccgggccggggtcccttggcggctccgggccgggacacgtgcgcctctacgcgtcccaggccgggtgccgcccgaccggtgactctccagccctgtgatggccacggctgaagctggggacccaggcgtcgccgaagctccgccccagccccagccgtgacgtaattgcgaggttactcacggtcattccctccggcccgagagttcagctcggcgtcggagctcttgcgcatgcgcatgggcgctgcctcgcgcccttcccccgcctcgtgtcgggttctcccggtctgcgacgggcacagcctccgcactcattcactgacatccaccgaatgccaggccccgtcttaggcaccgagggtttacagacagacctgggtaccccctcttttagggaacacaaaaatctcccgggaaaccaaacgggtatttagttgtaccttgggtggagcgaggctgggggagggcagggatgtggctactttgggtagagcggtcagggacttctaagctgagacctgagggtcacccccaggaccagcaaggaaagatgttttccaggccacggcaagggaagggcaaaggcctcgaggcagggcctaagtgtgaggagttagaggcttgcaaaggagtgaggtcagggaggaggaggacgcaaaccgacttggtcggccagggaaagggcggagcagaacagtggcaccggcttccatctttggagcatcaccctggctgtgatgagaaggggtttggggccaatggtggcaccaagtgccaattaggaggcccgttgcttccattttgtagatagagcaaacggaagcccctagcaaattgcctgcatggtttctgtgcaggagttttagcagcactagctaagttgcacttggttgatgaggaaactgaggccaaggtcgcaggaacaagatgcctagactcacagcctgaatggacatgtccatggaacccgtggccaccctggggttggcaaaacagatatatctatgccaccaccactcctgccctactgcagccttgcagatgagcccagctggttgccagccccagaagcttcccagccctccctccttccccctggggctgggctaggggaggaccccagaggagaggccctgattgtgaggcttttccaaaacagcctcccctatccctggcacgaggggttgtccttcactgccctctggagtgatgaaccctgaaatcccaagccctagggagatctgggcctgactcaactaccagttccacatcactgggcccagtgagtgtagtcccaagaggcaacgtgaccaagccaggaggacatgcgctttggggtcagaacttgaacctggacactcctcacttcctttgtcatcctgctcaagccctctcaccctctaaaccttagtttccacctccagaaaaatgatgcaaaccctcccttcatgggcaagttggacaacagaacccgttctgggccacaggtctgatacagacctttgtttgtttgtttgtttgttttctgcagtggcgcaattttggctcactgcaagctcctcctcctgggttcacgccattctcctgcc

SEQ ID NO: 30551 - DNA, 2440 bp, Artificial sequence
  DNA replication origin
tcacccacaagcgcgcggcccgagacgctagcgcgggaaccagggaggctcggtgaggctcgggacaccgagctcagagacaccgggaagtcccgcgcgagcacagcacggagctggcgcccgtgggggagacaaaggccagggagacacctgcgcgccccctactcgcgccacccggcgcagcttcaagccctgcccgccctgacgcaccttcgatgtcggtcagcagcgccgcgtccagatcgcacggctcgcccagcgcctgctccaaagccgcctcgctgaagggtggctcgtccatggcgcagccgcctcctccgggaggcccgccgggcccgccgcctcgtacggcccttcctagggagcgccgccgcggccccggctctcagtcgccgccgccgctccgcgcgttcgtgtcctgccctggcctcagaggcggcccggcgccggcgaaaagttcctcggaaactgggttcccccggccgcagctctgctgggcggtcgaggcggaggcggggcctttcggggaggacccgccctcccagatagacggccccgccccaccttgagagagcgggggacccctgatccccggtctgcgccacaaatctcccctcagccggcccctcctccagagcgccctccagtcattcattttatccagcctcgcgcacaatggcagcggcctctggccggctgctgcgggaacgcgggcaagccgagccccctctctgggcctctgtttctccagcaccaagcaaggaagccgagtggaagccccaggcctgggcccatcccaaacttcatttcctcatttcctagatttgactctttagaacaagacagaccaggatccaagttataggggtcccaggcctgctgtgttgtgagcaggcctgatgtaactgctgggccagttacatcactctgcctcaattttcctcatttgtaacatgggcctaatgatgctttctcacgggcaggctgggaggctagtgacaatgtggaggggagcatgacctgtgagatcagcctgccccctctctgcaaagaaaccagaagattggcctcttgaggacaggagtggccaaagaaagaggctggaatttcgtcatctggtttcctcccagatccagctgtagggataggataccagtgggcccagtgcagctcctgaaggaggaagccagtacccaaggaagactggccccagggctgtctgaccccagatttggcacttattcccaggagcagccaggataggggccgcaaggaagaggtagctgtgctttagatcagagccaggctgccctggatcatcacaagctgggactagatcagagcaggcagccctgttgagaagagggctggaaaccgaacctggttctgtggcctagggacagagccaggtggggcaggaaggagggaaggggtcccaatgaggtgggttgaaataaaccagaattaacattcaggaatctgaatgtgataaggcagtgagctccctgtccccagaggtatgcaagcagagagaagcacccttggtggagggcagtccaggaaactcatcaggggcctgggcctcaggccttcccgaccccagaccttcataagtcaagccatcctgcagactgccttgctcaaactccagatatagcctatctggccacgccctaagcaggagtaacattcatgatgcattttagaaggggtgtgtgggggagagaagccacagagcccaagtccctggggctcagcctggacatccagctccctttgttcctctcccagaagtggctgcggtggaaaattacccagaatagcggcgccagaagtcataggggtcgccaaaccacatctccccaagtagccctgctcaagggtccacccaggacccactccctccagatgaacaactgctggagaacacagagaacaaagctggcttctcctcagtgccccacccccaccaacactctagaggctgcaggaagctggtgacttccctgaaaatttaaacagcccttcccagggagggggtgggataggaagtgctgggtgaagcctaaataccattttcttcagagctaggcaggtgatctgggttttcacctgcttgctgtgtgacctggatccaatacctcacttctgagtctcagctactgtatctataaaatgggaataaccctttctgcagtccctctgcagaggcagggagggtgttttggagtcatcatcacaacagatctgcctcactgttttttgttttgttttgttttgttttttgttttgagacaaagtctctctctgtcacccaggctggagtgcagcggcatgatctcggctcactgcgacctccacctcccaggttcaagcaattctgtctcagcctcctgagtagctgggattacaggcgcacgccaccatgccaggctaattt

SEQ ID NO: 30552 - DNA, 1567 bp, Artificial sequence
  DNA replication origin
cagcccttcccagggagggggtgggataggaagtgctgggtgaagcctaaataccattttcttcagagctaggcaggtgatctgggttttcacctgcttgctgtgtgacctggatccaatacctcacttctgagtctcagctactgtatctataaaatgggaataaccctttctgcagtccctctgcagaggcagggagggtgttttggagtcatcatcacaacagatctgcctcactgttttttgttttgttttgttttgttttttgttttgagacaaagtctctctctgtcacccaggctggagtgcagcggcatgatctcggctcactgcgacctccacctcccaggttcaagcaattctgtctcagcctcctgagtagctgggattacaggcgcacgccaccatgccaggctaatttttgtatttttagtagagatgaggtttcaccattttggccaggctggtcttgaactcctgaccttaggtgatccacctacctcggcccccccaaagtgctgggattgcaagtgtgagtcactgcacctggctatcactgtttttgttgttgttgttgttgttgttgttgttgtttttaagacagagtctcgctctgttgcccaggctggagtgcagtggcacaatcttggctcactgcaacgtcggcctcccgggttcaagcatttcttttccctcagcctcccgagtagatgggattacagtcatgcactaccacgcccggctaatttttgtatttttagtagagatggggttttgtcatgttggtcagactggtttcgaactcctagcctccagtaatctacccacttcggcttcccaaagtgctcggattacagacgtgagctactgcacccaacccgcctcaccgtttttaaatgggttaccacatatgtaaatagaatagctcaataaatattcactccataactgcaggagttaggggaaagggaaagaaggtaagacaaggtcaacagaagacctgcaccccagaaaatccaacccccatggggcacagtccaacgtgggggtgggaagaatttacatctttgccaccaaagaaacaaatctttgccccacagcctgggattaccagggcaaccctcaacgtgagggtaggggaaaacagaagaggggatccatttttcagggggaacatgcttgtcttggcagtttctctcctcaaagatcctgagacctccaaacaagaccctcgggccccggttggctggggagcgttgagcacgcccaaggaacgtggacacaagcccctctgtaatggtgtgcctatcaggggtcagggatccagcctggtccacggtgaccccggcgggcaggttcggcacagtttacttgctgagcgcttacagagtgttcagtgcggtttaaacccattcactcctctcgacagcctcaggcggttgaggctgttaccatcccattttacagatgagtaaattgaggcacgtggagcgggacggtgaagcgacttgctcaggacctcacagcactgctgcccctggttttgtctggactggaggtagccgga

SEQ ID NO: 30553 - DNA, 1528 bp, Artificial sequence
  DNA replication origin
ggagccggggcgcagagccagaccagccccgcccccgcgggcccggcgcagccaatgggcgcccggcccggagtggggtgacgcggcgtcagcgcgtaactcccgggagcccagccctgggtcacatgcgccgcgcccgctctacccgggaggtagggaggggcggcggggacaggctgggctcagcccccagtccagacacctggccaggaatgccgccaggtgcgcgtcccgggcaccggaagggctaacacgggacagccccacccgggactgcgtggcgcgcccagagcggaggattccttccaggtcacccagcccggcccctgcccgacctcggcgttgccaactgggagataggaattcgcatctccccgcttcctctccaagcctcttagagactgagaggcagcttctgtgggtttcgagccttttcgggcaggcgtccagcacgggcagggcctcttccaggacgcttgtcctgtccagccatgccctcggtgcccggagctcagccgtggatggcagggcaggcactgggcaggaaaactgggttgtccactctagccattgcctaggctactgaaacccctccccactcccagagcccccctgcccccctgcccccctgcctggccctgcatatccttcactgctgtgggagccaagctgggacctgcccaggttatggcagaggggccaggctgtgggaagagactgctcagagcctgagtctcccctcccccacttctccatctgtatataatggggtcagatgactgttgacatgggtgattctggtcctagatgacgctcgtggtctcattccagcttgggctctgtggtgagctgggcgagttctttccagccctctctgagcctccatggccagctttgcccctggaggctcacacccatgtgggcacctgcaggcttatcatgagtcactgaacacaccctctaccaaagagctacttgaaccccaaagattgctgcacagtgaggggtgtagctcacaaaggctgaggaagactgatacctgttccctggggggtaactggctgtttgaggagaggccaattgcatattgaatggggtgagtctagccggcaacagggagagtgaggaaatcaatgtaataaggcccctgtgggcattgggtttaccacccactacaccagtttaccgatcaggagagtaaagaacagagtgagacagtgacttacccaacacctacagttaagcctgcaaccctagggaggaatggggtggacaggaaatggcaccagacaatggagtccactcaatttccggaagcatcctacttactccctagtgctgagagtagagattttgcgtcctggaatgttgagggcctgggcttggaggccctggacagactcctctgaggtctgccccaaaagctctgacagggactcctgtaaaataaactgatggcatttctgggtgggtcatgcagacctgtccaaggcctcaggttctgccctcccgctgcccccaggaccca

SEQ ID NO: 30554 - DNA, 1670 bp, Artificial sequence
  DNA replication origin
gtttggtttattggtagtgtcgtctcagcagcgtgccacatggccaccatctgcgggctgcctgctgccctcccaattgtccttggccctctccctgcccagggagcctgcagggaccctcggtgccaggctcggctgctgagccagcttgggtgtgaagcctgggctggcagctgaatgatggagagagggtcaagaaggtgagagacccccaccatggagacccagcagagccttctcaaatgctgataagccaaatgtcacaaggtgacaagtccaaggagtgagaccaggcccatgagtgcagcacaccctgctcttccagagatgccacaaagccccttcagggagagaggggcccaggagggcagaatgcctgagaaggtcgctgagccaggcagaggtgagcacagggcggggccgggcgtgctctttctccatgggcgggtggaggaaagacagtccgggtggtctgctcaggaagcactgcctggggctgggccactctgcccgctcttcctgggaggaaacatgggcagaggggcccatggtgggaggggagagagtctctggctgcagttgtcccaccactcagagaaaagaagtggctgaagctggtcctgactagtgggaggcctgggagcagacacggtggcatttccatggaaacacaggtgtgcaggccgtgtggagctggggatgtaggagtggccagtgcccggtgtccacggggtgcgagcggggacccgccatctggggaggcaaaccacagagctgctcacagggcgaagagggcatcctctgaccgctctggcttcttccggccagaagggtttgaggctggggcaggagcctccatggggggcgaggggaggtcgggaaccatttcagcagctttggctctttcttcaaggaatttatcaaactctgcaatacaaaccaaggcaagggtcagggttggtgagggcaggccaccagaggaagcgcacccttccactccccagcccgtttcctcctctagggcaggcatgaagcccacctaggagcaggtgggtagggaggggttcgtgagctgcagtgtggggggaggctcctggctgtgcccagtcctcctgccctggagggaaaggctctggaaaacacagcccagagtgctcaccctaccgctgaccattttccagatcagcactgggttttgtccattttccagatcagcactgggggtggggcagggtaagctggaggggccagcttctgattaaacaggcaggaaccatcccacctaccccacccttgcccaccaatggaggactgaggagatgctgaggaatgcagtggggaggggggagtgccccatttctatgggcactgagagctagggagcagggtcctctgaagtttccctccctgcggagcggtctggccacagggtctggcagacctggggagaggaggacaggagcacggagaggcagatggagtggggcaagatgagcttggggaggcaggatgtgaagggcaggggatgtgggggtggccatgtgggagaactaagaccccgctgctcccatccagcccatcagctgaggcccaggagaggctcctcccttctggctcagtggcccaagggtgctgctgcgcacctccacaaactgcgtgtctgagctggg

SEQ ID NO: 30555 - DNA, 896 bp, Artificial sequence
  DNA replication origin
cttcccggccgccatcccatctaggaagtgaagagcgtctctgcccggccgcccatcgtctgagatgtggggagcgcctctgccccgccgccccgtctgggatgtgaggagcgcctctgccaggccgtgaccccgtctgggaggtgaggagtgtctctgcccggccaccccgtctgagaagtgaggagaccctctgcctggcaaccgccccgtctgagaagtgaggagcccctctgcccagcagccgccccgtctgagaagtgaggagcctctccgcccggcagccaccccgtctgggaagtgaggagcgtctccgcccggcagccaccccgtccgggagggaggtgggggggtcagccccccgcccggccagccgccccgtccgggaggtgaggggcgcctctgcccagccgcccctactgggaagtgaggagcccctctgcccggccaccaccccgtctgggaggtgtgcccagcggctcattgagaaccggccatgatgacagtggcggttttgtggaatagaaaggcgggaaaggtggggaaaagattgagaaatcggatggttgccgtgtctgtgtagaaagaagtagacatgggagacttttcattttgttctgtactaagaaaaattcttctgccttgggatcctgttgatctgtgaccttacccccaaccctgtgctctctgaaacatgtgctgtgtccactcagggttaaatggattaagggcggtgcaagatgtgctttgttaaacagatgcttgaaggcagcatgctcgttaagagtcgtcaccactccctaatctcaagtacccagggacacaaacactgcggaaggccgcagggtcctctgcctaggaaaaccagagacctttgttcacttgtttatctgctg

SEQ ID NO: 30556 - DNA, 1301 bp, Artificial sequence
  DNA replication origin
aacaaagcacatcttgcaccgcccttaatccatttaaccctgagtggacacagcacatgtttcagagagcacagggttgggggtaaggtcacagatcaacaggatcccaaggcagaagaatttttcttagtacagaacaaaatgaaaagtctcccatgtctacttctttctacacagacacggcaaccatccgatttctcaatcttttccccacctttcccgcctttctattccacaaaaccgccactgtcatcatggccggttctcaatgagccgctgggcacacctcccagacggggtggtggccgggcagaggggctcctcacttcccagtaggggcggctgggcagaggcgcccctcacctcccggacggggcggctggccgggcggggggctgacccccccacctccctcccggacggggtggctgccgggcggagacgctcctcacttcccagacggggtggctgccgggcggagaggctcctcacttctcagacggggcggctgctgggcagaggggctcctcacttctcagacggggcggttgccaggcagagggtctcctcacttctcagacggggtggccgggcagagacactcctcacctcccagacggggtcacggcctggcagaggcgctcctcacatcccagacggggcggcggggcagaggcgctccccacatctcagacgatgggcggccgggcagagacgctcttcacttcctagatgggatggcggccgggaagaggcgctcctcacttcctaggtgggatggcggccggacggagacgctcctcacttcccagactgggcagccaggcagaggggctcctcacatcccagacgatgggcggccaggcagagacgctcctcacttcccagacggggtggcggccgggcagaggctgcaatctcggcactttgggaggccaaggcaggcggctgggagttggaggttgtagcgagccgagatcatgccactgcactccagccggggcaccactgagcactgagtgaacgagactccgtctgcaatcccggcacctcgggaggccgaggctggcggatcgctcgcggttaggagctggagaccggccaggccaacacagcgaaaccccgtctccaccaaaaaaaatacgaaaaccagtcaggcgtggcagcgggtgcctgcaatcgcaggcactcggcaggctgaggcaggagaatcaggcagggaggttgcagtgagccgagatggcagcagtacagtccagcttcggctcggcatgagagggagaccgtggaaacagagggag

SEQ ID NO: 30557 - DNA, 883 bp, Artificial sequence
  DNA replication origin
caccatgcctgagcctccctgccgtgggctcctatgcggcccgaacctccccaaggagcgcaaacccctgctccactgcgcccggtcccatcgaccgcccaagggctgaggagtgcaggcgcactgccagggactggcaggcagctccacctgtgacccaggtgtgggatccactgggtgaagccagctgggtttctgagtctagtgaggacttagagaacctttatgtctagctaagggattgtaaatacaccaatcagcactctgtgtctagctcaaggtttgtaaatgcaccaatcagcactctgtatctagttaatctggtggggacttggagaatctttgtgtctagctcagggattgtaaacgcaccaatcagcaccctgtcaaaataggccaatcaggtctctgtaaaacagaccaatcagttctctgtaaaatggaccaatcagcaggatgtgggtggggccagaggcagtagtggtaacccacttgggtcctttttcgtgcgggggaggctttgttcttttgctctttgaaacaaatgttgctgcttactccatgagtccactgcttttatgagctgtaacactggctgcaaaggtctgcagtttttctcttgaggctggcgcagaccacgaacccattgggaggaatgaacaattccaggcggtaggagcgaacaacttcagacacgctgccttaagagctgtaacactcaccgcgaaggtctgcagcttcactcttgaagccagcgagactacgaacccaccaggaggaagaaactcagaacacagctgaacatcagaaggaacaaaccccagacacgccgcctttaagaactgtaaaactaactgcgagggtctatggcttcattcttgaa

SEQ ID NO: 30558 - DNA, 1277 bp, Artificial sequence
  DNA replication origin
cagggactgctggtcctgtgtgtctgcaagacttagccccatatctggcagagtggaggcttggtgagcatacgctctcacactcattctgcagatgatgcctggcatctgtgctgcatgttgtacactgttgctggtactgagggggtacatggtggtgaaaaggccatccccgtcctccctcctgagcttacatgtagtgtgaatagtcacatcagcagcaaatacacatcagccaggtagtttgaaactatgatgaggctctgacctgacctgataaatggggcatgtgatacagagacagtggtttttctggaagttgatgaagaaaggcctctcccaagagctgatagtcaagctgaaatctgaatgacaaggacaagccaggcacatggggacctaggaagagcgtgtctgccaggtggaatatcaactgaaaggagcaagcctgggtgactggggaagagctcagaggctgccgctgagcatcaggagtgagggttctgggggtgggaatcgcccagatgggcagggtcagcccgagggtctgggggactatggggaggagctgacgctaggggtcatgaaagccactagaaggtgttgtgtaaaagtgtgcagtgatagggtttgggttttcaagggtccctctggctgccacatggaggacggactgtaagaggacagtaaagaggcaagcagtccaggccaaggacgatggtggcttgccttggtggtgatgtcgcgacagagagaagctgagaaactggcagtggagtgaatgatgcatgcactaaagcaggccctgacaacatagtatctctgtctgggccctgacaacatagtatctctgtctgggcccttgatgcccacactccttccagagacatagacatgctgccgcgggacccagcgcagacatccgggagagccttcttagcgtgcagaccccagggatggagccaggttcctcaggccgaccctgctgattttgtgaccattcatcagtggatgtgctggtgcaaaccggatggcattgtgcaggatcagaaatggtggttccaacacccccacagtactcattatacagactctaaggttaagaagacctccaggggaaatctcagacttcaacctctacctgtaactgcttctcttagaaagtgccagaagcctccacataattgaacttttggaaacgaccctgttggaaagttgaaaccatctaattatcatgagctcctctttaactgggccccactgggtgccccaccagg

SEQ ID NO: 30559 - DNA, 1702 bp, Artificial sequence
  DNA replication origin
ggctcaggcggcgcttccgcccattggcgggaggagaaaacacgtggcgcggtgcgcgagcggcccgctgggacttgtagtctcctcgccgaggcgcggcgtggagggggcggggcgaggtgcgtttgtgatgctgattgactgggggtgtgcgcaggaggcgcgcggcggcgacggcgcgccgtaggtgtcatgcggaagatggcggcgtccaagggaggttgagggctctgaggaggcgttgagaggtttccgtacagcccgaccgtgcggctttggggatcccatcgctctgtgtttcctgctccaggtttcgcgtctcgcatcttcccagaccctcgggcgcgatgtggaggagctgcctccggctgcgggacgggggacgccgtctcctgaatcggccggcgggtggccccagcgcttctatgagtccggggccaaccatcccgtctccagcccgggcttacgccccgccgacaggtaagaccatgacatgttcttttgggttggggccgagctggggtaaggtgggcttcgggcttcggctgtgcaaagcgaagtaactgaggcagggttcaggctcatgaggttatgcaggccagtcaggtctttttacagatgagaaagtgaagcccagacaagggcagacgacccgagagggaacagcgagtcacgcacgatacagtaattgatatttggcctgtgcaggttttctcaaagcttatggctgccctccctttaataaggaaagcaggtgtcatctttgttttcaaaaggggaagtttgggctctgaatcaggacttcgtctgggttacaggcagactctctcagaggtttgtggtgtctgtctgactgttttccgtgtctccactgcccaacacaagacctgcccagaagggacctagaacctgggccttcattcctccatcccgggcacttctgctgcaggtttcctgactttccctcctaccacaacctctgccatctgcagccttctctcctaaatagaaattgacacctccacctctgactgtggagtcacctccacctccaactctgatgaagcttagaagtagtggctctttcattgctgatggtgagtggtgtcagggtaagagtgagaatgactcatttcagtgaatgaagagcagtaacaccctcccaccattcaattagttttattgtgctggaggcaggaggcacggttgtctttaagacccacctgtatgtattggtagagaagctcaattaaagaagaaaaaggcccacctgaatgatgttcactgttcattgcaaaaggttataatattctgattaaattgtggtttataatatcctgataagggacatacaaagaaactgtgagaacacagagaatcgcttactcccatcttggggatgttcagggtttagaatgggtcttgggtgaaagggcgtttgtttaagctgagccatgatagatgagtaggagttcagcaaaaaggtgggagagtgttgggtatctagaacgtgtccagggtgacagcaaggtatgagggacttttccctgacactgcctgttttagaaaatccagaacttcacaggcagtttggcattgtggcaggagtgcaaatctaggatctgatgctggctgaacctctgaggtctgtgtgatcttgggcatgcaactacttcctcatttttctccatgcgttgaagta

SEQ ID NO: 30560 - DNA, 1105 bp, Artificial sequence
  DNA replication origin
gtcccgggtgggaagcgccgggtgcaggaggccccggcggcgagggcctgttccgcggctgcggggtcgaggagccgaagcgggcacggcccgtgagcgccgcgaggaggccctcgggccccggcccggcccggcgctcacctgcagcaccacctctacgtcgtacgagttccccttgctcttctggtggccgcggaacttggagccgctgtagagcaggctggtggccacgccgggctgctgggtgttgatgggcggcggcgggatgagtgaggccgcggaggcagcggaggcaccggccggcgggggacactcggtgcggaccggcatcgcggggtcccccggagccagggctggggggagtgggagaggaaccgccgccgccgcgcgggagccgaggagggtggcggggagggagaggccggggcgcgcacgcgcggggtgggggcgggaggggcgaccacccgcccgctgcctgcggagcaagcgctccggccgccaccgggacccagggacctgcgagcagggcctcccagtcctgagctgggtccccctcccgacttgccctcgcgcacacatacacacacacagacactcacagacacacaacacacaaacacacacagacacacacacaccccgccccttccgattggctcaggcgagcctggggggcgggagcaggctcaggcggcgcttccgcccattggcgggaggagaaaacacgtggcgcggtgcgcgagcggcccgctgggacttgtagtctcctcgccgaggcgcggcgtggagggggcggggcgaggtgcgtttgtgatgctgattgactgggggtgtgcgcaggaggcgcgcggcggcgacggcgcgccgtaggtgtcatgcggaagatggcggcgtccaagggaggttgagggctctgaggaggcgttgagaggtttccgtacagcccgaccgtgcggctttggggatcccatcgctctgtgtttcctgctccaggtttcgcgtctcgcatcttcccagaccctcgggcgcgatgtggaggagctgcctccggctgcgggacgggggacgccgtctcctgaatcggccggcgggtggccccagcgct

SEQ ID NO: 30561 - DNA, 1626 bp, Artificial sequence
  DNA replication origin
ccaaacgtgacccacccagggatctcacctccagaattctatgactaggtgcaaaacaaaccgaaaaacccctgtaccttcatactcgactctcacattttaagaagaggatcactacattaggcatacagttatgaagacaaaaatatttcagccacaatcgtatttccattataataactatcgtggctcatgatagaactttacagcccaaagatatgattaacatgacgatgctgtttcaagtaagcagagaaaatgatttattcccacaaagcagtatgagaataaaagagtgatgagtgctccgcagttagcagaaagaaaaggcaccctcattgtcttttggatgggagacctactcttcagaagtgaaactaagatttgttttaaatgaccaaaaggagagcttgaggaataaatatactgtacattccaccctcacaccccggggggtggggcgggggggaggcagtggggcagcacacagtgcctttcagagggacaggtgtttggaggggcttctgggaacagcctggcagatgaggtgtcagactaaggaaaaaaagggcaaagggaaggggaaaggggtccttagtcaggcaggggtaggtatagaggaggaagagttttgtggggaggggagataaaagagtattcaccactgccactccatttcagctggcaaaaagtgtcaagcctgagaggagtgaggtgtgggaaaggcccagacaagtgaagctgtacttccgaagctgatcagggactggcagcaggtattcaggaatccaggtcaaatggggggaggcgactggacatgaactaaaattgggtgagttagatttcccagtacatgggtaccagagactaagaggaagccctgtgcctgtgtagagaaaagttaagaacaggaaagagggtcccctggaaccaggatcgagcaagacgaaggtatggggtggggaagtctggatagaggccaggaagactgggaaaagactgcaaatggtcccagagcaggggcaggaggcctgggggtggagaagctggaaggagctgggtgcctggaccatgaagagacagaagcagtgagtggaacaggggacccaggaggcaacatcccaacagactgtgagcagcactcagggagtgagtgcctggtcttgaggtgaggccagggcctgaccaatcagttgcgggttaggtgctcccccgtctgggggtctgatgaagccctcctaaggagatctcaggaggaggaagaccccaaggtctgcggattcctggaactgaggaaggggcaggaggacatgtctcaggtctgagagaatctgacgtgggcccagacatggggagggtcccaagtctggtgaaaccaatggagagttcttcagggtctgaaaagggctggtggcagtccctgatctagggacgacaggtcatggggaggaaggacccaggccttctccgagtcatgaggggcttccggatcccagacgggccggtcacgggcttcaagtctgggagtgttcggggtccgccaggagccggtcacgacgggctctgggtccgaaggggcaggtcagggctggggctcggagagtgtgagacacaggctgggaaggt

SEQ ID NO: 30562 - DNA, 2397 bp, Artificial sequence
  DNA replication origin
tgccggtcgtagtagtcgtcgccgtcgcggtgatagtcataatactcgcccaggtcctggaagccctcaagcccgtacagcgacttgcgggagcccgagtgatggaatggggcctcgtcctcgaagggcaggaagcccaggggctcgcctgacgcgtagatgctgcggctgcgggggaacctccggagccggcccccaggccgcaggatctcggcacccgacgggaaggggagtttgcgggagcccatgcgggagctcgagcgctgcagccaggcgtccactgtggcctgttcgctgcccgactcctcggccttcttgaggaggaacttttttgtgagccagttgatggccgtggacgctttgctgagtgaccgggcgcgcggccgcaggcggccgtagccacggcggcctgggaagcggatcaccatgaaggacggcttcttgcccttcatcgcccgcttcttcttgcccatgcgcatctgcgtcatgagctttgacgtggacttgagcacggtgcgggccttcctcttgcgcttggtcttctgggggccggtgtggaggccccagaagaaggccgaggcgctgcggaactggcccttcttggagatcttgggtgtacggtcgcggaagcccatgaacagccgcgacgtccccttcaggctccgtttgggcttctccggctccggtgccttcttccccttcttccctttcttggctttcttctcctcatcttcctccttcgccatggtggctgcctgctctctacagggcctggggccggtgtcacgggctcagggacttggagacacagggacctgctctgtctcttgcccgcggctggacacgcggcctcctcgggctgtgagcagacccgactggccctgggtggcgtggggagggccgagccaggattccgggagggcggatccataattcatctcctctagagcgccttgggtttcaccctagagcagtagtagaaagtgtgtgggtgttgtttaccaggatggggaagcctgcctatgaggcctgtgctgggggagacattctggcctcggagtcgtcatggcaacatcagtgctcatcctggttaggccctccctgggccacagctggctcaaccccatgaagggagcccttgggtcacttcggcttcacagaggaagacattgagccacagagatggaatgccacctgccctaaatcaccagcacacctgcactgggccagaagtggggcctagggtgggatggccaaagcccaccaagtcatcttggaggagaactttgaaccctctaggtcctaggcaagggaggaggggaatgggcagagcaggtgctgggctgcggtcagtgtaacaggagctggctggctctcaggagctgaataatacatggggtggggagccaggctgccggctcagaaggcagggcaaggaggggcgtttcagtggaactccacttgtgtgtgtgtgtgtgttggggcgggggcaggggtagagaggcagaaatggaggttgggtcaggcctggctcagaccctaggctctgtcactgactggctgtgtgggtccaggaaagtccttgtcctctctgggcctcagtttcctctgaagaatgggagtgataagctatgccccatctccttcaccaaaaggaagcaagacctgatggagctgctgggtaactggagatgcctcctgctggctcctttctggggtccctgcctagccctgtcctctcctcttactttctgccctggctgagtaggctgtggccatgtggttactgccttctctgggcatagctgattgcttcatatggcctgacctaaggctgcatgtccaaagtctggttggtggccagtctaactcacttttgagaacctgcactaaaagaggtagggggtgggaaaaactgggcaggccagcggaggtggggagtggcagctctgagacctgaagcctcagaaccagctctcctcctcctcttcctcctcaagatggacctcaactcactgaactctggttcactcttttggtcccagagctaattctttggttgtttaaggtttagcataggagaccccaaagcagcaaggttctggccctggttctgccacttgccagctccacgccctcagatcagtggcttcagagcctcaacgtgctcagctgtgaaacagggacagggtgaggccttcccaggtaagtggcaggagcagagaggggaccatgcagcaagtgaggtctccccctctctgtctgcctcttccccctgctcactttctctggctcttcactttcctcttcttcctgctcctcctccccaagattcacctggagccagtcagtgcccagccactcagaggagttgcaccaggggctgttggtgcctgg

SEQ ID NO: 30563 - DNA, 1492 bp, Artificial sequence
  DNA replication origin
cggcccagggcggcgggtggcggcggagggagccgtagggcgaggccggccggggcaggcccgagagcgccggggagagcggcggcgcgggcgggggcccggagcttgggggccgcgggggcacgggcggagacaggagcgcgctccagtgggagagggtcctgggcgcgggctgtggcgcgggcgggcggcgcgcgtcgttgctgctgcgagcgcgtggctgggccctcctcagcacgatgggcgtgccgggcttctcggggtccatgccagccagcttgtagccgaagcgtttgtaggccgcctccctgacagcagggccgcccgcccgggccttctggctgcccctgagccgcgcgatgggcttcttctccgacagcgtcttcttgaggaaccgcgcaagcgaggtggcagggcgaggcacggggcggccaaactcagggccgaagcccaggccccggtgggcgccgaaggccgacagcgcgcgctggaggttgcgctggcgcggcgtgaggaagccccagaaagggtggccgtagggcacagcggaaaccgggggcagctcctcctcgtcctcttcttcgtccgcatcccccaaggggagaggaatgtccagagagggtggcaggggcacctccagcttctccttcccaaacagcttcacctggggtcgcgggaagaggcggaacttgcggatgagggacagcttggacctggcgggcttatccatgccttgctgctcgaagaaggcggcgctgggcaggcggaaggaggtcccctgacgctctacgcccgcgtcctctggttcctccagctcggcgatgtcatccatggcgtgggcatacgggttgtggggcgacgggatgggcggtggtacccaggggtacacaaaggccgaagccgactcctccgggtaaaaatagggcacctcgggggggtagatggcctcgtccccaccgccatagacgccttcggcataggggacggtgtagtggactccgtagggatcaaagtagggtacatcgtagggagtgtggtatgggaggtcatagggtgggtatggcgcgtcgtacggcgcatagggatccaggtagtagccataagggtgcgcctcgccctcgtacccatcgtggtagctgtaaggagacgagtaccccgacgggggcgcatatgggggttcgtaatcgtcgtagccgtagccgtaggtgtaccccggatcaaaggggccaccgtaatagtcggggtggtagtagtcgtagggatcctcgggcgggtacccgtagtagtggtcgccgtagggtggccaggccgggctgtaggggccgaggcccgccaggtagggttcctgctcctcgtagcggtggagtgactgccggtcgtagtagtcgtcgccgtcgcggtgatagtcataatactcgcccaggtcctggaagccctcaagcccgtacagcgacttgcgggagcccgagtgatggaatggggcctcgtcctc

SEQ ID NO: 30564 - DNA, 2014 bp, Artificial sequence
  DNA replication origin
cgtcgcggaggcgagcttggtcaccgctggcctcgccccagccctcgctgaggagctcgccgggcctcggctactgctcacccttggcgcccccgtcgcctcagctgtccttgcgcacgggccccttccagccgcccttcctgcccccggcccgccggccccgctcgctgcaggagtccccagccccacgccgagccgctgggcgcctgggcccacccggctcgccgctgccgggctcacccaggccgccctcgccgcccctggggctctgccacagcccgcggcgcagctccctgaatctgccctcgcgcctcccgcacacgtggcggcgcctcagcgagccacccactcgggctgtgaagccgcaagtgcgcctgcccttccaccgaccgcccagggccggggcctggcgggcgcccctggaacaccgggagagcccgcgagaacccgaggactcagagacgccctggactgtgcccccactggcccccagctgggacgtggacatgcctcccacccaacgcccaccctccccctggccaggaggtgcaggcagccgccgaggcttttccaggccaccccctgtgccggaaaacccctttctccagctcctgggccctgtgccatcccccaccctccagcctgaggatccagctgctgatatgaccagggtcttcctgggcagacaccatgagccggggcctggacagctcaccaaatcagctggcccaacccctgagaagcctgaagaagaggccaccctgggggacccccagctgccagcagagaccaagcctccaaccccagcacctcccaaggatgtcactccccccaaggatatcactccccccaaggatgtcctcccagagcaaaagacattaaggcccagcctctcatacccactggctgcgtgtgaccagaccagggccacatggccaccatggcaccgctggggaacactgccccaagccgcagcccccttggcgcccatcagggccccagagcccctgcccaaggggggtgaacggcgccaggcagcccctgggcgttttgctgtggtcatgcctcgtgtgcagaagctgagctctttccagcgagttgggcctgcaaccctgaagcctcaagtccagcccattcaggaccccaagccaagagcctgtagtcttcgctggtcctgcctctggcttcgggcagatgcctatggaccctggccacgagtacacacccatccccagtcctgccacctgggccctggagctgcctgcctgtcccttaggggctcctgggaggaggtcggcccgccaagctggcggaacaaggtatggaggcacagattacacggagggtttgagggttctggcctaggaaacagggcaagagagacagcctgaggagccctgtgcaaccttggagagaggctgcttgctggggcctcagtctctgggtctgtaagttggggagaacagcctggacctcccagaacctctggagggttgaacaaggggatgcccagcacaggcaggcccaggacagagacgtgggaaactgcttccaggtcactctggggaaggatctttgttcatattcggcttgggccctgggcagccctgccctgatccaatctggatgacaggtctggcccctaacttcccctcagagattttggccaagccagatgtgaaactgccggacatgcctatccatcctgttccaccgcacatccaggtctctgcagttcctcctgcctcctactgaccctcccccaaattaaagcctcctgtttcctcagggtttttgctgccctttgaagtcccctgggctgcaggattctggaataggtcagggtgaggggctcaggatccaaacttccagactcctcattgcacagagggaaaactgaaccaggagtccttctggaaccccatgaggggtgcagggtaggcagcccttcggatgggtgcccagcccatgcctggctgccacactcaaggtggaactcgagcctgatgctggg

SEQ ID NO: 30565 - DNA, 1947 bp, Artificial sequence
  DNA replication origin
ctactgaccctcccccaaattaaagcctcctgtttcctcagggtttttgctgccctttgaagtcccctgggctgcaggattctggaataggtcagggtgaggggctcaggatccaaacttccagactcctcattgcacagagggaaaactgaaccaggagtccttctggaaccccatgaggggtgcagggtaggcagcccttcggatgggtgcccagcccatgcctggctgccacactcaaggtggaactcgagcctgatgctgggtggcccttggctgaggtgcgtggtcaccggagcctctctcaggatgccggggtggtgggcggggcaagcaggggcagcaggtgcgtctcagcctctgcagaccatgcctggcggagcaggcagccagccgggcccaacaatggcaaccggggcagcctggctgctgagggggccctggccccggcggcggatgccccgcgctgtgtgggctgcagcgttgcgggagcggggcgcagggcgtctaggggtgaggggcaaggatgcctgggtcctccttaccctggaatacgtgagtggctgaattattcagggtctgcggctgctggcaagcacgtgggcagatgggtgggccggaggccagggccgaaagggtgatactcgctgtgccctacttagcagtccagcgacaggcatgcagggttccttcctggtgtcctctttcctcgcctgctcagggtgcagctgggattggaaaggctgagggtgtacacgtgtgtgctcccagtcatgtggatcctgcgcaggcctgcatgcctgagcatgtgtgcaagtgtgtaccacagccaaatgacgaaagctagtgtatggggtctgagcagatgtggcatccctgggggtcagggttgtttgcccaccctctgcccatgtgcacagacgtgtgctcacagaggagaccctgcagcccaaaggtggcatcaggacttccattcaccagacccccagcatagggagggacccagctgtgcgcccacatgtatgtgccaagtggacaggtagagcatgtgcctgcacaccgtgtgcctccagccgggccccacaggcctgcgtatgtgcccacaggcctacaggaacacctgtgtgcctgggagttgtatgagctgtaaatgccattgagtgtgggtccatatgcaggtgtccacgcattttccccaggatgagcatggggttgtggtgctaagacagtctccatctctgccctcctagaggccccatgcaccaggtcacaagtgtcctttgagttgtcacacaagccaacatatggggtctgctggtgctggaagagttgcggttgggagggagctggcccatgcgcccatgtacctgcatatgcctttgttcaccccctagggcaggacacttgggagctcatgggagggcctgcctgggcactgagggtatgcgtgtgtctcatgtgtgagggtcgcatgcaggttctgggggccacagcattctgtaatgaggagacctgcaggacccacctggccttggggttccctccccaacaatggtagcaggccccaggtatgaccaagccaggggtcagtgggggaggggggtgcccttcaacctgcagacacagcctctctctctcacacagatgcactccatccgcaacctgccatccatgcggttccgtgagcagcacggggaggatggtgtggaggacatgacacagctggagtgagtgggcagggccggcggggtcagcaaggggtcaccatggggtccccaccctcccagccagagcagctcctcctgcagttgcctctcacctcccaggacattttcagagcctcagtcatgaagtgtcacaaagactaaatgtggtgtgctttgtgagttagacggactttggttcaaatcctagccccaccactcaccagctggcagacgttgcaca

SEQ ID NO: 30566 - DNA, 1126 bp, Artificial sequence
  DNA replication origin
cacatgacctgagagtccacaaaccctgctttgcctttttgcttcacttcccctttatggtcctgtggccctgagaaaatccctttctttccctgagcctgtttcctcatctgtaaaatgggtttgatggcctggcctgcctcatagagttccagagaagggttaagaatgttcccaaatctccctaaaggacccccttagtcacaagacaagaccctcctgtttgcctcagaccttttacccacccctaggctggaggttcgggaccatccacgggcgcgtgggccgcttcccttcggagctggtgcagcccgctgctgcccccgacttcctgcagctgccaacggagccaggccgcggccgagcagccgccgtggccgctgctgtggcctctgcagccgctgcacaggaggtgggccgcaggagagaggtgagaccagtgtgggtggggtggggcggggtagaccagggggaaggggccgctgcagaaggggtgaggcgagtggggataaggtgggccaagggcctggccaggctcttggggcgtggctgatcttggactagtgtgagggtgaaccaggtagagtgagccgcaggtgagacccgggagatgggaccagagatggttggaggtgtggccaaatggggtagggaaggatgaagatcagctggttgtaatcaggacaatggggtcagaccagccggggcccgccagttggtgaagtctactgggtttggggcggtgccaggtgagtgggcggcttgtggagctagcgaggggcggggtcagctgtgacgtggcagttgcggaagtcaaccccgggcaagggcgtggccaagtggggcagggagccaggttagcacagcaagtaaaaggcgtgggcgggctgaaggggtaagaacaacgggatgcgggtgggtccacagggatgggtgggtgggcggcttgagaatctgggtccagtcagctaggggttgcgttgtcagttttgaccgaagggctaggcgtggtgtggccggactgggccttcctagctccgcctcttctgcagggtcccccagtcagggcccgctctgctgaccatggggaggacgccctggcgctcccaccctacacaatgctcga

SEQ ID NO: 30567 - DNA, 1049 bp, Artificial sequence
  DNA replication origin
cccataacggacactgcattggaagcttccctgtgttcctccctgactgctcttgagctaggactctcccctctcggagccccggtgagggacagcacagattctggaaccaggcagcctgggtttgaatcatcactaggccacatactcgctgtatggccttgggcaagtcatttcacctctctgggcctgtttccctatatatacaatggtaataataataatgccctcctcattgaattgtttggacgattaattgggctagtatatgcacaggtcctggcacatagtaaaaacttgataagctttttaaaaaaatgtccattccaggctgggcgcagtggcttacgcctgtaatcccagcactttgggaggccgaggcaggaggatcttgtgcccagtagttccaagaccaatttgacaacatggtgaaaccccatctctgctaaaaacagaaaaattagcggggtgtggtggtacacgcctctacatagttccagctactcaggaggctgaggtgtgggaggatgtcttgaacccgggaggtcgagattgcagtcagccaagatcgtgccactgcacttcagcctgggcaacagagactctgtcaaaaaagaacgaggaggaggaggggaagggggagagagagagggagacgggtgataaggaactggcatgggcaacagccatggcaaacagcctgggcaaaggccaggaggtgagacacagtatgtttgtagacctggcttacaggatgaggaccaggctggggctcagtgtacatggaaagagaggagaggaggagccaaggccagaagagtcttgaagaaaagctttgagtgccaaataaagcaggggaactttatcctgggagacatgggagattttccagcagatcccccccgacccccatttgttggagccctccagtgcatcctgcacggctacgcctttttgttttgttttgcagctctgtcgcccaggccggagtgcagtggcgccagctcggctctctgcagcctcaatcccctgggctcaagggatcctcc

SEQ ID NO: 30568 - DNA, 1025 bp, Artificial sequence
  DNA replication origin
gccccggggcccccggagggaggggggtccttagcgccgaacccccatgcgtgagtgggggacccggcggggggcgtcgagggtccgggcgtggggtagggcctcaggagcggcgggtcatgcaacggtggcgacaacggggcttcttcctcctccaccttctccacgtcccgcggggcaggggcgccggcagcgcctcatgccgcggagggctgctgcggagacgcggcccgactcccgaccagaccctcggacgcccggcccggcccgcactttaaagctctccgcacgacgtcacgggcagccagcccgacgtccgccagcgccgctccttagcgggctcctcaccgcgcacgcgcagtgctgccggccaccgcggctccgcgcgctacgggcatgcgcgtgcgtgcaggccgggtcggcagaggcgccggcgcaagcgcagacaggaaccgcttgccgtccgccgcccctcccccactctctgaggggcttcaagggaacgctctcaaatagcaacctgtcttcacgccgcgccgcctccaggaccgaagggctccctctacaggggtgcgctcatattgccaacagtgtcgccgtgccgcgtcacggcatcgtccgaacgcccgcagacgcctcaaccccagggcgcattcaccagggaaccgccacaacgtaggccgctccgttacctccccctttggcgcttccacttctttaattgggccgtgggccacgcgccgggcaggccctgactggagtttccggaagtcggttggtaatcatgcgtgtcaatcaggcagtctccttagctactgtgtccgtcacttaattagcggctgggcgagcagcgaggacccctaaaggagaaatgggtggttaaataagtgcctgaatggagactccacctgagtaaagcccttagaacgcctaaggaaacttctgaaacccgcgaaaacttctcagactgcgggacctgcagcacccggccccagttctgaacccagataggaacgtccggcaga

SEQ ID NO: 30569 - DNA, 1887 bp, Artificial sequence
  DNA replication origin
gagggtctggtcgggagtcgggccgcgtctccgcagcagccctccgcggcatgaggcgctgccggcgcccctgccccgcgggacgtggagaaggtggaggaggaagaagccccgttgtcgccaccgttgcatgacccgccgctcctgaggccctaccccacgcccggaccctcgacgccccccgccgggtcccccactcacgcatgggggttcggcgctaaggacccccctccctccgggggccccggggcgcgtccccttagagccatgcccggctgccccgcccgccccggaggaccctagagcagcgtcgtgggggccatggcggccgccagcggctacacggacctgcgtgagaagctcaagtccatgacgtcccgggacaactataaggcgggcagccgggaggccgccgccgctgccgcagccgccgtagccgccgcagccgcagccgccgctgccgccgaaccttaccctgtgtccggggccaagcgcaagtatcaggaggactcggaccccgagcgcagcgactatgaggagcagcagctgcagaaggaggaggaggcgcgcaaggtgaagagcggcatccgccagatgcgcctcttcagccaggacgagtgcgccaagatcgaggcccgcattgacgaggtggtgtcccgcgctgagaagggcctgtacaacgagcacacggtggaccgggccccactgcgcaacaagtacttcttcggcgaaggctacacttacggcgcccagctgcagaagcgcgggcccggccaggagcgcctctacccgccgggcgacgtggacgagatccccgagtgggtgcaccagctggtgatccaaaagctggtggagcaccgcgtcatccccgagggcttcgtcaacagcgccgtcatcaacgactaccagcccggcggctgcatcgtgtctcacgtggaccccatccacatcttcgagcgccccatcgtgtccgtgtccttctttagcgactctgcgctgtgcttcggctgcaagttccagttcaagcctattcgggtgtcggaaccagtgctttccctgccggtgcgcaggggaagcgtgactgtgctcaggtaacccacccgggtggagggggcggccctgcgcctgctgccttagctacccaccctggcccagaaagcagcagcccgtaggagtctgcgttttttacagttctgaccagttcttctgtttgtagattgtagggagcgagagaagggttttgtgtttaagatacctatagcaagaaaatagggaaccgatgtggaaatcctgtccccgaaggcaggtttgacgggatcactgacttggctgagaattcatcgaaagccatcttttcagaaggctgttccctttgatttttttttttcccaccatccatttcttagcataagtccctttgtgattttccggttttccattctggccttccatttacaaatctatgctttaaaattttttttttttttaatttatctaaaagtctttcttgttctgccatttttggattccttaacagagaaagtagtcacaggcaaaggccccagagattatttaattgaagcacattctccattcccaggagggggagtgacttccctggagttgaacagattagtggttgggccaggcatacagagcagcacactcttaaaattcttccctcctggctgcagaagagcccatcagttctttgtaagaacgtgttacttgtagtcaggactgaatacaacagaatacagctggtctcttgactgtttggccttacagttgcgtgagcagcagaacttaggcttttggcctatattcggttcccagatcctgctgagaattagctcagtgccctggcccccagaggagattgccatt

SEQ ID NO: 30570 - DNA, 1738 bp, Artificial sequence
  DNA replication origin
ccgccccccgggcccgacgtggctccgaccccgggcccccagcccaggcccccgtcccgccccctcccgcccgagcccgggcccgggccgccgccgcaccttgttgaaggcgaaaagctcctgcttgagcttctcgcgctgcgggtcggcgccctgccgccggaaccgaaacttcatcatcttgcgcccggctgcaggcgcctcgcccgccgccgccgcccgcaggatgcgccgcgcggccccgcgggtcctaaggcgcgggcggggcgccaggcggcccgggcgcgggcgcgcggggccgggcctgcacgggggtgggcgccgggcgcgacggacgcgccgcccgaccagtgagcgagcccgccgtgccgcccgccccgcccctgttggccagacaatggtgaactgggcccccgggctcggccgggctcgcgaagggacgcccgcctagcatgcgccgcggcgcggggcctgccgggacttgtagtccatgagccggggctccagcgcgggcggctggggaagcgctttggagggggattggcgcacgttcccgggcttggaggagactttttcctcctcccagagagcgagcgacgtgcccactcatgtaatggggcagccctgttccgaaagccaagacagctctgactggaacaactccctggcccctctgcgcctcagtttccccatctacaccattggtcaagtgattgccaagtttatattttaccaatttcacagaactccatttcgtctgttccccgctctgtcagagcacctcccaccgccgtgcttttgccttggctttgtagtcaggaattctttcctcacccccagcccctggggaactcctacacatctttcaggacccaacgcaaaaggctctgtgtcacagcacaggggattctttcttagccaaagaaagagacgggatccccaggaggtggcatttgggactgttctggggttggattggagctttacggagatgggggaaggacctccccccgcagagaacagcgtctgaacaaagcttagccctgcccctactctcaggggccgtctgcctgtccccacccacctcccaggccttttctcatctggacaatggcctcgaggctgaacctttccttccaggctgaggataggccgcctggctcagggctggggctgcgggaggtcctagaagcttaggtggggcaggtaggacaggccccaaccccaccagctgtgtccagggagcaggagctgacctctgagcccgaggcggctgccaagccttggggcctggctgtccccctccacccacgccaggccggcggtgttcagcccttccccgtatttggggctggatccggaagagggcccaggagtgagtgaggaggtgagaggagggagaatgacgacagtaaagcccctaagtgtctactgcggggcaggcgctgttcaaagccctttcctggtttcagctgacttagtgctgtcagtagctctacgagggagccaacaatattacccatcccaaatgaggaagctgagaccatcagccaaaggctgttagttgttggcagagctgctggactgaggaggatgagacccctttggccactggccacgccacaccagcacaggcagcagggacagctcagaggtctgggttctggtccctgccctgcctcacacaggaagtgttaagaagttgctggctgggcgcggtggctcatgcctgtagtcc

SEQ ID NO: 30571 - DNA, 953 bp, Artificial sequence
  DNA replication origin
cgagcccggccgagcccgggggcccagttcaccattgtctggccaacaggggcggggcgggcggcacggcgggctcgctcactggtcgggcggcgcgtccgtcgcgcccggcgcccacccccgtgcaggcccggccccgcgcgcccgcgcccgggccgcctggcgccccgcccgcgccttaggacccgcggggccgcgcggcgcatcctgcgggcggcggcggcgggcgaggcgcctgcagccgggcgcaagatgatgaagtttcggttccggcggcagggcgccgacccgcagcgcgagaagctcaagcaggagcttttcgccttcaacaaggtgcggcggcggcccgggcccgggctcgggcgggagggggcgggacgggggcctgggctgggggcccggggtcggagccacgtcgggcccggggggcgggggctggcatgcagcgcggcgcggggcggggccgggccgggccgcgcaccccctcggcgggccccgctctggctcggactctgggtgggtctgggtctccggccgactttccgtgtctgctccccgagtctctgcgggccgctctggccctggctctgccagtctgtgtgtgtgggggtctgtctctgagactctttgcctgtctctgggtctctgtccctctttctccgccgctgaccggctgtctcgccccagttgtgcctgtgtgtgtggtgggggtgtctctgcctctgccccttcctatctctgcctgtctccctttatctctctgcctctcatttctcttgctgcctgtgcgtctctgagtcttctttgcctgtctctccctgcgtgtctctctctctgtctctgtggagtctctcgacctctgtcgctcacttctgtctctttatcctttttcttaggggctccattgcgtccctgctcggcccttgggacagccctggggcccggtttgtttt

SEQ ID NO: 30572 - DNA, 1597 bp, Artificial sequence
  DNA replication origin
gcaccccagaaaacactcccagccagcagagaactcctacccaagaaccctgatgccccctcagcctgctgagttcccctgggagggcaggaatctagtcctatctcactgtgccacacaaggctcctgtactgggcccagacccctgagcccagtccccaggggctctgcctcgaaagaactcgaggtttgatggggataccagctgcataaccttggcataactctgtgattgattttgtcacagatcgagagagggcctgggaggtttctggagtacagtgtgaagtctggagtttagtggggcagccaggtgtacaggcacgggaggccacgtagcatgcagctgggctttgtggtgggggctgttgggtcagcagccacgagggtgaggggccctggggacgaggacagggccaggctttgtgctcaccagccacctgctgtcaggtgttcacactgcccaaggtgagcgcgaagaccaagttcaagctgacggcccatgagggctgtcgtgtgcgcaaggtggcactggccacgtttgccagtgtggcctgcgaggactatgctgagacctgcctggcctgcctcaccaacctgggtgacgtccacgtcttctcggtgcctggcctgcggccccaggtgcactattcctgcatccggaaggaggacatcagcggcatcgcttcgtgcgtctttacgcgccatggccagggtgaggcggggcagaggccgaggaggccttcctcaggcgagcgaactgagtgggaccagtactgcttgggagcaggaagggcactccaggtgggcacaggcccaggccacggaggagctgtggttggtggtatcttctaactgcactcctcattcttctgcccacccaggcttttacctgatatccccatcagaatttgaacgcttctccctaagtgcccggaacatcacagagccgctctgctctctggacattaactggccccgcgatgccacccaggccaggtgtgtggaggggcagctcctagcctgggggacctgtgcccagggccaggtctcatcccacccccgagatctgccttccctgggctcaggagtgggagggcaaggatctagcgtgccagcctcaagtcatccacctatggtccccatcatggccccatctctgcagttacaggatccgagagtcacccaagctgagccaggctaacgggaccccaagcatcctgctggccccacagagccttgatggaagccctgatccagcccacagcatgggacctggtgaggggggcatgaaaggggtccagaccctggccccacggtgccctgggggagggagtcgggactcacatagctcagggatcgggcaggcttctgtaggagatgggtggttgtgtgctcactggtgccacccctcaccatgggctgccttatgggtctgtgtccctaggcccccaggtgcagagggtgctaagggtcctggtaggggctgatgacttgctccctgtagacaccccggagccacccgaggctgcactctcacccatgtccatcgactcagccaccagtgctgacaccacgctggacacgacaggggacg

SEQ ID NO: 30573 - DNA, 966 bp, Artificial sequence
  DNA replication origin
ctaaaaatacagaaaaaattagctgggcgtggtggtgggcgcctgtagtcccagctacttgggaggctgaggcagaagaatggcgggaacccagaaggcggggcttgcagtgagcagagatggggccactgcactccagcctgggcgacagagcaagactccgtctttaagaaaaaaaaaaaaaaggaaaaatactctgcaaagtgagggggaaggatggtgtgtggagggggggaggtggcacaggtgctgggccccacctgtcctcttccctaggcagtgggcccccagggcagccaaatgcctgcaggagggctcagttctggcccaggtcccaggcccacaccctggggctggtgctgctccagggcccagggtcaggcgggacaggacagcaggtcccagtggagcctacaggttagcaggcgtggttctatgttaaggggccaggcaggtgccagggatccagcactccagctccgagcagggcaggtggaggtcgggatagttctggccttcctggaagagggagagaagaggtatcagcagaaggtgagggagggcaaaagggcagatggattgccacagcggccagaccacacaggtgctgccactgtctcctctgcagggcaggcatggcccttcagtgaccacctgagatgggcttgctgagtctccagatgggtatccaagcgccaggccacatatgccccactgaggccagggagaggcaccagacaaagagctgggaggtgtccatgtcctgtgcagggtgaggctatggcctacagtcaggtgcctgggaacatgaggcagcaaatgcgctgggcagatctatgggccccacatctaggtgaggatccacagactcaggcaggggtaagtcagccacttgctgggcccaaccgatgagacctgacctcgtgcacctcagtgatctcatctatgaaacaggctggccaaacc

SEQ ID NO: 30574 - DNA, 1059 bp, Artificial sequence
  DNA replication origin
cccatttcaagaggaagttcatcatccaccggggcaagaggaaggcggtccagggcgcccaacagcccagcctctaccagatccgcaccaacggcagcgccctctgcacccggtgcctggctgggggaggacgcagtggcgagcaagcgtcagggagccaggcctgaatccttgctgatgccccatcccttccacaggtgcatccagatcaacaccgactccagcctcctcaactccgagttctgcttcatcctcaaggtggggttgtgggtgtgagccaggactccgtggaccaaggggtggggtgtttgggggctgagtcagctgcgaacacccccacccctgcacactccccaggttccctttgagagtgaggacaaccagggcatcgtgtatgcctgggtgggccgggcatcagaccctgacgaagccaagttggcagaagacatcctgaacaccatgtttgacacctcctacagcaagcaggtcaggaggcgggcgggcaggcgggcacacacagaggagccagggcaggcaggggccctgggctggactggcctttcccgcaggttatcaacgaaggtgaggagcctgagaacttcttctgggtgggcattggggcacagaagccctatgatgacgatgccgagtacatgaaacacacacgtctcttccggtgaggccagggccctgaccctcccctcagtcctggcactgctgcttatgacctctggcctcaccttgacccttgattcccaggtgctccaacgagaagggctactttgcagtgactgagaaatgctccgacttttgccaagatgacctggcagatgatgacatcatgttgctagacaatggccaagaggtgtgatgttgccactagccctgcccatccaaggaggcgcccatagacttacttacaaatgggaattctcgggccaggagcaaggggctgttcccaggcacccatgcaaccgtatctcccctgctgcccccacaggtctacatgtgggtggggacccagactagccaggtggagatcaagctgagcctgaaggc

SEQ ID NO: 30575 - DNA, 1560 bp, Artificial sequence
  DNA replication origin
gctgactctgcccaggccccgccccctctgcaagctgcccctcctattcctacctccgtgtccgaggccccgcctcccaagccccgccctagatctcccttgggtcccgcctcaagcctcgggctacttcctccaactctaatcatgccgcacccctcatggttagttgatggcctccctggcaggtgttcaaggccaagttcaagaattgggacgatgtgttgacggtggactacacacgcaatgcggaggccgtgctgcagagcccgggtctctccgggaaggtgaaacgcgacgccgagaagaaagaccagatgaaggctgacctcactgcgcttttcctgccgcggcagccgcccatgtcgctggccgaggtgggggcagggccgggaccggggcgcgggggggggggtggggggcaggccgagggcggggcctatgcgcagagcgcgctcagacctgccgcggggcgggtccctctcacctgcaggcggagcagctgatggaggagtggaacgaagacctagacggcatggagggtttcgtgctggagggcaagaagtttgcgcggctgccggaagaggagtttggccacttctacacgcaggactgctacgtcttcctctgcaggtaccacctcagcactcccttccccaagtccctcccctggtgctgggggctcgagcccctgctcacaaccttccaacccggcaggtactgggtgcctgtggagtacgaggaggaggaaaagaaggaagacaaggaggagaaggccgagggcaaagaaggcgaggaagcaaccgctgaggcagaggagaagcagccagaggaggacttccagtgcatcgtgtacttctggcagggccgtgaagcctccaatatgggctggctcaccttcaccttcagcctgcaaaagaagttcgagagcctcttccctgggaagctggaggtgtgcctggcagccccgcgagcccgaggccaggcggaggggtgtggtggggctcagacccagcgaaggttaggctcccgaggggcaggtgggggtccagggagctgcccctaacacttccacatccccaggtggtacgcatgacgcagcagcaggagaaccccaagttcctgtcccatttcaagaggaagttcatcatccaccggggcaagaggaaggcggtccagggcgcccaacagcccagcctctaccagatccgcaccaacggcagcgccctctgcacccggtgcctggctgggggaggacgcagtggcgagcaagcgtcagggagccaggcctgaatccttgctgatgccccatcccttccacaggtgcatccagatcaacaccgactccagcctcctcaactccgagttctgcttcatcctcaaggtggggttgtgggtgtgagccaggactccgtggaccaaggggtggggtgtttgggggctgagtcagctgcgaacacccccacccctgcacactccccaggttccctttgagagtgaggacaaccagggcatcgtgtatgcctgggtgggccgggcatcagaccctgacgaagccaagtt

SEQ ID NO: 30576 - DNA, 1167 bp, Artificial sequence
  DNA replication origin
cgcattgcgtgtgtagtccaccgtcaacacatcgtcccaattcttgaacttggccttgaacacctgccagggaggccatcaactaaccatgaggggtgcggcatgattagagttggaggaagtagcccgaggcttgaggcgggacccaagggagatctagggcggggcttgggaggcggggcctcggacacggaggtaggaataggaggggcagcttgcagagggggcggggcctgggcagagtcagcaaagaggaggtgggtttgggcccagctctgtagggaggtagtgaagccacaggggtcagggcatgtcagggtgcgaaggatcctggggaggggcctccgaagctgcaagcgcacctgcgcctcggtgccctcgaggctgcggctgaccgtggcatggcgtggccggtgcagcatcccgcacagctcctgacccagcttgagggcggcagcgcgcaccaggcgcggggacttgcggccgagccagatgaacacgtcggaccaacagtccagaatgtacacgcagcgcgtgtccagcagactctgcagctgcggaccgggagtctggaggtcaaagcccagccaacggggagggatctggccccacgccctcctcctgcatctcttaccagccgcattcttggcatcagctccaccttgggacgctgcttatgttccacggagagcttgtagttgatctgtggcagctccaggtagcccaagcccaggcccacctggcaggaaggatgagcatggcagggaagggatctggagacaggaacctcacccacacagccctctgctctggaaccagccctgccctgcagcgtggctcactgactgcttctgtttccccctccccttcaaggtctttttagggatatcctttcagaagggcttttaaatggagttttccctgcctgccctctccaggcccttcatgccatttctaattaacgtgtccctttcctgttcacaagaatctagataattgagccaaggttcccagccctggcactaggtgcttctgtctcccctacggccccaccatcctggaaagactccgtgaggctacttctcaaaagcagcctccagacctttgctcatactgttccttgtccagaaggtggcaccctctccccaccaaagtcgagatggagcc

SEQ ID NO: 30577 - DNA, 857 bp, Artificial sequence
  DNA replication origin
cttggaagggggatcccccaccccaggcagccagtcagagtgtggaatgctaggtgaaggaatttgagccgagctaaccacagagccggatgctgggctttcacctgaaacaagccagttttgtcctggccctcctggggcccagaatccagtaggagagacaaatcttaggccaacacttttgtcacgggggggcttaaaattcccattctatgggtgaagaaattgaggcacaatgatgaaatgacttgtctgtgttctcacagatggtgagagttggttctgtggctccccaaaggctcccatgggctggaggagccatagaaggtggtgagcaggggctctgtgcttcaccttgacatccttcccccagggcggctacttccctgagaatgtcaaggccatgaccagcctgcggtggctgaagctgaaccgcactggcctctgctacctgcccgaggagctggccgccctgcagaagctggtaagggggtttgggcgggcaggggagggtccctgtggatgagccaggtgggcagagcctgtggagaaggcagacaacttctccagagagaggaacaccgacagctatgagcagagctggaagaaagggagtgggcaccctgtccagggaggtgtgcaagaagaggccgggtgagtgagggagggaagctgcaggggtagttgggccagtgtggctgaggccttcctggatggtgcagagttgtggaggcaggcagggactctggacaccccacccaccctgctgagcctgtgctccccattccggcccaggaacacttgtctgtgagccacaacaacctgaccacgcttcatggggagctgtccagcctgcc

SEQ ID NO: 30578 - DNA, 1735 bp, Artificial sequence
  DNA replication origin
cccggcgctccctagcccggcgcggcccggcagcgagagcggcgccatggaggccaccggggtgctgccgttcgtgcgtggcgtggacctcagcggcaacgacttcaaggtgagccgggccgggcgcgtgccgggcctccctgcaggccttctcttccgcccggcccgcttggcctccgcttcctgtcccgctcggctccaggccctgcgtgtcccagggactgcggccggggcggggtggggctctcccctggccaggaatggacctccgaggcctccgcccagtgcctgtacggggagaccgaggctgggcaggccggggacggacgcttgggctcggagtcccgccgggggcccggccgggagcccccaccccgcgtccgtgttctcggtctaggctggatggtggcctggggatcgggcgagcctccccgcccctctgaggtcacacgcccaagccaggccctgactcagggatggctgcccggctgcccaggggcgggtgtggagccgactcatcactgccctctccccgccaccgccacccgccatactgtgtgatcctgggcctctcagatcacttcccctctcagagcctaggctttctcagccggtgaaggggcttaaaagtctcctccttggacgcaaggagtatagtgagatttgttggtgtggagagtgtgtcaggccggtgtgccaggtgctgggtggcagttgtctgagcagctgctggactgagagaaaagggaccggagcccagccctccgcagccagtgggtggggcggcggggtggttccaggactcaagaatgagacaggcattgcctgaccaaaggggaagcagagaaagagagggagggagagctggctggagggtcagcctcaccttcagggtgggtgactggcagggtcggcctgggttgttggtctggggctggggccgaggaggcaggtttttcctgcgtttacctgcctgtgtacacacctttgaccccaagtacaagtggctacaccacttttccctgaccccatccccaccaccctaacctggggtccccgttcctctttgctgaactgggagagtccgagtcaccagctgggaatgtggcgctagggggaaaggaatatcagccgcaggcactgaaggcacctactgccccagacttggtgccacaagggctggaggtgccgaggtgggcgttcacacaccaggggagtgcagtgatgctggcctgccctgcagggtggggagccacggtctccgcaagcaagggtttgaccctggccgtgagttgccagtgtgctgatggcaggatgagggcacaggtggcgcctttgcaaaggcttggaagggggatcccccaccccaggcagccagtcagagtgtggaatgctaggtgaaggaatttgagccgagctaaccacagagccggatgctgggctttcacctgaaacaagccagttttgtcctggccctcctggggcccagaatccagtaggagagacaaatcttaggccaacacttttgtcacgggggggcttaaaattcccattctatgggtgaagaaattgaggcacaatgatgaaatgacttgtctgtgttctcacagatggtgagagttggttctgtggctccccaaaggctcccatgggctggaggagccatagaaggtggtgagcaggggctctgtgcttcaccttgacatccttcccccagggcggctacttccctgag

SEQ ID NO: 30579 - DNA, 1578 bp, Artificial sequence
  DNA replication origin
ccaacctgtctaaattgggactcagccccatctctggcggggtcgcgcaggcctcagtccacagccttccagctccgagaagcaggaaagggcacgggtggctgaaaataacccaagtttgcgcagcggggccctggaggccgtttggccttccctcctccgccaaacctgcctgccctgggcccgggcggagcaggccgcgcagcagccctaggtgggcgggtgacgccccgttcgcaggataaaccaagagaccgagaggggaagggggctgggctaggattcgaacgctgcccttggtcccccaaaggtcccctccccgccttccccagcggtgatcgcgggccacgcccccgatctgcgttccgtcgcgcgccaagccccgagcccggtgaccctgggggccgccccgccgcgctccagctgtacctgcgtcgcagcttccgcacgacgaccggaggaggcagcgggaccacggccccggagctcagaccagcctgggaatggaacgtgaaggaccctggaacccaacgactagggccccgggggcagccgcggacttcgcagcacgcagacaagcaggccctaactccaatcggagcgctcgagtccagcgcacaggtgccaaaatactgcgcggttcagccaatgaagggcaggtcccgccccccagccgacagccgcactccctctggggcgggactccctgacgcagtctggatttaaaggtgcagggctgcattccgagaccgcgaacaggtgacgtgacaggcgaccctccaggacgtctgtgcgttgtaatgtgagcctccggtgtggaggaagctgtctgggccccgttccttctggggaccaggtagagaggctgcacatggctagaggcccggcacatccaacctcttaggtcacctctgcgagagagtgtcttggtggcctcattcttacctgtgggcctgaggggcacagcgcctacccctgccacctgctctgtgcgagcttgtgtgggccattctccacctgggcatcagtttttctcctgtaaaatggggacactagaccccctcctcccctgcgaaggatggttgggcatataacagctgtggctcatttattggggtcctgctatgtgtcagccagggcgagcccccttgaacagcaaggaccaagacggatgcttctcttctggagcctccctttgtaggggggtacgagcacaggggtgctgacactaagtgggaataataacctggcgcacaaaacaaaacaaaacggaataataacctgccactcactgagcgcctgctgtatgctgcgagctacacgtgcattctttgttaatttgctcatggtgacaaccttagaaagtattttacaaatgaggaaactgggtagggcgcggtggctcacgcctgtcatcccaacactctgagaagctgataccagaggatcacttgaggccaggagatcaagaccagcctgggcaacatagcaagcaccccgtgtctacaaaaagtataaataaggccgggcgcggtggctcacgcctgtaatcccagcactttgggaggccgaggcggt

SEQ ID NO: 30580 - DNA, 1377 bp, Artificial sequence
  DNA replication origin
aaagctgcctggaaagaagctcacaaaggccctgaggcttgtgcaggtataggaaggggcctctctccctggagcccaccctccaggacctctgacatcaccagggtgtcatcatcactacccctatgttacagagctacaggctgccagctcacaagtgagtggtaaggtctccaacccatgactgcaaggcctccagactctcatccgcccacagagtctgacggattctccctgtgccaggtgcccaggtcctcagcagcagcctcatctgaaggttcctacccagagggcacagcagccctctatgataacctcttcagaagagcccaaagtccagagaagaccaacaatttggggccccagccagtctgggggaccactgggaccagttacccccaaatcttgacagggtagcccaagaggcagagctaccaagtcagagcacgggcagagtaagacggcccaagctgcccaggcaggccaatgcagatgtgcttgtcagggttgaagcccctttggcagggcagaaagggctgcccagtgcctctgtacagggggctctctgggcctctcagtcttgggacaatgtgtaggtagtggtgggtgatgcttctcaactgccggaaggccaagcaacacagaaagtaaggtgaaggcctgggccccagcctgtttgctcacctgtaagatggcataggcagcagtgaggggcagatgtgggcagccttgaagtgtgtggctgggtgggggccagcacttgggaagtggaggcaaagatctcctagggcccagtccacattcctcacgttctgcgagggggacactgccctcaggccctgggagctgagaagggctgggaccttaggacatcagttagacaccaagcagaactctcccggggaggcctgagcagatgaccatgaggtcacagcctgcccgggcaccaaggacttctacctgccctgccagagtgtgggtgccaggggcccagttgccaggtgaccagatgcctggagtagctgaagcctgaagcgctgtgtgactcagccccgtacacccgcccattcgccccagactaaaaataagacggtctctggggcgatcccaggccaaccgggtgacccgccacggccccagggccggtttcaatctcctcatcggtgactcggggatcaatactgccacccgcccccagagagaccaggaatctactttgcaaactgtaaagcgctttaaatactcccaacctgtctaaattgggactcagccccatctctggcggggtcgcgcaggcctcagtccacagccttccagctccgagaagcaggaaagggcacgggtggctgaaaataacccaagtttgcgcagcggggc

SEQ ID NO: 30581 - DNA, 1241 bp, Artificial sequence
  DNA replication origin
gatgggggcttgggaccccaaaacccaagctcatatcccatccctgccctttctcaggtactttacgtgatttcccagggcctcggtgtcctcccctgtggatgggtggcccctttctctgagaaattctcagaaagcccccctcatgggctcagctctgttacccagcataaggacagctagagcacctgtccacagcagcccctctcccagcctggccacctgcacctgagctgccccttcacccctggctctcttacaggcagaccatggcagagttctcccagaaacgggggaagcggcgtagcgacgaagggctgggcagcatggtggacttcctcctggccaatgcccgcctggtgctgggcgtgggcggggctgctgtgctgggcattgccaccctggccgtgaagcgggtaaggccaagtgggcgggtcatgcctgaagctcctagaggaggacaacagggttgggcttttcagaggggccctggggaggggtggggactgcccaaggccttcatgggagcccagggcacctgcttctccacccagcacgctggtctgctttgccctgggctttgctatgactgcccagatttcatatacactgatctgtgtgactgtgcttgcagttcattgacagggccactagcccgcgggatgaggatgacaccaaggcagacagctggaaggaactgagcctgctcaaggccacaccacacctgcagccccggcctccacctgctgcccttagccagccagtgttgcccttggccccctcgtcgtctgccccaggtgagtggcactccttcccctcttttggtgtcacattcaagagacgcagcccaggctttgccctgactgactgtgtgaccctgcgcgagtccctgcttctctctcggttgtgggctcctcagatatttaatgggggtggtgtttctttgccctgttcctggagcaaggtggtagcgttgtgatggtggggagctttagatggggaaactgaggtccagaggggcgtgacatacctacctactctgcatgaagctgttgtcgccagggtgttggactctggggcaatgagaactcgtcaccaagagctcactatatgtgaggatctgaactgagtgccttctcaggtgccactgcaggtgagaaaagtgaggccctgggacatcacacagctagttctcggtggcgttttcttaactaatcacaggctgttccgacatgttcccc

SEQ ID NO: 30582 - DNA, 1530 bp, Artificial sequence
  DNA replication origin
gtttcagatagcacagggttgggggtaaggtcacagatcaacaggatcccaaggcagaagaatttttcttagtacagaacaaaatgaaaagtctcccacgtctacctctttctacacagacacggcaaccatccgatttctcaatcttttccccacccttcccccctttctattccacaaaacctccattgtcatcatggcccgttctcaatgagctgttgggtacacctcccagacagggtggtggccgggcagaggggatcctcacttcccagtaggggcagccgggcagaggcgcccctcacctcccggacggggcggctggccgggcggggggctgacccccccacctccctcccggacggggaggctggccgggtggggggctgacccccccacctccctcccggatggggcggctggccgggcggggggctgaccctcccacctccctgccggacgaggtggctgctgggcagagacgctcctcacttcccagacggggtggctgctgggcggaggggcttctcacttctcagacggcgcggctgctgggcggaggggctcctcacttctcagacggggcggttgccgggcggaggggctcctcacttctcagacggggtggttgccaggcagagggtctcctcacctctcagacggggcggccgggcagagacgctcctcacatcccagacggggcggcagggcagaggtgctccccacatctcagacgatgggcggccgggcagagacgctcctcacttcccagatgggatggcggccgggaagaggcgctcctcacttcctagatgggatggcggccgggcagagacgctcctcactttccagactgggcagccaggcagaggggctcctcacatcccagacgatgggcggctgggcagagacgctcctcacttcccagatggggtggcggccgggcagaggctgcaatctcggcactttgggaggccaaggcaggctgctgggaggtgaaggttgtagcgagccgagatcacgccactgcactccagcctgggcaccattgagcacggagtgaacgagactccgtctgcaatcccggcacctcaggatgccgaggctggcggatcactagcggttaggagctggagaccagcccagccaacacagcgaaaccccgtctccaccaaaaaaatacgaaaaccagtcaggtgtggcggcgcgcgcctgcaatcgcaggcagtccgcaggctgaggcaggagaatcaggcagcagtaccgtccagcttcagctcggcatcagagggagaccgtggagagagggagacggagaccgtggggagagggagagggacagggacagggacagggcgcagtttcgctcttgttgcctaggctggagtgcaatggtgcggtctcagctcaccacaacttctgcctcccgggttcaagtgattctcctgcctcagcctcccaagtagctgggattataggcatgcaccaccatgcctggctaattttgtgtttgtagtagagacagggttt

SEQ ID NO: 30583 - DNA, 901 bp, Artificial sequence
  DNA replication origin
ggggagcacctctgccctgccgccccgtctgggatgtgaggagcgtctctgcccggccgccccgtctgagaggtgaggagaccctctgcctggcaaccaccccgtctgagaagtgaggagcccctccgcccggcaaccgccccgtctgagaagtgaggagcccctccgcccagcagccgcgccgtctgagaagtgagaagcccctccgcccagcagccaccccgtctgggaagtgaggagcgtctctgcccagcagccacctcgtccggcagggaggtgggagggtcagccccccgcccggccagccgccccatccgggagggaggtgggggggtcagccccccacccggccagcctccccgtccgggagggaggtgggggggtcagccccccgcccggccagccgccccgtccgggaggtgaggggcgcctctgcccggctgcccctactgggaagtgaggatcccctctgcccggccaccaccctgtctgggaggtgtacccaacagctcattgagaacgggccatgatgacaatggaggttttgtggaatagaaaggggggaagggtggggaaaagattgagaaatcggatggttgccgtgtctgtgtagaaagaggtagacgtgggagacttttcattttgttctgtactaagaaaaattcttctgccttgggatcctgttgatctgtgaccttacccccaaccctgtgctatctgaaacatgtgctgtatccactcagggttgaatgaattaagggcagtgcaagatgtgctttgttaaacagatgcttgaaggcagcatgctccttaagagtcatcaccactccctaatctcaagtacccagggacacaaacactgcggaaggccgcagggtcctctgcctaggaaaaccagaga

SEQ ID NO: 30584 - DNA, 1051 bp, Artificial sequence
  DNA replication origin
ctctatcttttccccacatttcccccttttctattcgacaaaaccgccatcgtcatcatggcctgttctcaatgagctgttgggtacacctcccagacggggtggcggctgggcagaggggctcctcacttcccagaaggggcggccgggcagaggggctcctcacttcccagaaggggcggccgggcagaggcgcccccccacctcctggaaggggtgacggccaggcgggggctgccccccacctccctcccggacggggcggctggctgggcgggggctgcccccaacctgccggacagggcagctgccgggcagagatgctcctcacttcccagacggggcgactgccaggcggaggggctcctcacttctcagatggggcagccgggcagagaccctcctcacctcccagacggggttgcagccgggcagaggtgctcctcacatcccagacggggcggcggggcagaggcgctccccacatctcagatgatgggcggccgggcagagacgctcctcacttcctagacgggatggcggccgggaagaggcgctcctcacttcccagactgggcagccaggcagaggggctcctcacatcccagatgatgagcggccaggcagagacgctcctcacttcccagacggggtggcggccaggcagaggctgcaatctcggcactttgggaggccaaggcaggcggctgggaggtggaggttgtagcgagccgagatcacaccactgcactccagcctgggcaacattgagcactgagtgaacgagactccgtctgcaatcccggcacctcgggaggccgaggctggcagatgactcgcggttaggagctggagaccagcccggccaacacagcaaaaccccgtctccaccaaaaaaatacgaaaaccagtcaggcgtggcggcacgtgcctgcaatcccaggcactcggcaggctgaggcaggagaatcaggcagggaggttgcagtgagccgagatggcggcagtacagtccagcttcggctcggcatcagagggagaccgtggaaag

SEQ ID NO: 30585 - DNA, 1229 bp, Artificial sequence
  DNA replication origin
tccggcccgccccggagaaacaggccctgcccgccgctgcgccgcagccaatagcgcgggtgcgtttggtggcggcccatgcttggctgcgctctctgattgggcgcctccgggggcggggccaagcccaagcctggcgcgcagagtgcaccttcctgagctcgagcggtccagcgccaagttcggggtttggggttggagcggctggtcacgtggctggcccgcggcggtgcgcggggcgttgggtcagcgggtctgggactggtggcaccggcggcggcgtaggacggaggcgtcgctaggtacgtgcgcgggccgtgttccggtaggtgggcggcttcgggtccgagggccgcggcgtcccagagcccggggggtgcttcggcgtcctcgctgtcccccgccgtaccccaccctctgcagccgcaatgacgggaggggagcgcttgggtcgcgcctgggctggggatcgggcggcggccagccgcagcgccccagttccaggcacattcggtatgatggggtggcggcccgtggcctttggcaagaatgcgaaggcttatcggggatgtgagtagtagctctccactgaacacttttctcgttgagcattttcgatttaaacaatcctagctccttcacaacaaagctgcaagtcaagtgctactgtttcccccattttacaggtgaggaaggtggtggggccctgagaaaggaggcaacttaaatggcagagcccggaatagaacccgggttctcaaagcctgcgcccctaaaggctgcgcgcagggtcgctccacttttggcccgtgccaccagatccctgtggggaatgagctcttcctgttgcccgcaatctgccaccccctgttctaggagacaaatgttgcactgtgaagttcttggcccggtgccttggcttcgagattccgggagttaagtgacccttggtccagctgaggtcagcacagatgcgggccttcaatcgggcagttacccagagaatagactggaaacaccagtttaggttcttgcagaaataacattgtaggccgggcgcggtggctcatgcctgtaatcccagcattttgggaggccgaggtgggcggatcacttgaggttagtagttggagaccagcctggccaacatggtgaaaccccgtctgtactaaaaatacaaaaaaacctggctgcccatggtggcacacacctataatcccagctactcg

SEQ ID NO: 30586 - DNA, 1311 bp, Artificial sequence
  DNA replication origin
ccccaggataatgatcccccataaggcactgtgctcataaggcttggaccaatctgccctcttttaggtctgcttggccttgtgacctccacagagtgactgcatgcacacagcaggtgctctatggaggctgcagggcgaatgcacagaaaaagccctggggtggaagcaaggtttcccctccgtccctgaccacgtaactcagagcaagttagggcacaatctgggctttgaaccctcaactctggagaatgttagggtgcccagcagtctcttgcgcctgcccccgctccccgactctgacagtgtgaggctcctctagacggctgctgaagccagcactctggcaaagctccctggggtggaggaggtataggggaacacagggctggagtgggaggaggtgggggtggggggcatgctgctgcctccctgccccagccagcccaactgcccctcccagggcccagccaggctggctcaggtactaccggctcacaggggggaagtggcaggcagctgggtggggtcgggaactcactgccagcacagctggctgaggctgggacaccgaggccgcctgacacccagcaccacacagacctgagaccctcaccttttgacccctcatgtggcggggcagtgctaacacccccaaccaggtctagctcacagagcctcctgcagagagagaccccaaagtcagggcagtgtgctaggctgtgggggcgggatggggtggagagagggcaggggacgccacctggatggggcacagaggggcctcttccaccgagctgcccactgtcccctccacccaccaagaatgccacccaggagctgaccctgctcatctcccacatgcaagccagcgccgaccaggtggagcgggacatcctggagacgcagaagaggctgcagcaggtgagaacccggcagcagttggcagggtgtgggcaggctgggtggcatgggaggcccatcatcaggcctggcactccctgagtgccccctggtgatggtgaagatgggacagatgacatttgtcctgcaccgcctgtcccctaacacacggtgggagagagggctcaacttccttctttgctgggctcccctgtgtctttgtcacctgcctcatggacgccctgggcctgaccctgtgcctggcgtgggcctcgaggttggccagcatagctggggtcccaaaggtggggctcaggcccacaatgatgggcagcaggggtgtgggggctctggaccctggcaagtctgcccatcccctgcccacaggaccggctgaacagtgagcag

SEQ ID NO: 30587 - DNA, 1213 bp, Artificial sequence
  DNA replication origin
tcccctaacacacggtgggagagagggctcaacttccttctttgctgggctcccctgtgtctttgtcacctgcctcatggacgccctgggcctgaccctgtgcctggcgtgggcctcgaggttggccagcatagctggggtcccaaaggtggggctcaggcccacaatgatgggcagcaggggtgtgggggctctggaccctggcaagtctgcccatcccctgcccacaggaccggctgaacagtgagcagagccaggccctgcagcaccagcaggagacgggcagcagcctgaaggaggccgaggtgctgctcaaggacctcttcctggacgtggacaaggcccggcggctcaagcacccgcaggctgaggagactgagaaggagtgagtggggctgcggcagggctgggggtccctggggaagacccaggcccagccctgacctgctggccaccttcttgacagcatcgagcagctgcacgagcgggtgacccaggagtgtgcggagtactgtgccctgtacgagaagatggtgctgccgccccgacgtgggatccaaggtcgactgggcacacgtgctggagcagaaacaggtcaggagctcaaagtcacaccccagtgtgatcagagggtgatacggaactgcatttaacccagggcctgactgtaggcttgaacagtcagtgtatagtggtgtctcaggggtctgggcagggagacagcagaggagacagtgcagtcagggaagacttcctgtaggaggaggcacatgaagagacctcagaggggtgagagggctcggttgggtcagggtgaagtagtgaggagaggacaattccagaaagaaggagcaaaggcacctgccaggaggaagcctaggattcgatgggaagtggggatttctggccaggtgggcagagccaggacatggggcattctgatccctggttgaggagttgtgctttgatgccacacagaaggggtgtcatcatgacaatagaggaacagtggggaagggcccgggtgcagcagggcgttctgagggccctagagcttggctggaggtgtccaggcaggaagcactgaggctgggtcacagacaaggcaggatggagctggagacttctgaggctgagcccagcgtctgggaaccagtgggactcaggggccactgcagaatggcctctgcagtggccaccctgcagagcagaa

SEQ ID NO: 30588 - DNA, 1286 bp, Artificial sequence
  DNA replication origin
gttcctgagcgccgcccaatggcgccttttgccccccactttctctctccccaccctgctgctggcggcgggtcctgagcacagagggcggcgtcgtggcgcgggcagagcctgggcagcctgtacacgcactgcagggctgcacgtggcagctgagcgccctggcggagcagcagcgccgcatcctgcagcaggactggagcgacctcatggccgaccctgcgggcgtgcggcgggaatacgaggtcggctggcagaggttggggccaggcgggggcgaccagggccatcctggtcctcaccgccgctccccacccgactcgcccccagcacttcaagcagcacgagctgctgagccaggagcagagcgtaaaccagctggaggaggacggcaagcgcatggtggagctgcggcaccccgcggtggggcccatccaggtgcgctgggggcagggcgagagtgagaagggacgtggtgggcggggaaggggggggtggacgtgggtgcgggggcggggcgtggtccgagggctccgtgctgcggtacccaggcccaccaggaggccctgaagatggagtggcagaacttcctgaacctgtgcatctgccaggagacccagctccagcacgtggaggactacagccgggtgagccctcgggcagcggcagggcggcagggcggcagggcgggaggtcccacagcacaccggcccacaggagaggcactgcacctctcaactagacagagctggcaagtcgcggtggctcacacctgtaatcccagcactttgggaggctgaggctggccgatcacttgaggtcaggagttcgagatcagcctggccaacatggtgaaaccctgtctctactaaaaataccaaaattagctagaggtggtggcacgcgcctgtaatcccagctactcaggaggctgaggcaggagaatcgcttgaacccaggaggcggaggttgcagtgggccgagaatggtccactgcattctagcctgggtgacaaagagggactccacctaaaaaataaaataaaatagagctgtgtggttgccactcggtcccagagggaaggaaaggcatgggcacattctcaacagggtgaagccgttcccaggggggtgaaaattcgttcttaatggcagaaaagtaactgtttttatgcatgaagtacagatccacatacagcacctaagctgtatacagcatatctgtggtataaatatttcatgggggccaggtgtggtggctcacacctgtaattccagcactttgg

SEQ ID NO: 30589 - DNA, 2256 bp, Artificial sequence
  DNA replication origin
gtttcagcatgttggtcaggcaggtctcgaactcctgaccttgtgatccgcccgcatcagcctcccaaagtgctgggattacaggcgtgagccaccgcgcccggccttgtcctcatcgtcttcttttccaccctcctttctcctcaccgttttcctccactgtcttctctaccacactgtcttctccctgcactttctccccactgtcttcttccccacctttctccccatcccactttccaaggtctttcccaccctctccgtcccctcctccccctctccccgcagtcttccgggccccactgcctttcgcccgcagccaacactgttcagttctgaggtagcggcgggggcgggggcggcggcagccgtgatggccctggcagcgactctcctgggtctcctgttggctgttggggcggagctcaggggcccagctcatggggctggctgggcgcacagacacaccaggcgcagggacacaggcgggcgcacgcgtggagcgcttctaggtgaaaggcagttggagagcgcgagaagggggtgggcaagaagacgatcgggggcgaagacggtggggagtggaagaggggagaagagggtgcggggagagaaaaacgcggcaggaagtcgctgctgcgagaaggtggggaggggaagaagatggcggagaataagaggctggggaaaaaagacgatgggagggggagagaagaaagtgggaagaagattgcgactgacagacgctgctgcgagacggtgggaggacatgggaagaaaacggtgtgaggggaagaaaacgggggagaaaacggttgtggggaaggcgcggggagaagacagtgaggagaagagggcgtggggagaggacggtggggaagaggaagagaagatggtgaggggagagaaaagcgcggcaggaagacgctgctgcgagaagaaggtggggatatggaggcggcaagaaaatggagaagaggctgggaaagaagacgattgggagaggagaagagggtgggaagaaggcgatggggagaggagaagagggtgggaagaaggcgatggggagaggagaagagggtgggaagaagactaaggcagacatgggaagaaaagggtgcgggatgaggaagaaaacggttggcggtaataggccgggagaagacggtgaggagggggaggggagaagagggagcggcgggaagacgctgctgggggaataggcgggaaggtggagactggaagccagcgggtggagagaaggagatggaaggaaaagctgccgccacaggaacccgtgctgcgaggaatgggagagactgaggggaagaaaacggtggggaaggggaaaaaaaaactgcgggggagaagaaggtgcgggaagaagacagtagggagacggcagaagaggatgcgggaagaccgcagtggggaagaaggaggggagaagacggagaggggagaaaaaggtgggaagacgttgggaaaggagaagggtcgggaaggagaggggagggaaagagcagaaggtggggaagaagactggaaaaggggtgaagggaagaaaaggatggggagggaggagggaagagggttggggggaagaagaagggagtggaaagcggcgaagacgaccttggggaaagagatggagaggggaaaaagattggtgggagagaagaggatgaggcagggaacgaggtggggaggggaagagaaaggcagaaagacgggctgagaagagtgctgggagaagaagggggagcggagggagggagaagggaagcggggaaagacgatgggagaaggtggggggggagaagaaggcagtgtgggagaagagttgagggaaaaagaaacaatagtgatgctaatgttaaacgtcgtcgtcttggagcaaaagaagcaagtgctgctttagactcccggcctaactttgttcaataaatccccacttccaaatatcttgtgattgcagtgtgggtcatttttagtacttagatccagagcagtctctgattgttagtgacagtgctgtcaaattgcatgctgttcaccagctataaacgaaaacatcacatttccttgaagtgcactttaacgtgtaattcaaagacttttccaagaggcttactggggaaaaatagaggtgtgtacctttggcattggacatggagtctctgattttagattgtagttgtttccccaaatctttaagattgtggcagaaacatgattgtgactacggcattcatt

SEQ ID NO: 30590 - DNA, 690 bp, Artificial sequence
  DNA replication origin
tgtgggaacctgtggggtttgcaggaggtgaaactgacgatgcaggctggagtctgactgaggagccttgactgccaagttaaagcgtctggactagatcacgtaggcaatggggagccatggagggatttggagcagaagaagggaatgaacatcaagatattttagaacattcactctggctacagagggagaaatggatcagaggggtcagggtggggccagagagacgcgtcagggggctagagcagggagtctggccagagaagtcttgcggggtggaggctgggtgggggggcaggggaaggaaggtggtgcacgcagaagagaggttatagctcaaaacagcaggactggatgcctggatctcagggtaagcgtggctcacggtcaggactcagtaagcgttgggtgaacacatatgaaggagtgggcattgatggccctgggtttctggttccgatgactgtgtgagtccatcagccacagggtgaagagcatggtgggtggtggtcgggtttgcagttgggaagggtgatcaggccttcagctgagtgtgtcctggagtctccatgcttagtcacacgttgcagctttttgctccccgaaaatggtgaagtccatctatagtctaacgacagtctctcctgctttaattgggtctatttgttgggtcctctgggacatgga

SEQ ID NO: 30591 - DNA, 663 bp, Artificial sequence
  DNA replication origin
gtggctggtccctgggagggccacacatactttccaaggaccacacctgttggggagcactccctgcctcagcccagggtgggttcaagagcagaaggagaggggctcggtggggaggggcttctgaaggagtggtccagggcactgatgagtgagggggtgagagcgaggcagctagcccaggaaagcagaccggctctgcccagctcggggtgtgtgtggggcagggtggccgctgtgcgtgtacgcatggggggtgtcctgtttgctttggtggcttggcagccactgggctattgaggaatctctctccgctgctggtggggctacctgggcctgtctgggaagtggaagccattggcagtctgaaacatgaccaccttccacccagcgggcctggcaggaccctgggacccagggcggggcttggggtggtgggcagggcagggtggggctgtggagtggggcacttggcccgcccgaggagccacatcttggggagcctggagtggggagggggctggctggctggggtctctgtaagagcctcttcttgggcaatgtcctttaggtttcctgtgggctgagacctgagagaaatgcccctcccctgaccctgaggtctcttggggtacagaagggtgagaggagtggaagggggca

SEQ ID NO: 30592 - DNA, 689 bp, Artificial sequence
  DNA replication origin
aagagagtcataggatttttagaaccagaagggactctgcaatcacccagtccagcctggtcaccactgaggggaaacaggcccagaggtgggaggtggggagcctcaggccacacagcaagcagagtgaagacacgaactctgcccctgcccagagtgggacatgtaggatccccgcaactgctccccaagacagcccaggatggcatcactgaggtctctttcagccaaggctgtcactgtggggcagggagttcttctgaagggctgactcactgcctggggacgcagttgccacaaagccacctgtgccaaggccccactggccccaagggctccaggaacgggagcctgattcccggccacctagcctgagtcaccaccgactcgcatttgtgtgtttttctctcagctccacactctcaaagctgggtgggaactctgagccagcacacagcggagttgatcctgggctgaataatccagagtgaggagttggacgggactgggagtgatgaaatccagaggggaacctggagtcagcagttaggagggccccgccttccccaggtgcatataaaggtctctggggttggaggcagccacagcatgctcttagccttcctgagcaccttcccttttttcagccaactgctcgctcgctcacctccctccttggcacgatgagc

SEQ ID NO: 30593 - DNA, 843 bp, Artificial sequence
  DNA replication origin
atggtcttgaagtagggactgtagtctttgatctcagcaggccgctgccactggtaccagtcatggatcttcacctccaggtcagcgttggcctcctccagggcacgcgccttgtccaggtaggagaccaggctgtcgttgaggttctgcatggtcaccttctcactgcccaccagaagcccatcaccaccagcaaagccaccacccaagccaccaccgaagccagcaccaaggccatcaccatatcctcccccaaagccactagcaaagctgctgctgctgctgaagctaccgccatagccgccccccagcctgtaggctcccccagaggagaagcaggaggaggagacagacaggccacccctgtaggtgctggtggcgcggcaggaccctccggccaggacggaggagatgcggctggagccgcccccgatgccgcccccgatgccgcaggagcccttcatggagctggaggaggtgaactggcggctgcaggtgctcatggtgctgaggagggaggtgagtgagcgagcagttggctgagtgaagagaaggtgctcaggtaaattggaaagggatgcgagtgctttatactcatgggtagggggcgggcctggcactttccattccccttggctttcatcacccacaggctagtgacaactcccagccaggtccctcctctcctccgcctcatcatgtctgtcatattttactggaaactcattgtttggggtgttttgggctttcttgtcccgccaggcatgattcacagggggaggtatgggcctgcaggctacactttcccatggggccccgggagtcccagccctcaggaacccg

SEQ ID NO: 30594 - DNA, 1762 bp, Artificial sequence
  DNA replication origin
gccattaacagtctctgctgggttaggaaaatggcgtgggattcacaaaggtgttaagctgtaaacggtatcactgtccacttgctgagagcagatttggcaaagggttttctctgtaggtcttgtgtcagtttgagggtctgctttgcccacttccccttcctcagtgatccttcagcctggcacccagctctgagatgaggcctgcttagcaccagtgaagttccccacgttcaaaccaacaacattctgtgtggagatgagggaatcaaagttaaaatccaacccatcagcatccatgagttcactacggataatggactccatgtcacattccaagctcccattgaacatgtccaggtccaagtcgctggggaacttctcatggcccatgacgggcaggtttgcactagttgagtacaaggaggagcctgagagagagtccgagagggtttgcatagactggctgacaggagactgctgctggtgtttggctgacccaaggctgctggactcactcaagcccatgttgctgacagaattcgacaaggcacggctgccaccaagagcgccctgggtttggtgctggtggtggagcaagttctgattgaccacacttccctggttaggctgggcagcaaaggacatcatcggatcattgcgaagcatcacgttccggcgggaattctgggcagacacagcggtgctggcctgagacatcaaggggtccgactgtgtcatcatgacatcgctgtggctaagtgagtccgaagtgagcaggtcctggagtgtctggttaccatagtgtgacatggaagagaaggtagctggcttgttctcttggatggtctgcatgggagactggcgtagggagttcagagatgaaggtccaaacaccgtgctgttaaaggagctggttggggagctcaggcccgagcccttggtggtatacgggaagctagaactccgctgcatgagtcccccagtgggcgatggctgggatggcgggagcgtgatgttatccagcaggtcgtccatgaggttttcagtcagccccatcattcagattcatggtgcctgccatgtcagtcagccgtagcagttccaccgtgcacggcttgcttactgaaggtgacaggctcgctgagctgctgtagagcatgggcgagagaggcgcatcgtcgtcctggacttcatccaactctgtgcttgccatgatgggcgacaggcggccactgactgtgctggcgttagaattggtgcgtgaacggaagtccgtccacgcatccagctcatcactgctgcgtgacgtggggctgccagaccacttggagagctgggagggactgtcgtcagctgattcgggggctgtctgcagggctgccttcttcttggctgtgcggccacggctcttggtatacttgttgctattgtccatggagacagcccgccgccggggggcttttccgctcttccccccatcagggttgatgatccaccaagagctcttgccagttccctcattctggacccgcatgaatcgactatgcagtgacaggttgtgccggatggagttcttctagccggcagagctgttgctgttgcccttatccttgaagtagggcacgcaactcaccatccactcgtagatctgggacagagtgagccgtctgtccggggagctctcgatggcgcgggtgatcaggtccgcgtaggacaggtttccccaggcgttccgccgcgacgaacatttcctcggctg

SEQ ID NO: 30595 - DNA, 906 bp, Artificial sequence
  DNA replication origin
tgctcaccacaggtcccatcatcagggttcgactccccagcggcgcctcagggagaggagagagcccaggcaccggacgcccgtcccccgcccccgccgacccctggcgggagaggaagaagggagggaaaaatggaagggccgcgggcgcgagatcgccccagtgagcccccaagcagccaccacccagggaccccgacccgtccgcctgccggcgccgcgggctccccgccccttgcacctgcgccccgcaatgccggagccagccagccctcgctgccgctcgccactggctcccgcccgcctacctggccccgaccccagccccggccccgccgcagcctcagctgcagaaggaagaaagcgccgggtctcctggcggcctctctaggagcaaaatggcgactccatgcacaagattggcgtccgcggtgactgcgaggccggtgggcggggaggggcgagggcgggactagagcccggacagcggaggcacctagctgggggctgtgggcgtggcccaccagtgggtaaggcgcggggcagtgggtgtagccacaggggtggagtcgggctggcacgatgggcggggcggtgggcggggatgcgcctgttttggtccctggggagctgctagccccacaccaactgtgacagcccaggcaggttacaaggaatgaatgtggacagagtatgacatttggaattacaaatacctgggttcaagcctccactggcctgtaaccttggacaagtcatttcaaccctctgagcttgtttcctcatctgaaaaacaaagatagcagcacccattccataagactgttgtgaggattaaatgagacaatacggccagacgcggtggttcacgcctgtaattccagcactttgcgaggctgaggcggg

SEQ ID NO: 30596 - DNA, 944 bp, Artificial sequence
  DNA replication origin
aggtgaggggcgcctctgcccggccacccctactgggaagtgaggagcccctctgcccggccagccgccccgtccgcgagggaggtgggggggtcagccccccgcccggccagccgccccgtccgggagggaggtggggggggtcagcccccctgcccggccagccgccccgtccgggagggaggtggggggggtcagcccccctgcccggccagccgccccgtccgggaggtgaggggcgcctctgcccggccgcccctactgggaagtgaggagcccctctgcctggccagccgccccgtccgggagggaggtggggggtcagccccccgaccggccagccgccccgtccgggagggaggtgggggggtcagccccccgcccggccagccgccccgcccaggaggtgaggggcgcctctgcccggccgcccctactgggaagtgaggagcccctctgcccggccaccaccccgtctgggaggtgtgcccaacagctcattgagaacgggccaggatgacaatggcggctttgtggaatagaaaggcgggaaaggtggggaaaagattgagaaatcggatggttgccgtgtctgtgtagaaagaagtagacatgggagacttttcattttgttctgcactaagaaaaattcctctgccttgggatcctgttgatctgtgaccttacccccaaccctgtgctctctgaaacatgtgctgtgtccactcagggttaaatggattaagggcggtgcaagatgtgctttgttaaacagatacttgaaggcagcatgctcgttaagagtcatcaccaatccctaatctcaagtaatcagggacacaaacactgcggaaggccgcagggtcctctgcctaggaaaaccagagacctttgttcacttgtttatctgctgaccttccctccactattgtcccatgaccctg

SEQ ID NO: 30597 - DNA, 1165 bp, Artificial sequence
  DNA replication origin
atgcagcatctgacccgccctctcctctcctggggcatcccctcggcagcctcagcctggcctctatctgcactggtgttgctaggtgactctgaggggattcccagagtgtctcatccttcgtgtgggcaggtctcaggagtggccagcagcaaaccccgtaccgcagtcttcgccagatgcccttggcgtactgtaggaggtttgctttctctgggagccctttagagtccggagggacttggccttggcctgcccttaaggctgagtttagagctttccactcatactcttccttcctctcccacatttcttgatctccaccccacccccatgccagccacccccatgccagccacctccctggaaaccagggatacagaaataaacaagacctggccctggtctgccaggggctcgcactgtggtgagaaatagatggatgcatgggacaggcatgaaactcagaagaggacacagcggggcttgctgggggtggcatttgagttgggctctgatggagacagggatactgatgggggatgggagcaaatgacaaagagagaggtgggaagaggcaggatgtgtctgggggtggtcggggctggaggcttagactctaggagtcactaagtcagacacttctggggccagataaagaacagcgtggagagaagctgggagtgagtaataggcagtggtggggacaaaggcaaaccagagaacgtgccccaggattgacacacaacaggcccgtgtgccacatttgcctctcggctgccagttttcagggtctggcctgcagtgagagatgaggcaagggaggtctgattgtaagaggttgaagtgcccaaggtgcccaggtggagcgggggtggtgtttaggagccggggtggtgtttaagtgggagagtgacatggtcgtgtttgtactttgtgctctctggaatcttccagagggtggactggaggtgagagagacaagaggaggccaggcttgtgaggaggccccaggtaggtctggtgagggagggagactgagccatgggcacagggttctctgccccctgtttcaccctgctggcttctctgcagtagagcttatacctcacactcggagagtcctgaaagtggatggcttgggcggaacttctagaaaggcaga

SEQ ID NO: 30598 - DNA, 1559 bp, Artificial sequence
  DNA replication origin
gcacacgttttagaagtgtctcgtggatggctagggggtgatgcagccagaggagggcaggaagggggcctgccctgcagaatctgtgccttatactccgataagtctgtggccctccagggtgcgtggccctacccggcctctcccctgtgcttctcaacacccctgtctctgctgggctctgctccgaggacaggactcacagcaaacctttctccttccccatggccaggacaccacccagcacccaggccaggtcctgtaaatggtcagagattcaattctgtgccggcttacactgtttggcccaggagcaggccaggaaggccctcagagactgtggccaagggagctgagacccaaggagaagagggctccttgggcatgaggagcacagcgggcccctcaactgcctcagctccaaggccaggtcgtcaccggccttttcctggaccctgaacacataagggccctctgtcccagtgtggagtctctggagctgccaagggcctgtgtgttatgagctccaggtgctgacttccctcccccaggtagcaggacctgctgtgagggaggagcagatggtaaaggctggtgctgggcacggcagaccccaggaaggacagggcgagcctggctggaacccaagtgtcgaggatggccaagggcatcccgaagtagaatcacaggtgtaaaggggacctggggctcatctggcccctgtctagggcagtgtgtaagaaatgctcctgggtgccctgagggtctgactcaggaggcctgaggtcaggcagggaatctcagttttaacacccactccagggattcctgactggtctgcctgcatgcctcctgtgatgggagtctcactccctcccgaggggctctgtgccggcttctggctctcggctatgacgtgttcttagtcaggctgagctgtgacgtactggtctgtcccctcacccactcactggccccagcttattcaccccactcattcacatagtcatcaacccctgccgaggcctccagctgcagagatgcctgtgatgaggatcccacctgggaggtgaaggggaggctgagggggtaaacgaaaacaagctgaatgcccaggatcgcagaggagtagcctgaagtgtgaagggctggccgggaggctcccgggagaggatgacataggtcacagggggaggtggggaagcattccagggaagggactcaaagaccaggcatgagaggcctttgtacaagagcacctcaggggaggaggggtgggtgatggagcctgcagagcgagcaggggcgggctcctggtaaaagaccctgcaccggcttaagagcctgagcttggccctggggccagtagggagccatgggaggatttacagcaagagcgatggggttgggtgtgtatctcaggagcagtgctggcatcaggcagtgggtgtgtgaggtgaatgctatgggagaggaggggagcctgagagagcagagctgcccgccatgccatccagcctcctgccctgccagtcctttccgtgtcccagacccctgtg

SEQ ID NO: 30599 - DNA, 1816 bp, Artificial sequence
  DNA replication origin
cctagtttccctcagaagttgcgaggacttcaggcagctccggaaatctgggatatgggttccctgcacgtagaggcacgctgagccctgggacgtggcccaccgctccctcaccgctgttccgatcccttactttcttcccatcccagtccagtgcccccacctcatcttcccagccccagccccagccccgtccttcccacgcccacctgagttcccggccccgcccccgccgcccctccccgcgcggcccgccctccccgccgagccgggctcatcaggtctttcccgcagattgctcatgggcagagaagcagaggccgcggagaggcccccgagcgcgcggtgccccagctgggccggagctaggagctggaccttgcccacccacccccggcagcagtgcccgggcaggcggcgccatggccttctctcaggtgcagtgtctggacgacaaccatgtgaactggcgctccagcgagtccaagcctgagttcttctacagcgaggagcagcggctggcgctggaggccctggtggcccgcggccgggacgccttctacgaggtgctcaagcgggagaacatccgagacttcctctcggagctggagctcaagcgcatcctggagaccatcgaggtgtacgacccgggctctgaggaccctcggggcacgggcccctctcaggggcccgaggacaatggggtcggcgacggcgaggaagccagcggggcggatggggtccccatcgaggccgagccgctgccctccctggagtactggccccagaagtcggaccgctccatcccgcagctggacctgggctggcccgacaccatcgcctaccgcggcgtgacccgggctagcgtctacatgcagccccccatagacgggcaggcccacatcaaagaggtggtgcggaagatgatcagccaggcacagaaggtgaggcagcgcggggactcctggagccatggcccaaccagccaccggacccctctcaatacaggctcactcagagcccaaaacgggagcccaacatgggcttctagggatctctgctgttttccctggctgcctcttgggtggaggtttcctccccaccttcgtggggatccgcagtttctttgcagggtagggttcccaggtcctagcaggtgacagtgggctgccccgtctcaaagggcctctttattgttggagggtgtttctggttccccagaagaaggcaccgagatagggtggagtggggaggggaggaaccccagggcttcctctcactctcccttagagtggctctgattcactgtaaaggcgcgcacacaccatgagctctctggtggggagagcttttgttgtggggtgagggaataggcatggtccaagtccatctgagactggcctggaggtccttgttcaacactgcctgtttcctagctgtgctgagcaactgggagcagattgcacaccctctctgagcctctttgtgagctttgcaatggtggaaactttccaggccaggatgcttgggtgagggaggtgtggtcctcatctgtggaagtggagtgagtccacctgagcattgtccacctgaattttgccaccggaagggacctcaagccttctctggccctccccttctccacccctgttgggctatgcagtgccctagctgtggggggccattcttggctgacacaccgtcacacattctgagaaggggtgcttgccatttgcagagacagctaggccactgctggacagttgtgaccatgagcaggtgctaatgcctgctgcacgtaagtaccttctcatcg

SEQ ID NO: 30600 - DNA, 823 bp, Artificial sequence
  DNA replication origin
ggcttcctcgccgtcgccgaccccattgtcctcgggcccctgagaggggcccgtgccccgagggtcctcagagcccgggtcgtacacctcgatggtctccaggatgcgcttgagctccagctccgagaggaagtctcggatgttctcccgcttgagcacctcgtagaaggcgtcccggccgcgggccaccagggcctccagcgccagccgctgctcctcgctgtagaagaactcaggcttggactcgctggagcgccagttcacatggttgtcgtccagacactgcacctgagagaaggccatggcgccgcctgcccgggcactgctgccgggggtgggtgggcaaggtccagctcctagctccggcccagctggggcaccgcgcgctcgggggcctctccgcggcctctgcttctctgcccatgagcaatctgcgggaaagacctgatgagcccggctcggcggggagggcgggccgcgcggggaggggcggcgggggcggggccgggaactcaggtgggcgtgggaaggacggggctggggctggggctgggaagatgaggtgggggcactggactgggatgggaagaaagtaagggatcggaacagcggtgagggagcggtgggccacgtcccagggctcagcgtgcctctacgtgcagggaacccatatcccagatttccggagctgcctgaagtcctcgcaacttctgagggaaactagggcagccggggaacttcccagtagcttcttagagtgggaggcggccccggcacagaggcgccccgcaaaccgagggcttccgggtaagggaggggtctt

SEQ ID NO: 30601 - DNA, 1740 bp, Artificial sequence
  DNA replication origin
aacacacataaatgagtgcatgtaaaactggtgaaatctggccagtgcagtggctcacgcctataatcccagaacttcgggaggccaaggtgggagaatcacttgaggccaggagtttgagaccagtctgagcaacatagtgaggccttgtctctacaaaaaaaaaaaaaaaagaaaaaagaaaaaagaaaaaaaattagctgggcatggtgtctctggtcccagctactcaggaggctgaggcttgagcccaggagttcaaggctgcattgagcaatgattgtacataccactgcactccagcctaggtgacagagcaagaccctgtcccaaaacaaacaaaaaactggtgaaatctaaataagctttgtggattgcaccagtgtcaattttctggctgtgatattattgtattatagttatgcaaaacgtcgctactggggaaaactgggtgcatacaaccttcctgctcatcaactgcagaagtgttggggtggtggaggtgggagtgaggccttggactcccttcctgaactctccagcctctgtgcattggtaagaacacagggagaagctgaggcggctcagagaaggtcttacaggggatccacagtagcagaggggctataaatgggtcttcaggaccctcaaggcagggctcccccgctgggatcacctcccctctctggccctggggcaggaggaggatgcaaatatgtgtgcctgttccccaggggccactatgttcagtagcataaagcccttggggggctatatggcagagtgtaggacttcatgcttgaggggtcagtgatggggaccacaaggatgctgggcctaggaggctagtcattgcccagggcagtggactcagaggcaaggagtcctgatgggccatgaatggtggagaaggccttggagggggggggtttgagggcacaaggcctagagatgtcaccagcctacggaagcagcatccttacgggacccaaaccagccccatccagatccagagcaagtatgggggatgggaggaagggctgggcctggtgccgggcagactggctgcggcacgcgatggggtgggggctgtttgttgggccagatttaatgggctttgctgtcccaccctcaaagcctgccttcagatgtggtctccacgctccccataaccagggtcccaaccccaggggacgctcagcagagagctgggcctgaccccagcccacagcggccctcttggcccctccctgccctagggttcaggtcgggtgctgcccgccacgcagaagcagtccggggacccctcccagaggggatcagggcttaggactgagaactgggtatctgctcaggaaagccctgagtttgggtcagtcagtgccctatccctgcctgggggctcccagcccagtaccctagacctgtttccacaactggacagctgggtatctatacagccgcacggacttcccgccacgccggcgaaactgggcacagccagggttgatccaggatcaccaacagaccctgggggcacaggggggtgccaaggctgttgacccgctgtgtgacctcagggagaacactgtccctctctgggatgggtgttccaggagctcttgggcttaggcctctgatattttcggaattcgggcaccaggggaccgtgggcagtgcgtccgccccaggtctgtctgtctgtcgaggggtgaatcagcttccggccccgccccgggc

SEQ ID NO: 30602 - DNA, 911 bp, Artificial sequence
  DNA replication origin
tcagcctgcctaggttcagagcccatcagcagtggctcatcacctgtcctctgaatcctggaccccagtgtcctcagagttctgccatggggcccccggctctgtcttggatccgactgtgtcccccaggcaagttatgtcctttctggtcctgaaaaactaatgggggtagaggtggtagggtagggcagctggatcaaacagtgcctgaactcctcatggctctttctgggatcccttctcccactcctcctctcctcctgtgcctttcctccctcctccccaccatgcagtcacttattcattcattcaatcagtgttcccagaaagtctcttctgggcccggccctggaccaggcgatacctgggacttggagatgattcaaacccagtgtctgcccttggggagcctccgtcctggtggggaaggtagactatgtaaacaaacaactgtgattcaatctttggccttaggagcccttgggaggaagctgctactgccttgggggttgggagagtcagggaaggcctcagagcacaagccctttgcaatgggccttgaagcaggaggtaaacaagggtgtgggtgggtgttagacggacagtggtgccctgggaggagggactacgtctgcaaaggcatggaggcgtccaagtgctgggtgtgtgtgagaaaatacaagcaggtcagggtggctcgtgcacggtgctgggatgggaggttctgggaccaactgtcaagggcctcgaatgccatagaaaggatacttttttcccccaggatgccatgggctgagaggtgggggtagggaggagggtcctgagaaataagtaataggctgagagctgtgactccaaagtgtggagaggatggacaggaggctggggaggagcatgggattgggcagggt

SEQ ID NO: 30603 - DNA, 976 bp, Artificial sequence
  DNA replication origin
ggatagtgccctccagcatctccctgggctgcagccacagttactgtggaacatctcaaggaggggtgtctgagatctctccgagtcctgcacagggtttccaggaggctgtgggccccatttacggactgaacagccgggaacacagacaggggagagtggggcaggggggcagtggcggaacagtggactgaggtgtgggggcttggggcaggcatacgggagtgggggcgggtcatcgctctcccccagcctgtgacggctcctccagcctctgctcagctggacagagccatcagggtcaccggcatggtactgcacccggccctgcgatggcctcctctccaggcctctgggctgttggtcttctctctgtaagcctcgcctctccctgacagagactgttgtcaggccattcaccctaccagagatccatgaccacgaggcctaggagataccgctccaatggtggtgtttcgggcaggaggaagctgagacggctttgaggggctgggggtgttgagggtatcccagtgctgtaagagggacgggaagttgagctggccagcctgacacctggcacggggccctttctgctctatccagctggcagctgagagaactggggcccagagagggtgagcaacctgccctgcaccacgcagccttgtgccttgctcctcagggaggccgactgccaggcttgcagggctaggggcgggggttgacttggcagaagaggtgggaaggagggtcaagggcacgggcagctgggtgagctggcgcagcaggaggccaggtcaagacttttggttgcaggtgggagtctgggtgaggaggccaggaagtagtgggcaggggacatgagggccactgggcaggtacaggggctaccagtgtcacacactgggtggcaggagggcatccagttcccagggcccaggatgctggagcatggaggggcttagagcaaggt

SEQ ID NO: 30604 - DNA, 1294 bp, Artificial sequence
  DNA replication origin
ctggcttggccagttcttgggcaccgagctgctgtgcagctgtgaggggaatctgcccctcttggggcctcgggatccccatgagggaaatgggtggacctgaggactcagagctcctgcctttctgtccaggatggcagtgtcaggcgaagtaggcataaaagaatatgttgacacacatgaggaggatggcattgaagccacagacacgggcccagaaggcgtgtttctggggtgtttggccatcacctggagggggttgcagaaggagagggacagatgaaggacacaaggttacacctggtgcccttgcctccaggccagggtcaaggtggaggagtgcctagggtcatccacttacctgctttagttcccaagggcacatcctgagccagggtccaccaggtaaggttctcaatctgtaagaaatgagtgaggatagggttgggggtgggggatggcagggtgggggtgacccagacaggatcaaaggttggggatggcaagatggcagctgagttcaaaaagggacggggctaggtagtccagggctagaaaattctgagtcagagtgggtcggggatgagaatgggaccagagtaagaaattgttaggggtcagggtcaggggtcagggctggctcacctggacactctgtgggggtggggtcagcaggcttccagccaccacaacagcaccactgagtgcaaagagggcgacagcgaagtgcaggtagtggatgctccccaggacggctggccgcgtgtctggctctccgcacggtggggctgggttcaggaattccaggaccagcctcgtggcccccaccaccagccctgctatcaggccccagaaggccccctggggaggagggaggcagggcatgtggggctacgggaggaggaccaaggctccccccacaggcagcagggaagagcaaattgtggcacgtccccagggagagcagaccgccgacgcccacctgctcgttggcacgtcgccagaagacgcccaggacaaagactgcagtcactggtggggccagggagctggtcactgactgcatgtagatgaagagttgcccgctgttggagtcctgcaggacggggatccaggccacactcacgccgatgagtgccactatgaccagcctgcaggcgagtggaaggcaggcagcggtcgtcgtgggaggctcttcagctctctcccacctcccctggtcactaagacttgctctctaatctttcccctgctaccccagctccagcctcctccctggactctggtccacacc

SEQ ID NO: 30605 - DNA, 1726 bp, Artificial sequence
  DNA replication origin
atggcatccctgcagagggagcagtccgggcagaggccttccggacacaggcggtggtctgggcaccccagggtgcagcccagagcagtggggtgtgttgggaaagcaggatcaggccagctgtgcaaggcctcaatgccaggctgaaggtccaggcttctacgagtataggagccatcataggttcttcatcaggagagggcgatgtccagggtggtgatgtggcaagagattgagggcaggagagtgctgaaacgcccagggcgggtgtccaggatgtgctccgcacagggtcccactctatgtgatatagttgggaagatgcaccctgaggccaggctgcctgggctcaaatgctagttctgccacttcctggctgtgtgagcttgggcaagtcacttaccttctctgtgcctgtttcttcacatgtaaaataggctattgcacggaagaaacaagttggtatatttaaagcaattagaatagtccctggcatggaggcagggtggccgtgctggggaacatctggcattgtattagggcggccctcagctgtggtgtggcagcctctgggcagcacagaatccaatcctaaagggccaccctggagtgattgaggaatccaggctggaaagtagcagcaggaatgggggtgggggtagacagggtcaggctcctagttagtctctgtccttcctactcttaggccttggtagaatctagatgcattaattcaaggaatatttattgattaggtgccatgtgccaggatgctctaggggctggggaaaccaaatgggaaaaaaaacaaagttgctgctgtcgtgggtttcagtctttgtgagtgaacaagaaaacatgttaatacagaatgaaccaaggtggtcaggaaagggctctctgaggaggtggccttgcagcaaagatctgaactaggaggtggaggcttcccaggtgcccaggaatgaggaggacctgggaagagaggcttctaggcagagggaatagcatttgcaaagaccctgaggtgggaatgtgattggggcatgtaggagcccggaggaggtgacgtggctggagcagagtgagcgaagggcaggggctggagttccacccacatccagtgatcacagagggcctgaaaggaggtcgggttttctctcagagcaatagggagccatggagggtcttgagcaggggagagatgtaattggactccatttttagcagatgactctgagtgctgtgaggagaaagaactgttgggggagagcgtggtggcagggaggcccgtggggagtcaggagggagatgatggcctctgggactgtacgggtaggggctgatgaggggacacagagaaatggttgggcccaggcatggaggtgtgcggggggaccaccagcagtaccagctctcagggctgctgtgggcacagagcccggaatggaggaggcgcttaccatgccagctcttactgccaccagcggagctagcactggggtggtaaagagtccagccgggaggaagggatgaaggaaggggtggccccagaggagggcagagtggcctctcatgatctcctaaaggatgaaggccaggtgtggtggctcacgcctgtaatcccagcagttcgggaggccaaggcgggtggatcacttgaggtcaggagtttgagaccagcctggccaacatgctgaaaccccgtctctactaaaaatacaaa

SEQ ID NO: 30606 - DNA, 791 bp, Artificial sequence
  DNA replication origin
gcctcaggagctaaaatgctgggattgtgttccagctcctgcctgcctctgctgtgtgattgtgggtgtattgcttcacctctctgtgcctcagttttcccatctgtaaaatgggtgcaatcacatctcccttgtctcagaccttgaacacctggcacggggtgggaggctggctgagagcctggtctcacactgccttcaccggctccctctctccgcaggtggtactcgggcaggatttcccggcagctggccgaagagattctgatgaagcggaaccatctgggagccttcctgatccgggagagtgagagctccccaggggagttctctgtgtctgtgaagtgagctctggcccttgggggtgtgtgcagaggagggtgggcggggttgggcagcatttgagctgagccttggggcccgggacgggctcacggagtgagggtggaggaatggcatccctgcagagggagcagtccgggcagaggccttccggacacaggcggtggtctgggcaccccagggtgcagcccagagcagtggggtgtgttgggaaagcaggatcaggccagctgtgcaaggcctcaatgccaggctgaaggtccaggcttctacgagtataggagccatcataggttcttcatcaggagagggcgatgtccagggtggtgatgtggcaagagattgagggcaggagagtgctgaaacgcccagggcgggtgtccaggatgtgctccgcacagggtcccactctatgtgatatagttgggaagatgcaccctgaggccagg

SEQ ID NO: 30607 - DNA, 1025 bp, Artificial sequence
  DNA replication origin
gcctcaggcaggtccctgccctctgttcctcagttttcctatctataactcaaggagggcagatgctccaatctgttcagggtggagggttctagagctcttgctgagagctggcccggccctgggtggtggctgggagagggctgggcgggaagcagaccctgtaggccctgcctttggagtctgggggggagttggacattggcagagcagagtctggtaccagggtggagcaagaactgggcctggggcccagctatcctggggcctgggacctaccagcctagggatgtcccaggttgggctctgggcaggtggcagccaacactgctgccctgagaatgactggggcagggcccagcctcagaacaggcatggggcccaagaaatctatgcaaaccaactggatatgctttaaatggcagctgaggcagccccaagatacagccacttagtcattcactaaacactggccacaattccagggggtccagcccgggtgatgctggagacacaaggggtcagagcagctgtgttctgggggagaaagaggacatgaaggacatactacatgggaagacagtgagcattaaggtgatttctcagggaaggcttctcagaagaggtggcaatgagtgagattttgaaggatgtgtaggagttggttaagtagaaaaagagaaaggcatccctgggagagggtcaggatgagcaaagggagagcaatgagagagaacttgtggcatgtgggactggcaggaggcccccaaatgccaagccatgtggggagccatggaggtgttatggtaggactcagtcagatatggagacaggtgacagggccaagcaggctggcgggacagtttgggagctgagatgtgtgtgtggctgtgcggtgggaagggaaggaggtgcagggccagggtggggcatgagaggtatttcctctttatctctctttaagttagttccaaagctgccaccacctccagcttcctgtgctgggcgaggccccctccgaccca

SEQ ID NO: 30608 - DNA, 1164 bp, Artificial sequence
  DNA replication origin
catcgttgtccctgcggtatcgccggtgcccaactcagtatctagcacacggtaagtactcagggaagagttgtggaggatacattttgcggaaggggaaactgaatctcaaggaaggaagatgatttgctcgaggccacatgaaaattagaaggcaggagagggatttgagcagggtctgtggctccgagaccgaggctcctctccgggtgactcttcccgggattctggcctcatttggacctccagggccccggacctgagcctggggcagagctgggacccaggcgggcgaggctgagcggctagctgagagtcgccagcagagggcgctgtctacacgtgtccgggcgcaaggaggcaccagtagggctgagcctggggaggcagagagagcggcgggttgtggggtggtggggcagtggggcggtggggcggtggggcggtggggcgacaggatggggaggagactgaggcagcgggtgctgtgggaacctacaggagaactttaccagctggataaaggcaggtttcccaggagtttattttttaactgtatgctgaaaaataaatgggaggtggcgtttgagaaagcgaagtgtgttccaggtggagagaacagcatgtgtgaaggcccagagccggcccccggatcttttcagaatgcatcttggtcaggggaggatggtcggccaggacacatgcatggccccctggagtcgtgcagcgctggccttggtgagtcttcaggcacagattgaggcgtaaaggaggtgctcctgccgaaatttaattatgcccaggcatggtatcccagcattttgggaggccaaggtgagaggattgcttgaggccaggaagttcgagaccagcctgggcaacatagtgagatgcgatctctacaaaaatttaaaaaattagccaggtgtggtggcatacacttgtagtcccagctactctggaggctaaggtggaaggatcacttgagcacaagaagtggaggctgcagtgagctgaaggggccactgcactccagcctgggtgacagaacaagaccctgtctaaaaaacaaacaaagaagtaaatgccctagtctcaggtattctgttagagcaacaccaaacacactaagacagggaggaaggggctgggtgggctcccaca

SEQ ID NO: 30609 - DNA, 1462 bp, Artificial sequence
  DNA replication origin
gcctgggcaacatagtgagatgcgatctctacaaaaatttaaaaaattagccaggtgtggtggcatacacttgtagtcccagctactctggaggctaaggtggaaggatcacttgagcacaagaagtggaggctgcagtgagctgaaggggccactgcactccagcctgggtgacagaacaagaccctgtctaaaaaacaaacaaagaagtaaatgccctagtctcaggtattctgttagagcaacaccaaacacactaagacagggaggaaggggctgggtgggctcccacagtcctgtccagccactgggcccgtgcagcacagcacttcccgggtgcatcagcattgagcctttcctgagtgctgctgccatctgtcctccagttatgaagggaacaagagacccagaaggggtggggctggcccatggtctcccttgctcacagccctgggctggagcccttgtacagagctgcctcctggtcagccaagaaaggctcactggaggaggaggggtaggtcaggcctcttcctggcctcagaacaggatatgggtgggggatgttggtgtctcctacactggggcctgcccaccttcttcccccaatgttcctccatcctgctctgagcgttgtgcagaggaccctggactgtggggttcatcctttcctagggagcttccaagggcccacacagcctgctccccgcaccccatggaggcgcaatgatagcagaattactggcactgttaacctgctggagtgggaacctggagtcctggaaggtcagaggtcaagctggggggctgggggcactgcctgcactggccactgcagtgcagagaagctgaggtgacctcaatctgagagactggagaccagggttgggtgagggtgcatgggaaacgggtggatggggactgggtgaatgggtactgagtggatggggactgggtggatggggagtgggtggatggatagtgggtggatggggactgagtggatggggactgggtagatggatactgggtggatggggactgagtggatgggtactgggtggatggggactgggtgggtggggattggtggatggggattggtggatggggactgggtggatggggactgggtggatggggattggtggatggggactgggtggatggggactgggtggatggggattggtggatggggactgggtggatggggactgggtagatggggactgggtgggtggggactgggtggatggggattggtagatggggactgggtggatggggatttgtggatggggactgggtggatggggattggtggatggggactgggtggatgggaactgggtagatggatactgggtggattgggactggtggatggggactgactggatggaaggagggcagggggccaggtggggccaggcagcctgcctgctctgctgagcagcct

SEQ ID NO: 30610 - DNA, 1596 bp, Artificial sequence
  DNA replication origin
gcagccccagagttctgagcttctgatatcccaaaagaaatggaaacaggtggcccctggatgaaggaggaggtcaggggtggctggaaggcaggtcctggggagtgtaggggctggaagaagacggagggggaaggtgtggtagacactattataatagctgactgatccttgtgtaccattcccaattcccctcttccctgctgctttccactgtggaggctggaaaagagaaactacttaccttctcagcctttgttgcagctgggagtgaccatgtgacacagttttggccaatgacatctaaggagtctcattagatctcattatgtgtgtgtggcaggggtgggggtggggggtgaggggggcggggtgcctgggaaattattgacgaaagtgacaaacgctttcaattaaccctgaaagtaaccattccttttcctttctgtcttaaatgcggaggcagatgcaacgccaggagcagcatcagccacgctgtaaacaagggggaaacgccaagcgcattacagaggacgtcagccctgccatcactgggctggggaaacaatgccagccatggctggtctccgggttcacagtgataagggaaataaacccttatttgtctaagccattgtgatttgttttccttttttttttttttcagccactttacagaagagggatatttgttaaaattcagaaggagagagaaaaggagagactgcgcaggttgaaacggtggtgggaaaatgtcaaagagagagagactttgtttgcaggtggcaggggcctgagcacgattttgtcacaatagcagattgagcacaggatgtgccaggcacagcgctttatactgatcgacgcgttttaaaaatattttgtaggccgggcgcggtggttcacgcctgtaatcccagcactttgggaggctcaggcgggcggatcacgaggtcaggaaattgtgaccatcctggctaacacggtgaaaccccgtctctagcaaaaatacaaaaaattagccaggcgtggtggcacgcgcctgtagtcccagctactcgagaggatgaggcaggagaatcgcttgaactcgggagacagaggttgcagtgagctgagatcgctcacttgagatcgcgccactgcactccagcctgggcgatagagcgagactccggctaaaaaacaaacaaacaaacaacaaaaaaaaacaaatttgtagagacggggggggggggtctcacaatgttgaccaggctagtctcgaactcctgacctcaagccgtcctcaggcccggcctcccaaagtgctaggattaaggcctgagccaccgcgcccagcagaacgcatttagttctcactgcaactttctgaggcaggctgtgctgttatccccaccacacagagggaactgcggtgctcttcttagacaagaaaagcgccagccagcgggtggtgaggcaggatttgaactcgagcacacggagcccatccagtcccgatggactgactcctccgtcagcggaggagggagcgagtcgttaggtgaacagtgagtgtctcagggtcccgagtgtgaggtggggcgtcggatg

SEQ ID NO: 30611 - DNA, 1125 bp, Artificial sequence
  DNA replication origin
gtgggatacgccgggccccgcctcgccttcccgccccgtctcccagtcctccgccctggccctgccatagggagcccggcccgggggttctgcggctgccgcagccctgacaggggccgggggcgtggagggagcgggccggcgctggcgcagccgcagaactgtgcaggagagactgtgaccccggtggccctctctgagtcttggtttcttcctccgtgaaatggggcttgagcagcgcctcctcgacggggaagagggcccgcagagacagcgcgccagagagtccagggcagcgcagggaaggagcctgtggatccctcccagacccatcccaccgccgatcccgcccaggggcggcccagagcatttcctgaagggcctcaggaaataccaggcccccgcccccaaccctcccgccacccccgccgcccccgcccgtccgcccgctagcgtccagctccctggccgcccctcccccgcctccttccggccggccccctgctcgcatcttggcttgctgaggctgcgggtcttggccgggccttcgagaatcccccgccgcctccccttctggatgtatctgcgccgcctcctttctccctccccttccttccagcccttcattccctcggggcgggcgggcaggccggcaggccccgcgcaaacctggggaaaggtaggtggagggtgcggggtccgataactggcggccacacccagtaggccaggcagctgcaggaaagaggttaaaggagttggaagagattctgggaactcggggaaggaatcagggaaagctgcctggaggaggcgacatttaagtttggactggaagagcaaggcgggtcagacaataattcatgtatttaccaagcatttatcgagcacttactgtgttcaagaccctggggttggggcaggaggcaagataactgtgtccttatgggttttgcagtagggaaaacagtgaaggcaaccatctcacaaactgctggagttgagaccaccagaggggacaatagaatgttagttccatttgatcaatgagaccagagaggactggggtgaaattactttcccacagtcacaagtagtagaactgggattcgaacgtgtgctact

SEQ ID NO: 30612 - DNA, 2075 bp, Artificial sequence
  DNA replication origin
ctctgctgtgtgattgtgggtgtattgcttcacctctctgtgcctcagttttcccatctgtaaaatgggtgcaatcacatctcccttgtctcagaccttgaacacctggcacggggtgggaggctggctgagagcctggtctcacactgccttcaccggctccctctctccgcaggtggtactcgggcaggatttcccggcagctggccgaagagattctgatgaagcggaaccatctgggagccttcctgatccgggagagtgagagctccccaggggagttctctgtgtctgtgaagtgagctctggcccttgggggtgtgtgcagaggagggtgggcggggttgggcagcatttgagctgagccttggggcccgggacgggctcacggagtgagggtggaggaatggcatccctgcagagggagcagtccgggcagaggccttccggacacaggcggtggtctgggcaccccagggtgcagcccagagcagtggggtgtgttgggaaagcaggatcaggccagctgtgcaaggcctcaatgccaggctgaaggtccaggcttctacgagtataggagccatcataggttcttcatcaggagagggcgatgtccagggtggtgatgtggcaagagattgagggcaggagagtgctgaaacgcccagggcgggtgtccaggatgtgctccgcacagggtcccactctatgtgatatagttgggaagatgcaccctgaggccaggctgcctgggctcaaatgctagttctgccacttcctggctgtgtgagcttgggcaagtcacttaccttctctgtgcctgtttcttcacatgtaaaataggctattgcacggaagaaacaagttggtatatttaaagcaattagaatagtccctggcatggaggcagggtggccgtgctggggaacatctggcattgtattagggcggccctcagctgtggtgtggcagcctctgggcagcacagaatccaatcctaaagggccaccctggagtgattgaggaatccaggctggaaagtagcagcaggaatgggggtgggggtagacagggtcaggctcctagttagtctctgtccttcctactcttaggccttggtagaatctagatgcattaattcaaggaatatttattgattaggtgccatgtgccaggatgctctaggggctggggaaaccaaatgggaaaaaaaacaaagttgctgctgtcgtgggtttcagtctttgtgagtgaacaagaaaacatgttaatacagaatgaaccaaggtggtcaggaaagggctctctgaggaggtggccttgcagcaaagatctgaactaggaggtggaggcttcccaggtgcccaggaatgaggaggacctgggaagagaggcttctaggcagagggaatagcatttgcaaagaccctgaggtgggaatgtgattggggcatgtaggagcccggaggaggtgacgtggctggagcagagtgagcgaagggcaggggctggagttccacccacatccagtgatcacagagggcctgaaaggaggtcgggttttctctcagagcaatagggagccatggagggtcttgagcaggggagagatgtaattggactccatttttagcagatgactctgagtgctgtgaggagaaagaactgttgggggagagcgtggtggcagggaggcccgtggggagtcaggagggagatgatggcctctgggactgtacgggtaggggctgatgaggggacacagagaaatggttgggcccaggcatggaggtgtgcggggggaccaccagcagtaccagctctcagggctgctgtgggcacagagcccggaatggaggaggcgcttaccatgccagctcttactgccaccagcggagctagcactggggtggtaaagagtccagccgggaggaagggatgaaggaaggggtggccccagaggagggcagagtggcctctcatgatctcctaaaggatgaaggccaggtgtggtggctcacgcctgtaatcccagcagttcgggaggccaaggcgggtggatcacttgaggtcag

SEQ ID NO: 30613 - DNA, 1139 bp, Artificial sequence
  DNA replication origin
tgggatacgccgggccccgcctcgccttcccgccccgtctcccagtcctccgccctggccctgccatagggagcccggcccgggggttctgcggctgccgcagccctgacaggggccggggacgtggagggagcgggccggcgctggcgcagccgcagaactgtgcaggagagactgtgaccccggtggccctctctgagtcttggtttcttcctccgtgaaatggggcttgagcagcgcctcctcgacggggaagagggcccgcagagacagcgcgccagagagtccagggcagcgcagggaaggagcctgtggatccctcccagacccatcccaccgccgatcccgcccaggggcggcccagagcatttcctgaagggcctcaggaaataccaggcccccgcccccaaccctcccgccacccccgccgcccccgcccgtccgcccgctagcgtccagctccctggccgcccctcccccgcctccttccggccggccccctgctcgcatcttggcttgctgaggctgcgggtcttggccgggccttcgagaatcccccgccgcctccccttctggatgtatctgcgccgcctcctttctccctccccttccttccagcccttcattccctcggggcgggcgggcaggccggcaggccccgcgcaaacctggggaaaggtaggtggagggtgcggggtccgataactggcggccacacccagtaggccaggcagctgcaggaaagaggttaaaggagttggaagagattctgggaactcggggaaggaatcagggaaagctgcctggaggaggcgacatttaagtttggactggaagagcaaggcgggtcagacaataattcatgtatttaccaagcatttatcgagcacttactgtgttcaagaccctggggttggggcaggaggcaagataactgtgtccttatgggttttgcagtagggaaaacagtgaaggcaaccatctcacaaactgctggagttgagaccaccagaggggacaatagaatgttagttccatttgatcaatgagaccagagaggactggggtgaaattactttcccacagtcacaagtagtagaactgggattcgaacgtgtgctactgtaacatgagcccct

SEQ ID NO: 30614 - DNA, 1578 bp, Artificial sequence
  DNA replication origin
atatcccaaaagaaatggaaacaggtggcccctggatgaaggaggaggtcaggggtggctggaaggcaggtcctggggagtgtaggggctggaagaagacggagggggaaggtgtggtagacactattataatagctgactgatccttgtgtaccattcccaattcccctcttccctgctgctttccactgtggaggctggaaaagagaaactacttaccttctcagcctttgttgcagctgggagtgaccatgtgacacagttttggccaatgacatctaaggagtctcattagatctcattatgtgtgtgtggcaggggtgggggtggggggtgaggggggcggggtgcctgggaaattattgacgaaagtgacaaacgctttcaattaaccctgaaagtaaccattccttttcctttctgtcttaaatgcggaggcagatgcaacgccaggagcagcatcagccacgctgtaaacaagggggaaacgccaagcgcattacagaggacgtcagccctgccatcactgggctggggaaacaatgccagccatggctggtctccgggttcacagtgataggggaaataaacccttatttgtctaagccattgtgatttgttttccttttttttttttttcagccactttacagaagagggatatttgttaaaattcagaaggagagagaaaaggagagactgcgcaggttgaaacggtggtgggaaaatgtcaaagagagagagactttgtttgcaggtggcaggggcctgagcacgattttgtcacaatagcagattgagcacaggatgtgccaggcacagcgctttatactgatcgacgcgttttaaaaatattttgtaggccgggcgcggtggttcacgcctgtaatcccagcactttgggaggctcaggcgggcggatcacgaggtcaggaaattgtgaccatcctggctaacacggtgaaaccccgtctctagcaaaaatacaaaaaattagccaggcgtggtggcacgcgcctgtagtcccagctactcgagaggatgaggcaggagaatcgcttgaactcgggagacagaggttgcagtgagctgagatcgctcacttgagatcgcgccactgcactccagcctgggcgatagagcgagactccggctaaaaaacaaacaaacaaacaacaaaaaaaaacaaatttgtagagacggggggggggggggtctcacaatgttgaccaggctagtctcgaactcctgacctcaagccgtcctcaggcccggcctcccaaagtgctaggattaaggcctgagccaccgcgcccagcagaacgcatttagttctcactgcaactttctgaggcaggctgtgctgttatccccaccacacagagggaactgcggtgctcttcttagacaagaaaagcgccagccagcgggtggtgaggcaggatttgaactcgagcacacggagcccatccagtcccgatggactgactcctccgtcagcggaggagggagcgagtcgttaggtgaacagtgagtgtctcagggtcccgagtgtgaggtggggcgtcggatgtgtcg

SEQ ID NO: 30615 - DNA, 1561 bp, Artificial sequence
  DNA replication origin
caacatagtgagatgcgatctctacaaaaatttaaaaaattagccaggtgtggtggcatacacttgtagtcccagctactctggaggctaaggtggaaggatcacttgagcacaagaagtggaggctgcagtgagctgaaggggccactgcactccagcctgggtgacagaacaagaccctgtctaaaaaacaaacaaagaagtaaatgccctagtctcaggtattctgttagagcaacaccaaacacactaagacagggaggaaggggctgggtgggctcccacagtcctgtccagccactgggcccgtgcagcacagcacttcccgggtgcatcagcattgagcctttcctgagtgctgctgccatctgtcctccagttatgaagggaacaagagacccagaaggggtggggctggcccatggtctcccttgctcacagccctgggctggagcccttgtacagagctgcctcctggtcagccaagaaaggctcactggaggaggaggggtaggtcaggcctcttcctggcctcagaacaggatatgggtgggggatgttggtgtctcctacactggggcctgcccaccttcttcccccaatgttcctccatcctgctctgagcgttgtgcagaggaccctggactgtggggttcatcctttcctagggagcttccaagggcccacacagcctgctccccgcaccccatggaggcgcaatgatagcagaattactggcactgttaacctgctggagtgggaacctggagtcctggaaggtcagaggtcaagctggggggctgggggcactgcctgcactggccactgcagtgcagagaagctgaggtgacctcaatctgagagactggagaccagggttgggtgagggtgcatgggaaacgggtggatggggactgggtgaatgggtactgagtggatggggactgggtggatggggagtgggtggatggatagtgggtggatggggactgagtgcatggggactgggtagatggatactgggtggatggggactgagtggatgggtactgggtggatggggactgggtgggtggggattggtggatgggtactgggtggatggggactgggtggatggggactgggtgggtggggattggtggatgggtactgggtggatggggactgggtgggtagggattggtggatggggactgggtggatggggattggtggatggggattggtggatggggactgggtgggtggggactgggtggatggggattggtggatggggactgggtggatggggactgggtggatggggattggtggatggggactgggtggatggggactgggtagatggggactgggtgggtggggactgggtggatggggattggtagatggggactgggtggatggggatttgtggatggggactgggtggatggggattggtggatggggactgggtggatgggaactgggtagatggatactgggtggattgggactggtggatggggactgactggatggaaggagggcagggggccaggtggggccaggc

SEQ ID NO: 30616 - DNA, 1202 bp, Artificial sequence
  DNA replication origin
gtccctgcggtatcgccggtgcccaactcagtatctagcacacggtaagtactcagggaagagttgtggaggatacattttgcggaaggggaaactgaatctcaaggaaggaagatgatttgctcgaggccacatgaaaattagaaggcaggagagggatttgagcagggtctgtggctccgagaccgaggctcctctccgggtgactcttcccgggattctggcctcatttggacctccagggccccggacctgagcctggggcagagctgggacccaggcgggcgaggctgagcggctagctgagagtcgccagcagagggcgctgtctacacgtgtccgggcgcaaggaggcaccagtagggctgagcctggggagacagagagagcggcgggttgtggggtggtggggcagtggggcggtggggcggtggggcggtggggcgacaggatggggaggagactgaggcagcgggtgctgtgggaacctacaggagaactttaccagctggataaaggcaggtttcccaggagtttattttttaactgtatgctgaaaaataaatgggaggtggcgtttgagaaagcgaagtgtgttccaggtggagagaacagcatgtgtgaaggcccagagccggcccccggatcttttcagaatgcatcttggtcaggggaggatggtcggccaggacacatgcatggccccctggagtcgtgcagcgctggccttggtgaggcacagattgaggcgtaaaggaggtgctcctgccgaaatttaattatgcccaggcatggtatcccagcattttgggaggccaaggtgagaggattgcttgaggccaggaagttcgagaccagcctgggcaacatagtgagatgcgatctctacaaaaatttaaaaaattagccaggtgtggtggcatacacttgtagtcccagctactctggaggctaaggtggaaggatcacttgagcacaagaagtggaggctgcagtgagctgaaggggccactgcactccagcctgggtgacagaacaagaccctgtctaaaaaacaaacaaagaagtaaatgccctagtctcaggtattctgttagagcaacaccaaacacactaagacagggaggaaggggctgggtgggctcccacagtcctgtccagccactgggcccgtgcagcacagcacttcccgggtgcatcag

SEQ ID NO: 30617 - DNA, 1225 bp, Artificial sequence
  DNA replication origin
tgctcatcgttgtccctgcggtatcgccggtgcccaactcagtatctagcacacggtaagtactcagggaagagttgtggaggatacattttgcggaaggggaaactgaatctcaaggaaggaagatgatttgctcgaggccacatgaaaattagaaggcaggagagggatttgagcagggtctgtggctccgagaccgaggctcctctccgggtgactcttcccgggattctggcctcatttggacctccagggccccggacctgagcctggggcagagctgggacccaggcgggcgaggctgagcggctagctgagagtcgccagcagagggcgctgtctacacgtgtccgggcgcaaggaggcaccagtagggctgagcctggggagacagagagagcggcgggttgtggggtggtggggcagtggggcggtggggcggtggggcggtggggcgacaggatggggaggagactgaggcagcgggtgctgtgggaacctacaggagaactttaccagctggataaaggcaggtttcccaggagtttattttttaactgtatgctgaaaaataaatgggaggtggcgtttgagaaagcgaagtgtgttccaggtggagagaacagcatgtgtgaaggcccagagccggcccccggatcttttcagaatgcatcttggtcaggggaggatggtcggccaggacacatgcatggccccctggagtcgtgcagcgctggccttggtgaggcacagattgaggcgtaaaggaggtgctcctgccgaaatttaattatgcccaggcatggtatcccagcattttgggaggccaaggtgagaggattgcttgaggccaggaagttcgagaccagcctgggcaacatagtgagatgcgatctctacaaaaatttaaaaaattagccaggtgtggtggcatacacttgtagtcccagctactctggaggctaaggtggaaggatcacttgagcacaagaagtggaggctgcagtgagctgaaggggccactgcactccagcctgggtgacagaacaagaccctgtctaaaaaacaaacaaagaagtaaatgccctagtctcaggtattctgttagagcaacaccaaacacactaagacagggaggaaggggctgggtgggctcccacagtcctgtccagccactgggcccgtgcagcacagcacttcccgggtgcatcagcattgagccttt

SEQ ID NO: 30618 - DNA, 1577 bp, Artificial sequence
  DNA replication origin
caacatagtgagatgcgatctctacaaaaatttaaaaaattagccaggtgtggtggcatacacttgtagtcccagctactctggaggctaaggtggaaggatcacttgagcacaagaagtggaggctgcagtgagctgaaggggccactgcactccagcctgggtgacagaacaagaccctgtctaaaaaacaaacaaagaagtaaatgccctagtctcaggtattctgttagagcaacaccaaacacactaagacagggaggaaggggctgggtgggctcccacagtcctgtccagccactgggcccgtgcagcacagcacttcccgggtgcatcagcattgagcctttcctgagtgctgctgccatctgtcctccagttatgaagggaacaagagacccagaaggggtggggctggcccatggtctcccttgctcacagccctgggctggagcccttgtacagagctgcctcctggtcagccaagaaaggctcactggaggaggaggggtaggtcaggcctcttcctggcctcagaacaggatatgggtgggggatgttggtgtctcctacactggggcctgcccaccttcttcccccaatgttcctccatcctgctctgagcgttgtgcagaggaccctggactgtggggttcatcctttcctagggagcttccaagggcccacacagcctgctccccgcaccccatggaggcgcaatgatagcagaattactggcactgttaacctgctggagtgggaacctggagtcctggaaggtcagaggtcaagctggggggctgggggcactgcctgcactggccactgcagtgcagagaagctgaggtgacctcaatctgagagactggagaccagggttgggtgagggtgcatgggaaacgggtggatggggactgggtgaatgggtactgagtggatggggactgggtggatggggagtgggtggatggatagtgggtggatggggactgagtggatggggactgggtagatggatactgggtggatggggactgagtggatgggtactgggtggatggggactgggtgggtggggattggtggatgggtactgggtggatggggactgggtggatggggactgggtgggtggggattggtggatgggtactgggtggatggggactgggtgggtagggattggtggatggggactgggtggatggggattggtggatggggattggtggatggggactgggtgggtggggactgggtggatggggattggtggatggggactgggtggatggggactgggtggatggggattggtggatggggactgggtggatggggactgggtagatggggactgggtgggtggggactgggtggatggggattggtagatggggactgggtggatggggatttgtggatggggactgggtggatggggattggtggatggggactgggtggatgggaactgggtagatggatactgggtggattgggactggtggatggggactgactggatggaaggagggcagggggccaggtggggccaggcagcctgcctgctctgc

SEQ ID NO: 30619 - DNA, 1582 bp, Artificial sequence
  DNA replication origin
agcttctgatatcccaaaagaaatggaaacaggtggcccctggatgaaggaggaggtcaggggtggctggaaggcaggtcctggggagtgtaggggctggaagaagacggagggggaaggtgtggtagacactattataatagctgactgatccttgtgtaccattcccaattcccctcttccctgctgctttccactgtggaggctggaaaagagaaactacttaccttctcagcctttgttgcagctgggagtgaccatgtgacacagttttggccaatgacatctaaggagtctcattagatctcattatgtgtgtgtggcaggggtgggggtggggggtgaggggggcggggtgcctgggaaattattgacgaaagtgacaaacgctttcaattaaccctgaaagtaaccattccttttcctttctgtcttaaatgcggaggcagatgcaacgccaggagcagcatcagccacgctgtaaacaagggggaaacgccaagcgcattacagaggacgtcagccctgccatcactgggctggggaaacaatgccagccatggctggtctccgggttcacagtgataggggaaataaacccttatttgtctaagccattgtgatttgttttccttttttttttttttcagccactttacagaagagggatatttgttaaaattcagaaggagagagaaaaggagagactgcgcaggttgaaacggtggtgggaaaatgtcaaagagagagagactttgtttgcaggtggcaggggcctgagcacgattttgtcacaatagcagattgagcacaggatgtgccaggcacagcgctttatactgatcgacgcgttttaaaaatattttgtaggccgggcgcggtggttcacgcctgtaatcccagcactttgggaggctcaggcgggcggatcacgaggtcaggaaattgtgaccatcctggctaacacggtgaaaccccgtctctagcaaaaatacaaaaaattagccaggcgtggtggcacgcgcctgtagtcccagctactcgagaggatgaggcaggagaatcgcttgaactcgggagacagaggttgcagtgagctgagatcgctcacttgagatcgcgccactgcactccagcctgggcgatagagcgagactccggctaaaaaacaaacaaacaaacaacaaaaaaaaacaaatttgtagagacggggggggggggggtctcacaatgttgaccaggctagtctcgaactcctgacctcaagccgtcctcaggcccggcctcccaaagtgctaggattaaggcctgagccaccgcgcccagcagaacgcatttagttctcactgcaactttctgaggcaggctgtgctgttatccccaccacacagagggaactgcggtgctcttcttagacaagaaaagcgccagccagcgggtggtgaggcaggatttgaactcgagcacacggagcccatccagtcccgatggactgactcctccgtcagcggaggagggagcgagtcgttaggtgaacagtgagtgtctcagggtcccgagtgtgaggtggggcgtcggatgt

SEQ ID NO: 30620 - DNA, 945 bp, Artificial sequence
  DNA replication origin
ctgagtcttggtttcttcctccgtgaaatggggcttgagcagcgcctcctcgacggggaagagggcccgcagagacagcgcgccagagagtccagggcagcgcagggaaggagcctgtggatccctcccagacccatcccaccgccgatcccgcccaggggcggcccagagcatttcctgaagggcctcaggaaataccaggcccccgcccccaaccctcccgccacccccgccgcccccgcccgtccgcccgctagcgtccagctccctggccgcccctcccccgcctccttccggccggccccctgctcgcatcttggcttgctgaggctgcgggtcttggccgggccttcgagaatcccccgccgcctccccttctggatgtatctgcgccgcctcctttctccctccccttccttccagcccttcattccctcggggcgggcgggcaggccggcaggccccgcgcaaacctggggaaaggtaggtggagggtgcggggtccgataactggcggccacacccagtaggccaggcagctgcaggaaagaggttaaaggagttggaagagattctgggaactcggggaaggaatcagggaaagctgcctggaggaggcgacatttaagtttggactggaagagcaaggcgggtcagacaataattcatgtatttaccaagcatttatcgagcacttactgtgttcaagaccctggggttggggcaggaggcaagataactgtgtccttatgggttttgcagtagggaaaacagtgaaggcaaccatctcacaaactgctggagttgagaccaccagaggggacaatagaatgttagttccatttgatcaatgagaccagagaggactggggtgaaattactttcccacagtcacaagtagtagaactgggattcgaacgtgtgctactgtaacatgagccccta

SEQ ID NO: 30621 - DNA, 1526 bp, Artificial sequence
  DNA replication origin
tggctttcactctctggctccctccttggggttgggggctggtgggcagtgctccctggctgtggtctccacaggccaactctgcggcagctgagagcccctccctggcctgggcccctctgcagccgccccaggtgagcgctggtgcccacctcagagacggagaggccgcggggagggcggtgcgtgggcttttgggtcggcatggttgccagcgaccctcggggccgggtgtgtccgtggggggaccttgggagctgtggtacagaggaggcgcggccgcgagtcccggcggggcgaagcccgcggctgctggacccacccggccgggaatagtgctcctggttgtttccggctcgcgtgggtgtgtcggcggcggggcctgacacccccggcctcctggcctcccgcctggcccaactggggtctggggctggggagggcgcatgctcagcctggtggctgtgtgccgcccctggcagggcctgcggtgggtgccaagatgggaagtgacatgtcctggaccccacactagtgggaggtaaggctgaggagccgttctggcccttctgcccaccccacagactctctggggtgggacccccttccagggaggctggagggtcacactgtcccctcccctcccccacctcagctgctgtcacttttctgggatttctgggggttcaggtagcacccccaccccagaatcttcctgagctctcattcccagtgaaccaaacccatggaagccagagatggaaaagcctaaccggccagcggaggcagcgtggctgcagagcacatgaggcctggctaggctgtgtgacctcggcaagggacaccccacgctggagcccagccactgggaaggctctgcttagggcctgactcctggtgggggtggggtgcggttggaacaagagtgctggtttctgaaccgaggagagcccacatccagtgtcgtccaagaccaggaatgcccaggtggggccctgctcacctgtgttcttctgtgttcccagctggttcatggggcggcggcccgagtacacagaccccaaggtggtggctcagggtgaaggccgggaaggtaaagctccctcccctctcttacccccatcccccatacaggttacagcctgggagtgggtgggcccagggttggggtgaatgccggggacctgccaggcacataggagctagcccacaaatgttcccagatgagggcctggttggagcacagagggtttgtcatgtctgcctgtcccggcagcccctttacctcccagtgaggggcttgggtcaggcactgttgtccccattttacagatgagaacgctgaggctgagattcccagatcaacctgggtctctctctgccccagcccagcctggctgatgctgcccttctgtccccagtgacccgtgtccgttctcagggctttgtcaccctcctcttcaacgtggtgaccaaggacatgaggaaactgggctatgacactgggccttctgatacacagggtg

SEQ ID NO: 30622 - DNA, 1805 bp, Artificial sequence
  DNA replication origin
agggggtcccaccccagagagtctgtggggtgggcagaagggccagaacggctcctcagccttacctcccactagtgtggggtccaggacatgtcacttcccatcttggcacccaccgcaggccctgccaggggcggcacacagccaccaggctgagcatgcgccctccccagccccagaccccagttgggccaggcgggaggccaggaggccgggggtgtcaggccccgccgccgacacacccacgcgagccggaaacaaccaggagcactattcccggccgggtgggtccagcagccgcgggcttcgccccgccgggactcgcggccgcgcctcctctgtaccacagctcccaaggtccccccacggacacacccggccccgagggtcgctggcaaccatgccgacccaaaagcccacgcaccgccctccccgcggcctctccgtctctgaggtgggcaccagcgctcacctggggcggctgcagaggggcccaggccagggaggggctctcagctgccgcagagttggcctgtggagaccacagccagggagcactgcccaccagcccccaaccccaaggagggagccagagagtgaaagccagcaggcgctccccaaggggaagggatgggcagccacaacccctgcgcctcagtttctcctttgggagagcaagactctcacagcacccacctcacaagaggctatgtatgaggactggggcctgggagcatccccactgtgcccagcagatcccatcccggagctcacatggagctcccgttcccactgaatttctttcctggggtccacccgggtggtctgcttagctggctggggttggggagacaagacaggctgttctgggagagcattccaggcaaggacctgaggcaaggaaggacccctcagactgcaggaactgaggtagatgggaagcaagtgggcagaggccatgaggtaggcagggcccgaccaccggcctggcagcattctggttgaagttcattctgacagagacaggttctagcaggggaggggtgcagccccagttgtgttttaggaacaccgtttttcttgctatgtgaagactagactggaggggtggcagcaggctgaatgacggcccctcaaagatagcagatcctagtcctgggaaaccgtgcacgtgaccttattgagaaacagggtcacgtgcactttgcacagatatgattaggctaaggatcttgaggcgactatccaggtggaccctaaaggccaggactcgagtgatgaggccacaagccaaggaaggctggggccaccagaaactgaaagggcaataaacagagtctcccctagagccttgggagggagcacagccctgtggtgccttttctgggcccagtgacctggattttgaactctggccttcagcatacatttctgctgttttcagctatcacatttgtgtgttttgttgcagcagccaccgtgggaaacgaatacagtggccaagagtgtttggggcaggccctaggccagcgctggaggatgtggggagaggctgggagaggggtggggatgaccgaggtgtcagcctgagcaaggagcctccatatctgggaagattctgccaatcaaactgccttcactaatcagaactttctccagtttttgtaatccaagcacatactgccttgcccagttgcgagcccctccacaggggctgtgaaaccctttcctcagcgagctgtcccctggaggcccaaagtcctccttggagctgtgggcggtggaacagggtgaataacccagcc

SEQ ID NO: 30623 - DNA, 1008 bp, Artificial sequence
  DNA replication origin
agcccgcagaggggacactgaggcccacggtaggtggtcctctcctcacccgagtctccacacagacaccatggccgagcctctgaaggaggaagacggcgaggacggctctgcggagccccccgggcccgtgaaggccgaacccgcccacaccgctgcctctgtagcggccaagaacctggccctgcttaaagcccgctccttcgatgtgacctttgacgtgggcgacgagtacgagatcatcgagaccataggcaacggggcctatggagtggtgtcctccgcccgccgccgcctcaccggtgagcttcctgagccgtcgcctcccagatgtggcagcgtcgcagggagtgggaaaccggcctgtcccagacagccgggaaggaaagcggggtgcgagttctggctccagtcaacacacactgaccagggccttctgcctgccaggctccggggaggctcggttctctgaaactccggcctggtggttttgccatcctgcctgcctacttcctccttaggaaaatgatagtcccagttagaccagaatggagagccagtccttcgtgtctaagagagaaatgtgttctggagccagacactggcataaggaactggtggtgggatgggtgaggtctgagatggagagggtgtaggcataagaggctgagctacaccactgggcatccgtgcaacctccaacaagttactaagccatatttccttctctttaacgttgacctattgggacctgccccgcaggggagttgtgaaggtaacatttaataatgtaggtaacatgcttagcacagggcttggcacatagtaggtacccaatacttggtagctgttgtcatttgcatcctagaagggaggtgttgataggggctgagtcgactctgcagtttctccaaggtatcctctggtatgtcccttttccctgctcctcaggccagcaggtggccatcaagaagatccctaatgctttcgatgtggtgaccaatgcca

SEQ ID NO: 30624 - DNA, 868 bp, Artificial sequence
  DNA replication origin
ggggctgcgggccgggccattcgagtccagcgttccaacaggcttctgtcattgtcactgagcactagtccagccaaggggtcagtggaggggcccccagaggccccagccccccgttcctttcgctcccgctcctgccgccgtttctcccgctccttggctcgttcttgccgcctccgccgcttctcctcccgctcccgctggcgctcctgggctgtcaccggcttccgaggctcaggagcctccaggggtgcgctggggccatctgcggggaagttgggcaggggagaaggtaaaagcctgaagccttgtccaagtccaagtctcccctctgcccacccgacctgcccacaaggcacctctgagccggctcctcaaagacttgagcagggcagctttaagggcagccttagtattgtctgagatggcaccatctttctttggtggggcaggctcactgactggtggaggtggctgcagggtcagatcaatggtgtcaggtgcagggccggggcatggtggcggggctggtggtggagactccatggcacagtccccactgggagcccagggactgggcatttcaacatctggacagccaggctcactagccacaggctgtagagaaggctggaagcggatctgttggcggatgccctcacgccttgcatggaagtcctcaatttcagccacaatggcctccttaatgcgctcccgagtgagggcttcgcggtcaaaggcaaagtcaaagggcggggcacagtcaggctcatcatcaggatcatggtacttggccaggaaagggtggcgaagggcagcagctgctgagatgcgagcgctgggctcaaaacgcagcatgcgacccagc

SEQ ID NO: 30625 - DNA, 800 bp, Artificial sequence
  DNA replication origin
gtgagtgctggctggccccatctctgggctaggcactttgcaggccatatttaacttgtctcctaacaacctcttcattgccattatgctccttctgtgagcaagaggacacgttcagagataaagccccatctgctgctcagtttttgtggaacactgaccgcttcctgaacccattttcctttggcccagacccaggtgtccccatggcctgggcctccctctcacctgtgacttagatagctgctgggtcacaaggttgacatcaggtgactctgacatggaagactgaggggctcccccggcgtctgggggcggcaggccaggtgggaagtaaggcaaaactcctggggtgctggagccaggcagcccagggggtggcacaagtgactgggcagccaggaggctggtggaggtggcaatctggggtggcgcggggacagggatgggcccaggagggccagtggggtggggtgcagggccagggggtgggcaggcaggctggggtacagggccagaggtagagcccgcagattgtggttgcgggccagtgggctgggctacagggccaggaggaggactggtaggttggactggggttggggttggcgttggcgctggggcaggggccggcacagaggtgagggctggggctgcgggccgggccattcgagtccagcgttccaacaggcttctgtcattgtcactgagcactagtccagccaaggggtcagtggaggggcccccagaggccccagccccccgttcctttcgctcccgctcctgccgccgtttctccc

SEQ ID NO: 30626 - DNA, 657 bp, Artificial sequence
  DNA replication origin
gtgagccagatgggccagggaactgtgggaggggaaaagagtgggcctgaggtggccagagtgaggggggctggggagggggactggagaggggccctggcctgagctggggcagacagagcagttggacgccagcagccttgtgctcatggctcagaaatgtcccaggcctgccaagaaactgctgcctctgtccccccaccagccccagccaggctcccacatcaggagctctgaaactgtcccctcagccttctgctcccccagagcaggcctcccgtccccagaagccaggcatatgacacccccactctccctcagccctccccctcaatggctgatgaaacacaggccagggaaggaggggaaagaataaacagacatctgcaggggggcccatcaggaagtagggggcaggctgcggcgggctggggctgcctgggggcgccagggggcccacaggtctagcagggtgggtggcagatggcggatagcggatggagtgggatccagggaacagttggagccagcagggagttaacgtctgcagtactttgcccgacaggactaatgagacacaggtggtcccctggctccagccccacctcccagccccctgatagtgtaaactgatgctggttgtctggggtggggaga

SEQ ID NO: 30627 - DNA, 1388 bp, Artificial sequence
  DNA replication origin
aggagtatgtgaggcagcaggtgagccccggggctgcacgggaggcaggtgtgggccgggcagggtccagatcagggagaggatacctgggactcctggtcagggcaccttcttttcccctccctgtcacaggacgtagccaccaagcgcatattctctgcgctgcgggtcctgccagacaccatgcggaacctcctctccacccagaaagatgccattctggcccgccatggtgtggccttactctgcaaggggagagatcagaccttggaggcactggaagctgagctgcaggccacggccaaggccttcatggactcctacacgatgcgcttctgtggccacctagctgctgtggggggtgctgtgggggccgggctcatgggcctggcagggggcgtggtgggtgctggcatggcagcagctgcactggctgcagaggctgggatggtggctgctggagctgccgtgggggccacaggggccgctgtggttgggggtggcgtgggtgctgggttggctgccacagtgggctgcatggagaaggaggaggatgagaggcttctggaaggggaccgagagccccttctccaggaagagtaacagccccaggaggtattgaaggacaggagagatgtcaggtggggatgaagaagaggggcaggtcgggggagggtgatgccagggattccaaggcaccgccatgtactgcactgccctggtcgaatgctcggtgtctgggtggcagctgagctgggactcaaggtggctcttggaacctgggaggcagcatctgggggcagtggatagaacacccggcctgtttctggttgcagatggttgccgatctgcccttgtcacagataggctacatcccagggtttctggctgcaagtgagactccaccctccccacctggctcatttccccgatgaccctggattgtaggaaagttaagcaggcaccatcctggaagtctacccctaggtggtcgagagacctgttctttcacagatgtgagaagccccaggatgattgaccatggtgttcaggagcggggagcactgatgaggtgctggggatgacaggaaggaaggaacactgggcagaaccagagagatgggacatggtagactgtggcccagaccccagagcagagaaacttgttcccatgacccttcccaaatctgctccagcaggactaaggtggctttcccactcctggcccacagccccagagagcctgtctgtgcatcctgaaccactctttgctgggcctccgcaagggcctctcttgggtctgtgtcctttttcaagcctgtttagatgggggagtgcccatgccctctgtgaagtgcccaaatgcgaaagaataacaccttttcttg

SEQ ID NO: 30628 - DNA, 958 bp, Artificial sequence
  DNA replication origin
acagaggctgcaatcttggcactttgggaggccaaggcaggcggctgggaggtggaggttgtagcaagccgagatcacgccactgcactccagcctgggcaccattgagcactgagtgaaccagactctgtctgcaatcccggcacctcgggaggccgaggctggcggatcactcgcagttaggagctggagaccagcccggccaccacagcgaaaccccgtctccaccaaaaaaatacgaaaaccagtcaggcgtggtggtgcgcgcctgcaatcgcaggcactcggcaggctgaggcaggagaatcaggcagggaggctgcagtgagcagggatggcagcagtacagtccagcttcggctcggcatcagtgggagaccgtggaaagagagggagagggagaccgtggggagagggagaggtagagggagagggagacctcaggtatctttatagcaatacttcactcccagtatcaattttctgtatttgtccattctcacattgctataaagaactacctgaaactgggtaattcataaagaaaggatgtttaattgactcacagtttcacaggctgtgcaggaagcatggctggggaagcctcagaatacttacaatcatggcagaaagcaaaggggaagcaggtgcatgcccggggcaggaggaaagtgtgaaggggaaggtgctacacactttgaaacaaccatatctcatgaaaactcactatcacaagaacagcaagagggaggtccacccccatgatccaatcacctgccaccaggcccctcttccaacattggggattacaatttgacatgacatttgggcagggacacaaatccaaaccatataagtattaaagaaaaaagaccagagaagaaaagatcagagaaagaatgaagtacagatggaaaaaataatcaaggatttttgtgataatatcaagtaatctgat

SEQ ID NO: 30629 - DNA, 1273 bp, Artificial sequence
  DNA replication origin
gagcacagggttgcgggtagggtcaccgatcaacaggatcacaaggcagaagaatttttcttagtacagaacaaaatgaaaagtctcctgtgtctacctctttctacacagacatggcaaccatccgatttctcaatcctttccccgcctttcccccctttctattccacaaaaccgccattgtcatcatggcccgttctcaatgagctgttgggcacacctcccagacggggtggtggccgggcagaggggctcctcacttcccagtaggggcggccgggcagaggcgcccctcacctcccagaccgggcggctggccgggcggggggctgacacccccacctccctcccggacggggcggctggccgggcggggggctgaccccccccacctccctcccggacggggcggctggcctggcgggggctgacccccacctccctcccggatggggtggctgccgggcagagacgctcctcacttcccagacggggtggctgccaggcggaggggctcctcacttctcatatggggcggttgccaggcggagggtctcctcacttctcagacggggtggctgggcagagatgctcctcacctcccagacggggtcgcggccgggtagaggcgctcctcacatcccagacggggcggcgggtcagaggccctccccacatctcagacgatgggcggccaggcagagacgctcctcacttcctagatgggatggcggctgggaagaggcgctcctcacttcctagatgggatggcggccgggaagagacgctcctcactttccagactgggtagccaggcagaggggctcctcacgtcccagacgatgggcggccaggcagagacgctcctcacttcccagacggggtggaggccggacagaggctgcaatcttggcactttgggaggccaaggcaggcggctgggaggtggaggttgtagcaagccgagatcacgccactgcactccagcctgggcaccattgagcactgagtgaaccagactctgtctgcaatcccggcacctcgggaggccgaggctggcggatcactcgcagttaggagctggagaccagcccggccaccacagcgaaaccccgtctccaccaaaaaaatacgaaaaccagtcaggcgtggtggtgcgcgcctgcaatcgcaggcactcggcaggctgaggcaggagaatcaggcagggaggctgcagtgagcagggatggcagcagtacagtccagcttcggctcggcatcagtgggagac

SEQ ID NO: 30630 - DNA, 917 bp, Artificial sequence
  DNA replication origin
gggagggcctctgacccgccgccccgtctgggatgtgaggagcgcctctacccggccgcgaccccgtctgggaggtgaggagcatctctgcccagccaccccgtctgagaagtgaggagaccctccgcctggcaaccgccccatatgagaagtgaggagcccctccgcctggcagccaccccgtctgggaagtgaggagcgtctctgcccggcagccaccccatccgggagggaggtgggggtcagcccccgccaggccagccgccccgtccgggagggaggtggggggggtcagccccccgcccggccagccgccccgtccgggagggaggtgggggtgtcagccccccgcccggccagccgcccggtctgggaggtgaggggcgcctctgcccggccgcccctactgggaagtgaggagcccctctgcccggccaccaccccgtctgggaggtgtgcccaacagctcattgagaacgggccatgatgacaatggcggttttgtggaatagaaaggggggaaaggcggggaaaggattgagaaatcggatggttgccatgtctgtgtagaaagaggtagacacaggagacttttcattttgttctgtactaagaaaaattcttctgccttgtgatcctgttgatcggtgaccctacccgcaaccctgtgctctctgaaacatgtgctgtgtccactcagggttaaatggattaagggtgatgcaagatgtgctttgttaaacagatgcttgaaggcagcatgctcgttaagagtcatcaccactccctaatctcaagtacccagggacacaaacactgcggaaggccgcagggtcctctgcataggaaaaccagagacctttgttcacttgtttatctgctgaccctccttccactattgtcctatgaccctgcca

SEQ ID NO: 30631 - DNA, 1098 bp, Artificial sequence
  DNA replication origin
ccttaatccatttaaccctgagtggacacagcacatgtttcagagagcacagggttgggggtaaggtcatagatcaacaggatcccaaggcagaagaatttttcttagtacagaacaaaaaaaaagtctcccatgtcttctactttctacacagacacagcaaccatccgatttctcaatcttttccccgcctttcccccctttctattccaccaaaccgccattgtcatcatggcccgttctcaatgagctgttgggtacacctcccagacggggtggtggccgggcagaggggctcctcacttcccagtaggggcggccgggcagaggcgcccctcacctcccggacggggcggctggccgggccgggggctgacccccccacctccctcccggacggggcagctggccgggcggggggctgacccccacctccctcccggacggggtggctgccgggcggagacgctcctcacatcccagacggggcggcggggcagaggcgctccccacatctcagacgatgggtggccgggcagagacgctcctcacttcctagatgggatggcggccgggaagagacgctcctcactttccagactgggcagccaggcagaggtgctcctcacatcccagatgatgggcggctgggcagagacgctcctcacttcccagacggggtggcggctgggcagaggctgcaatctcggcactttggggggccaaggcaggcggctgggaggtggaggttgtagggagccgagatcacgccactgcactccagcctgggcaacattgagcactgagttaacgagactccgtctgcaatcccggcacctcgggaggccgaggctggcggatcactcgcggttaggagctggagaccagcccggccaacacagcgaaaccccgtctccaccaaaaaaatacgaaaaccagtcaggcgtggcggcgcgcgcctgcaatcgcaggcactaggcaggctgaggaaggagaatcaggcagggaggtttgcagtgagccgagatggcagcagcacagtccagcttcggctcggcatcagagggagaccgtggaaagagagggagagggacaccg

SEQ ID NO: 30632 - DNA, 903 bp, Artificial sequence
  DNA replication origin
ctcccagccgcctgccttggccccccaaagtgccgagattgcagcctctgcccagccgccaccccgtctgggaagtgaggagcgtctctgcccagccgcccatcatctgggatgtgaggagcacctctgcctggctgcccagtctggaaagtgaggagcgtctcttcccggccgccatcccatctaggaagtgaggagcgtctctgcccggccacccatcgtctgagatgtggggagcgcctctgccccgccgccccgtctgggatgtgaggagcgtctccgcccggcagccaccccgtccgggagggaggtgggggtcagccccccgcccggccagctgccccgtccgggagggaggtgggggggtcagcccccggcccggccagccgccccgtccgggaggtgaggggcgcctctgcccggccgcccctactgggaagtgaggagcccctctgcccggccaccaccccgtctgggaggtgtacccaacagctcattgagaacgggccatgatgacaatggcggtttggtggaatagaaaggggggaaaggcggggaaaagattgagaaatcggatggttgctgtgtctgtgtagaaagtagaagacatgggagactttttttttgttctgtactaagaaaaattcttctgccttgggatcctgttgatctatgaccttacccccaaccctgtgctctctgaaacatgtgctgtgtccactcagggttaaatggattaagggtggtgcaagatgtgctttgttaaacagatgcttgaaggcagcatgctcgttaagagtcatcaccattccctaatctcaagtacccagggacacaaacactgcggaaggccgcagggtcctctgcctaggaaaaccagagacctttgttcacttgtttatc

SEQ ID NO: 30633 - DNA, 1104 bp, Artificial sequence
  DNA replication origin
tggagaccgggaaagctggaagggtctggagactattctcatagttcacaaagctagctgcatactggaatcacctgggaacattttttctttttctttctttttttttttttttgatggagtctcactctgttgtccaggctggggtgcagtggcacaatctcggctcacttcaacctccgcctccccagttcaagcgattctcgtgtctcagcctcccgaggagctgggactacaggcgcctgccaccatgcccggctaattttttgtatttttactagagatggggtttcaccatgttggccaggctggtcttgaactcctgacctcaggtaatccacctgcctctgcctcccaaagtgctaggattacaggcgtgagccactgcgcttggccgggaatattttttaaactatgtctggctctaccctcataaaattatgaaatgattttaatggtctggagttgtagttgggatattcagttttatcttgttttttgaaactccccaagtacttataacgtacaggctgacaagaacacctgattcaatcagttctctctgccccgactttacagatgcagaaaccacgaccaagagagaagaagagatttgtccaagaacacatggtaggtagtgggaggagccaaaccagagtcctaaaccttgacccattttcccaccattcaacactgctcctcgggctgagcagggcctggtcctgcaatgagctacaaacagtccgtgggatgacaactgcacaactttcatattacatcagcacttagtctgtggaggtcgcagggaattctcggtataaggctaggctcaaggagttcctagtcaggaaaagctccccggcgtgggcttgagtaaaggccaggttggaattcaaaagttggaggacagtagaacttccattctgactggtgggccaggagagaaggggtctcagcaggggtgtatggagacgagtgtgacagatgcagggagagtggtgggccgcaggaaaagggaagccagactgggagggagaggccaggcagtgccatgaaaccccagccagcaaacccagggctatggatgtgtttgagacttggacc

SEQ ID NO: 30634 - DNA, 1138 bp, Artificial sequence
  DNA replication origin
ggattctgggagggagcgaggggacgcaggggagaaggggacgcaggggagaaggggacgccggggcggactaggggacgcgggggtgggtgactccgaggagcggtgaggacgccgggggttaggggtgaggagatgtccaggggaggaacgagggactagaggaagcccagagggcagggggaccccggggtagaagggactctgagagggagcgaggggacgtcggggcgggggtggggacgcgggtggaggagggaacgccgaggagggaggtgggttgactccgggcggggctggggacgacggggcctggctgggggcggctgggcggccgtcagaggcgttcgcggtcgccgctcgccgggtgccctgcctcctgtgaagcggcgacgttgtcgtcgggaggcggcaggaacccggcgtggcggccgagagcggatggcggcgcgggggacgcgggggcgcggggctcggggctcggggctgctcctttctcctctcctctcaggggacaagcgcgggggtgcggagggcgacgcccacggccaggaagcaccttgccaaaaagacttggaaaatgccacatttcttttaatttttgagacagagtctcgctctgttgcccaggctggagtgcagtggcgcaatctcggctcactgcaacctccgcctcccgggctcaagcgattctcctgcctcagcctccctagcctcccgagtagctgggattactgacgcccgccaccacgcctggctaattttttttgcatttttagtagagacagggtttctccatgttggccaggctgatattgaactactgacctcaggtgatccgcccgcctaggcctcccaaagtgctggaattacaggcttgagacacttagcctggctttttttttttttttagacagggtcttgctgtgttgcccaggctggagtgcagtggcgcgatctcggctcactgcaacctccgcttcccggtttcaagcgattctcctgccttagcctcccaagtagctgggattacaaatgcgtaccactacatccggctaatttttgtatttttactagaaatggggtttcaccatgctggccaggctggtctcgaacttctgacctcaagtgacctgcc

SEQ ID NO: 30635 - DNA, 850 bp, Artificial sequence
  DNA replication origin
tttattcccagggaaaggaaaaagaagttgctttccgttgcgttggaaggacaacatatcttgcagggggcttaatttctcatttatgacttttattccgctctttccaatcctctacaattaagaaagaaaaaaaaaaaaacccaaccttgaccccgacgtgacttgaacacgcaaccttctgatctggagtcagacgcgctaccattgcgccacgaggtcacaccaaagtggtgactccgcatcgctaaagacctcgtttctgcagtatggttctagggctgggaggctaaggaggaaagacgccctctttcctgaattccagcaccaattcagagcgctagcgagtgtggtttctccggtgcgggaacacagacgcgctggagcatcccagcctgaactgcggcgccgcagcggagcagccacccggcggccgagactcgggctccgcctcctccgcgtcgcgtagtgacccggcgaggggacgccggggtgcggggactggcaccggggggtgggattaaggagatgcccaggaggaggcccaggatcggggggatccctgggccatggggattctgggagggagcgaggggacgcaggggagaaggggacgcaggggagaaggggacgccggggcggactaggggacgcgggggtgggtgactccgaggagcggtgaggacgccgggggttaggggtgaggagatgtccaggggaggaacgagggactagaggaagcccagagggcagggggaccccggggtagaagggactctgagagggagcgaggggacgtcggggcgggggtggggacgcgggtggaggagggaacgccgaggagggaggt

SEQ ID NO: 30636 - DNA, 1226 bp, Artificial sequence
  DNA replication origin
gaggagcccgcgccagtgcgcggaggcccggaggccacccttgaggtccgtgggtcgcgctgcttgcggctgtccgccttccgagaagagctgcgggcgctcttggtcctggctggccccgcggtgagtaaggtggcctcagtggcaggccggtaccggcgggctggggacctggtgatttctgcctccgcgggtgactttggcgggctttggggaccgagcgagctgtccgccggcgggctccggggagcatcgtgccaggagccgggcgggcaccccagctcctctgcctgcgtcccggccgctttccgctccgcaccacccgactgggggccccgcggggcactgcgggaacggctggtacgcgcccgggcgcatgttggctcggagaggccggcggctccagcctcctgcgccaggagacaccggagagctgggacctttgcccctaacggggctctaccaggtccaggctgcatttgcatccgggggtgccttctctgggagctgattccggccaataaaacgcaagttgcctgaacttcaaaacacaagggaacttgtttctttgaaaagtagcggtcaaaagttcgggagctctgcgatctaaataatcccgaggcacggaggagggggtgcgtggtctgtcgtggactcagagctgcgaaatgatttcttcagaattcagtcaacctctaccgaggaaaccagaggcatcctgtaccaccccctccccgccagtaattatgtatgtgaaagaaaaaaggggttttaatgtggttctttgtggggtcgaggtgttcttatctgtgggattcttttctttttaatcattaggttagggctgtttctgccttgtctcctaaaaataatgtggttttaaaaaccacaaaaacacaatcctatccacgttctcctgccagcttgggtggttttcaaaccgagagggtaggacgcggcacaagaagcaactggtatgcacttaaggcgtgaataagcttttgactttgaggcccacattctgcacctgcgcgggctgaggggggccgctgtgcctctggagtgggggctcggtagtttgtgggatattgtggcacccgctgtggtgtgcaggacagcaagggtaatgccgaggtcaaagccatggaataagatccatcagccatgctttctcacagaccagaaagaactcatgatttggggctgggcgcggtggttcacgcctg

SEQ ID NO: 30637 - DNA, 1146 bp, Artificial sequence
  DNA replication origin
gatggagctgacgaggctgattataaagatcatcaactgcgcaagaaactgcggaggcgcggaaagcaaggcgcgttcacagccgccctccctcctggaagcccgcgcccacccctgcgcggcggccgctccggaggcgtcgggctgggcgtgaggacgccgcactcaccactgggcccgcgagcgccgccagctcagccgcctccccccgcaggtccgggggcagcgcaccccgcaggccccacaagccgtcacgccatccgagggcccggagccgctatgggggccggtccttggcggcggcggggagctcggcggggaccggggcgtcggcggccgcaggggcctccatgcggaggctgggagcggctggcggcggcgcgggcgcgggaccgcagcgcggtgtgggggtgaggggggcgacccgatcccacccagccccgcccctccccgtcccggacccgctccagacgcccagggcaatggtcgccgcccgcagaactctgggggagggcaccgggagggcccttgggggcttatgaagggggctcggggaaggggtccctgcgtgagaggacccctcgtgtgcttttggatgacacgggtttttatcaggagagtttgtaggtcaggttggaagagcaaaatgcctagagggtgggcagacaggactgagctggtgattccatcctcccgcggagcacagggctggcgctttctggcatgcttctggcctgggcttgctgcgggttcagtgtttccgggagaggaggggtcctgcctcgcagggaccccagcctccctgctcctggcggcccggggtggcctcctggccgcggctatttgtggctggtggttgaaagaacctcctcttatccccagggggtccctgccctacctggcaaggggaagggcagggagtcctgtgcgaggggaatggagacagggttcgagggttcctgacgaggagctggggaggggcctctgtggtgtctgccccctgcccccaggcccaaccccgagggccacagtgcaagcctttacctgccttcctggagaatgggcctcgtggccccaagaacaaggcactgagggtagagataccttaaggtggccccaaccaaaatcagcagttgggtgtttttt

SEQ ID NO: 30638 - DNA, 1194 bp, Artificial sequence
  DNA replication origin
ccaaaagcacacgaggggtcctctcacgcagggaccccttccccgagcccccttcataagcccccaagggccctcccggtgccctcccccagagttctgcgggcggcgaccattgccctgggcgtctggagcgggtccgggacggggaggggcggggctgggtgggatcgggtcgcccccctcacccccacaccgcgctgcggtcccgcgcccgcgccgccgccagccgctcccagcctccgcatggaggcccctgcggccgccgacgccccggtccccgccgagctccccgccgccgccaaggaccggcccccatagcggctccgggccctcggatggcgtgacggcttgtggggcctgcggggtgcgctgcccccggacctgcggggggaggcggctgagctggcggcgctcgcgggcccagtggtgagtgcggcgtcctcacgcccagcccgacgcctccggagcggccgccgcgcaggggtgggcgcgggcttccaggagggagggcggctgtgaacgcgccttgctttccgcgcctccgcagtttcttgcgcagttgatgatctttataatcagcctcgtcagctccatcttctgtggacatctgggcaaggtcgagccggacgctgtcacgctcgccgtcacggtgggtgcctgatttcgcccctgtaggagccgacgggcggccaagggttaggatttgagcggtgtccccaggcgctgtggctcacgactgtaatcccagcgctttgggaggcccaggtgggaggatcgcttgagctcaggagttcgagaccagcctgggcagcatagcaagacccccgtctctactaaaaatacaaaaattatcccagcgtggtggcaccgcctatggtcccagctactcgggagactgaagcaggaggatcgcttaagcccagcagatcgaggctgcagtgagctgagaccgcaccactgcaccccggccttggcaacagagcaagaccctgtctcaaaaacaaacacacagggcggggcgcggtggctaacgcctgtaatcccagccagcactttgggaggccgaggtaggcggatcacctgaggtcaggagtttgagaccagcctggccaacatgggaaaacgccgtctctactaaaaatacaaaaattagccgggtgtggtggcacgggcctgtaatcccagctacttggg

SEQ ID NO: 30639 - DNA, 1038 bp, Artificial sequence
  DNA replication origin
ggaggatgcgctcggtgttgaccaagtcggcccagcagggaaagcagcacagcataaggatgaggacccctctctgaagtatgatccccacgcgcttgaggttcttgcctccaaaggacttgagaaaacaaatgcactgctaacagcatatgccaggcaggccgaggctgggggcctgcgccacaagcaacccctcccaggggcgcctgcccggcgcccaggcagaccggtttcccatcatctgctcccgccctccccaccaacagctgacagcattgggggagcttctgagccagggacaaccagtgagctagctggcccctgtggcattttacacgtgtcctgggacaatgtgtccctgctcccaggagctgggactgttaacatggagggtagaggtagcagaaactgaagcttaaaagagagttttcaacatgggaggcagacagatgctgcaggagaacatgtgccatggtagaaggtgaagttgtgggggactctgagggccagggatacccggggagggtgcagtggaagaaaagcacacactgtaggctgagaagggcagctagcagggtggcaagaacttcggggggcgggaggtcatggaggccaaggcagtgctctagaaagcagggatggccaagtggattaaggacggccaagcgctcacttgaggattttgtcataggaggccgggaagaggccaggcccagtgggctgggcaggaataaacaaggcatcaataggggctgagtcgggagtgcaggccaggcccgagtgcaaagaacaccttcaagaagcttggcttgaaggaggccagcagggaaggaggggtggtggtaagggagggcgattttagggtatgggagaccagactgggaggaacaaaggacaaaatgcccttgagcaggtggccccagaggacagcactagtcaagctgactctgctgttttgtttttttgtgttttttttgtttttgttttttcctgagatgaagtcttgctctattgcctaggctggagtgcagtggtgag

SEQ ID NO: 30640 - DNA, 917 bp, Artificial sequence
  DNA replication origin
ctgccccgtctgagaagtgaggagcctctccacccggcagccaccccatctgggaagtgaggagcgtctccgcccggcagccaccccgtccgggagggaggtggggggggtcagccccccgcccggccagccgccccatccgggagggaggtggggggtcagcccccccgcccggccagccgtgccgtccgggagggaggtgggggggtcagccccccgcccggccagccgccccgtccgggaggtgaggggcgcctctgcccggccgcccctactgggaagtgaggagcccctctgcccggccagccgccccgtccgggagggaggtgggggtgtcagccccccgcccggccagccgccccgtccgggagggaggtggggggggtcagccccccccgcccgcccagccgccccgtccgggaggtgaggggcgcctctgcccagccaccaccccgtctgggaggtgtgcccaacagctcattgagaacgggccaggatgacaatggcggctttgtggaatagaaaggcgggaaaggcggggaaaagattgagaaatcggatggttgccgtgtctgtgtagaaagaagtagacatgggagacttttcattttgttctgcactaagaaaaattcctctgtcttgggatcctgttgatctgtgaccttacccccaaccctgtgctctctgaaacatgtgctgtgtccactcagggttaaatggattaagggcggtgcaagatgtgctttgttaaacagatgcttgaaggcagcatgctcgttaagagtcatcaccaatccctaatctcaagtaatcagggacacaaacactgcggaaggccgcagggtcctctgcctaggaaaaccagagacctttgttcacttgtttatctgctgaccttccctccactattgtcccat

SEQ ID NO: 30641 - DNA, 1330 bp, Artificial sequence
  DNA replication origin
tctcaatcttttccccgcctttcccgcctttctattccacaaagccgccattgtcatcctggcccgttctcaatgagctgttgggcacacctcccagacggggtggtggctgggcagaggcgcccctcacctcccggacggggcggctgggcgggcggggggggctgaccccccccacctccctcccggacggggcggctggccgggcggggggctgacacccccacctccctcccggacggggcggctggccgggcagaggggctcctcacttcccagtaggggcggccgggcagaggcgcccctcacctcccggacggggcggctggccgggcggggggctgacccccccacctccctcccggacggcacggctggccgggcgggggggctgaccccccacctccctcccggatggggcggctggccgggcggggggctgaccccccccacctccctcccggacggggtggctgccgggcggagacgctcctcacttcccagatggggtggctgccgggtggagaggctcctcacttctcagacggggcagctgccgggcggaggggctcctcacttctcagacggggtggttgccaggcagagggtctcctcacttctcagacggggcggccgggcagagacgctcctcacctcccagacggggtctcggccgggcagaggcgctcctcacatcccagatggggcggcggggcagaggcgctccccacatctcagacgatgggcggccgggcagagaggctcctcacttcctagatgtgatggcggctgggaagaggcgctcctcacttcctagatgggatggcggccgggcagagacgctcctcactttccagactgggcagccaggcagaggggctcctcacatcccagacgatgggcggccaggcagagactcctcacttcccagacggggtggcggccgggcagaggctgcaatctcggcactttgggaggccaaggcaggcggctgggaggtgtaggttgtagtgagccgagatcacgccactgcactccagcctgggcaccattgagcactgagtgaacgagactccgtctgcaatcccggcacctcgggaggccgaggttggcggatcactcgcggttaggggctggagaccggcccggccaacacagcgaaaccccgtctccaccaaaaccagtcaggcgtggcggcgcgtgcctgcaatcgcaggcattcggcagactgaggcaggagaatcaggcagggaggttgcagtgagccgagatggcagcagtacagtccagcttcggctccgcatgagagggagaccgtggggagagggag

SEQ ID NO: 30642 - DNA, 1249 bp, Artificial sequence
  DNA replication origin
ggtgcggtccagggagcaggcgctggggacttgggtgcccagccgcagggatccctcttaactccactgtcctcatcgggcggagaccggctggcatgaaacaccgggctttttgaggtcaaagcgaggcttcgcccacgcacgtgacaccgccagggcgcgcaaacaggaagcccgagcccgggctgcaggcgttggcaccgcagcactcgactggcctctctctaaccgcaggtcctaactcagagcagcctccggcgcgggtggcgcggataccgaggcctgcgggggacatccgccgcctggaacgccccgcccggtcagccagcccctcaggggcggcgagcgcgcccacccgctccccgtggaccctgccctcgggggctgcacaggtctccccaggacgcgtggcccccacactggacccccggacaggccctgcccacggcctggaaggcgtggtcctgtgtgccacgtgacagcctccgcgcgggccgcagggggttggacacctctcccaggatggaccaatctttttttttttttttcaagttgagacggtttgaatggcatctgttcctcctaacccgtgacccctgactgactgtgtgaggcctgtcgggaggtctccacttcagctatctccccatccacaacctcactgtcttcatactgaccccactgaacaaagcctggctttaccatccttcctcgtgggccttgctaggaggcagacccctagcctgagggccaggggggcttccagaccacccagcaggccatttcttgacccatcagacctatgttagcctgcggggaaagaggacatccccacctgctcctcatacctgcacgcccttcgtgaggttgtttgtttaacccaactggaatgagagaaaggaaatacataatttaagctcacttcagatagacttggattacattctgattctgccactttttcgttgtgttgaccttgggcgagtcatttactctctttagtttgttccttccttgtaataaaattacatatgatccagcaactccatttccataaatacccaaaagaactgaaagcagggactcaaaaagatatttgtgcacccatgttcacagcagcattattcgctacagccagtggtggaaacagccctagtgtccatcagcagatgcgtgagtcaccaaaatgcggtacatgcatatgacggaatactactcaaccataaaaaggaaggaaattctgacagat

SEQ ID NO: 30643 - DNA, 1066 bp, Artificial sequence
  DNA replication origin
tatctgaccccaggactcttaacacaggcctgagcccatcctggcttggctccacgctgggggacggtgctcccccagcttcccttcccacagggccatgcacctgcagcgatggcgcccaccatgggctggatggtgaggttgaaggggtagttccaggtgccaatgacgaggaccacgcccagtggctccgagtggatgtagagctcgtcctgctgagtctggggcgtcttctccacgggctcatccgcggcccactcagggagcttctggatcatgtactcgatctcctctaggacgtacaccacctcctcatagtaggcgttccattcattctgcagcgacagagccggagtgagcttccagggccagggcccgcctgcagctggggcgagtggggagccccactgctcagctgccagggtgatgggggtcactcacccagcccagggtgggggcagccgcagaaggctcccaggggaagcagagccaggattagccgttggacctgtgggtctgagaggacccctttctgccagaggggggcccaggtaggtttgcggccccaggggagagagccggtgaagggaccaggcatgggcaacggaatggatccaggtagggggaatagagccgggcaggggagagtagattcaggcagtgggaatggatccggggagggggggatggatccggggaggggggatagattcgggcactgggagctggatccgggcagggtggagggagccaggccctttagttgtctggagggggatgcaggaccaagggctgctgggcgctcagggcctcctgtggggagcaggggtgagaagaggagatgcagacggcggaaaacgcgtctcttttataaacttgggctgtgaagagcaacacagaagctgtaaagtcaacagaatgggtttccttgttgtttctggtttaagatgagaagtcctgagccatttcttgaaaagtgcagtagcaggcccggcgctgtggctcatgcctgtaatcccagcactctgagaggccgagaactcctcctgaggaactcctgagggca

SEQ ID NO: 30644 - DNA, 933 bp, Artificial sequence
  DNA replication origin
aggcgaggcagaaagtggaccttccagcggaaaggccattttccccaaggccgagcccagggaagtcccttcctatagaattcaggcagggtgggaggcagggcgcgctcgtgcccctcagccagctgcaggtgctctctgtccccaggcgccatgagcaagatcagcgaggccgtgaagcgcgcccgcgccgccttcagctcgggcaggacccgtccgctgcagttccggatccagcagctggaggcgctgcagcgcctgatccaggagcaggagcaggagctggtgggcgcgctggccgcagacctgcacaaggtgctcaggctgggcggccgccttctgccagtgtcggggccatgcgatggggcgtggggggaggggctggggagagtgcgacccagagaggttcaggaaggacttggggccacctggcccctcggtcgcggagactgggcgcaccgccctcccctccgccgcgccccgcgcgcccccgccgcctcttccgccctctggccttttcctcctggcccggcctccgcgtcccgcccgcagcgtcccccatttcaacttcctgctgccccgacaccctgaacttctggtcctccccattcctcagccccacgcaggaccacttggttctccacaccaggaaccagagcagcttggcaccccggagggcatggggggctctcccctccctcccagttctcacaggggctgttccgtccctcaccctgagcaagaccagacacctctgcattcgcagccccctgctgtccccacatgctgcctggggtccagcgctccggagcccatcctcccaccgactaccctctttgctcctgcacttttatttttattttattttatttatttatttgagacagagtctcgctctgtcgcccaggctggagtgtaatggcgcgatctcgg

SEQ ID NO: 30645 - DNA, 1031 bp, Artificial sequence
  DNA replication origin
ctgaggaatggggaggaccagaagttcagggtgtcggggcagcaggaagttgaaatgggggacgctgcgggcgggacgcggaggccgggccaggaggaaaaggccagagggcggaagaggcggcgggggcgcgcggggcgcggcggaggggagggcggtgcgcccagtctccgcgaccgaggggccaggtggccccaagtccttcctgaacctctctgggtcgcactctccccagcccctccccccacgccccatcgcatggccccgacactggcagaaggcggccgcccagcctgagcaccttgtgcaggtctgcggccagcgcgcccaccagctcctgctcctgctcctggatcaggcgctgcagcgcctccagctgctggatccggaactgcagcggacgggtcctgcccgagctgaaggcggcgcgggcgcgcttcacggcctcgctgatcttgctcatggcgcctggggacagagagcacctgcagctggctgaggggcacgagcgcgccctgcctcccaccctgcctgaattctataggaagggacttccctgggctcggccttggggaaaatggcctttccgctggaaggtccactttctgcctcgcctcctctcccgcccctcactcagacgcctgggccctggctgccttgctagcccctgagaaggtgacacccgccgcaacccgagtcctaagccgaactgctgctgggggctcttggcagcgtgctcgcggcagggcctttcccggccttttccgctcccttacttgcttgcaaagctgatggcacaatcccagaccaacacccccagagctctgcacacgcagtcagccactctccagatcagattggaggggcgcagtccgcgattccacacccaagccgataaagaaaaacccagcaccaccctcctggctaagccattgttctaaaaagcgctggtttcttggcagagctgaaccaggcttggtgtgtaaaccacgcgtgccacacctgggagacgcacgcccatgcccgccaag

SEQ ID NO: 30646 - DNA, 1341 bp, Artificial sequence
  DNA replication origin
atggagagtaccgggcccctcactgcctcagagcgcgtgtgcggctctgggcgcgcacagtgacggtgacggcacccctggcccggcagcgccgaggccgcttcgccagacagccagcggccggcggcaggccgggccatgagcggcaggggccgggccgggcctcgctgaccctggctccgcgcggcagcttccccagtttccgctccggtctctcggcatgagagtccgcccgggcccggggctgcggctgccccagacccgccgcacgctggcgcgctccgggcccgcggagccgcggtgctgatacctgcgccgcactgcgccgcccgcccgtccgctgtgtgccccgggggcgcggccatggaggtggtgggtgacttcgagtacagcaagagggatctcgtgggacacggggccttcgccgtggtcttccgggggcggcaccgccaggtgagcgccggccggggcgaggccgggccccgggcggcaggcacggggctaggtggttctgaaacttggcgcagccgcgagccgagacccccgactcggctagccgcccgggtatgctattgtgcgcgcagcccgtctcgccgtttgttttggtcctgtgagggttgttgtgaggcccaagcctctggcagcgctccgcctaccgaccggctgctgctgatcctcctgtgtgcccggggcccaccccgcggtccgcccgcaggagcgtttgcacccaggttaccctggacccaaaatagacggtactgcaccgtgcagactcgagggttgggcgtgaatggacctttggtttttttccccgtgcccagggctggtcacttttgaggttgataattacagacccagcggaaaatgggcggatgtcccattagcctcaggctttcgcagcctgggaggtgtcacctttcccagcactggtcccctgcaccccgaagagcccccgtaccgttttcccccccggagtcagatagacgagctccgggtgagaaaggtggttggacaattcattttcaatcaccttgaacatgaaatcacctttaagccttaaaaaaattgttttaagcctttgctgtttcgcaagtacagttacacgaggttttagaatctaaagaatttggaaaggcatatcgggagtggaaataatcttaaagggtgtggcagttctgattgttgcccaaggggcgtgttaaaagtgggctgactttgttgcttatcggatgaagtaatgctacttttcttatttatttatttatttatttttgagacagagtctcgctttgtcgccgaggctggagtgccgtggcgagatctccgctcactgcaaccgct

SEQ ID NO: 30647 - DNA, 1404 bp, Artificial sequence
  DNA replication origin
cgaggcccggcccggcccctgccgctcatggcccggcctgccgccggccgctggctgtctggcgaagcggcctcggcgctgccgggccaggggtgccgtcaccgtcactgtgcgcgcccagagccgcacacgcgctctgaggcagtgaggggcccggtactctccatccccagctcgtcgggcctcctcggccctccccgctcggggcgctgctgcgacggcgacggccgccgccctagaacccgcaccgccgcggccccgcgcttccccgcctcgcggcggcgcccaacgccctcgcgcgcgctacccgctcccgcgcgactggctgccctccgcgacgtccgcgcgccttgaaggccgcagcgccagccggctccctccgccggggaaaggagtgcggccagggcttggcgcccgcagctgggcagatcctcggccgctcctgaggcggggacgaagggcgcgacccgctgcggccacagcgggttacgggctgcgggctccgttctgggcctggggagcagattcgagccgaccacgccccgggctccaggccgctgggaggcggacttcagagaagcgggtcttgaaccccagctgcaggcaggacgggattatctgcgcagggtagacccccagattcctgccagagcaaaggagcaactgctactccaggctttgcccgcgctctggaaaaccagagttcacgctgccaaactgccagccttcggacgcctctcggggtttactcgcttaggatccctagagggacggtgacaggcgggattctgcaccttttgggggtcccttgactgcgagaagctggtgacagctcagggccctcttcgcagagaatcgtttctgcacaccgactcagaatcgcacacgttttcaaggttctcctgggagctcctagtgtcaggctagtttgacctcgggcttacttcacatggccgaagggagctttcttttctacctgattgttaaagctgtccaagtgacaaggaacagattgtcaggtttcccgcaaagaagtgtcttatgaaaccatttaataaacaatatgcttgaaactaccatggaatacgcaggctccacacttgagtgtgtgttcggttgtatagggtatgtgcttttggggtctgtcaccacctcgactgccactgcctgtccctgcaagctgatctctgaaccatgacagagtcagctccaggattctgagagaacgctccttcctcacacgctcaaaacgtagggccttgagtttctgcttctgctactgtgcacgcttacgttatcctgtccttacttacatctggcccaggtggttgtgttagacactgaaaatctggagccttcaaaagttgacagcaacttaagcaagtttgcacatacacccaaaaa

SEQ ID NO: 30648 - DNA, 1088 bp, Artificial sequence
  DNA replication origin
cacctcccagacggggtggcagctgggcagaggggctcctcacttcccagatggggcagccgggcagaggcgccccccacctcccagacggggcagtggccgggcggaggcgccccccacctccctcccggatggggcggctggccgggcgggggctgaccccccacctccctcccggacggggcggctggccgggcgggggctgaccccccacctccctcccagatggggcggctggccgggcgggggctgccccccacctccctcccggacggggcggctgccgggctgaggggctcctcacttcgcagaccgggcggctgccgggcggaggggctcctcacttctcagacggggcggccgggcagagacgctcctcacctcccagatggggtggcggtcgggcagagacactcctcagttcccagacggggtcgcggccgggcagaggcgctcctcccatcccagacggggcggcggggcagaggtggtccccacatctcagacgatgggctgccgggcagagacactcctcacttcctagacgggatggcagccgggaagaggtgctcctcacttcccagacggggcggccggtcagaggggctcctcacatcccagacgatgggcggctaggcagagacgctcctcacttcccggacggggtggcggccgggcagaggctgcaatctcggcactttgggaggccaaggcaggcggctgggaagtggaggttgtagggagctgagatcacgccactgcactccagcctgggcaacattgagcattgagtgagcgagactccgtctgcaatcctggcacctcgggaggccgaggcaggcagatcactcgcggtcaggagctggagaccagcccggccaacacagcgaaaccccgtctccaccaaaaaatgcaaaaaccagtcaggtgtggcggcgtgcgcctgcaatcccaggcactctgcaggctgaggcaggagaatcaggcagggaggttgcagtgagccgagatggcggcagtacagtccagcctcggctttcacaactttggtggcatcagagggagaccggggagagggagagggagac

SEQ ID NO: 30649 - DNA, 1619 bp, Artificial sequence
  DNA replication origin
aaacttttctagccttaaaagatttaccctccccaaagaaagcatcaggctgggaggaacatttttaactgggaaatgatcaaacctcaaagaatagataattttaatgctccttaaattgttcagagtaaaaggaaaaagcaaacatgcccatttttttttctttttttttttttgtagagatgggggggtctcactgtgtttcctagactggtctcgaacttctggcctcaagcactcctcctgcctcggttccaaattttttatgatgtgagcataacattgattctgaaaccaaacaacattagacattcaaaaagaaaattattgcccatctcatttttgcatatcaatgcaaagcctgtaaataaaatattagcaaacagaatcaagcagtatatttaaaaaaaaaagacaagtttattgcagggataaactgggtttttattaggaatttattataactaggactcattacttcaatatgaggaaatcagctgtcacccggtttgctcgtccttacagacatctccctcctcttcctctcttcctttccagtgaaaatgtcttcaagtttcctctaccaaaccaaaacttcaccccacttcttttattctttcctcctctcttctcagaacaaaggggttgttgctgaccagcccagggtttcttatttggggccggatcattcttccttgtggggcagtcctgtccttcaggtaggatgttgaggagcaccctcgtgtctacccacttaggcaacagtagcaactcccgcatcatgacaaccaaaaatgtctccagacctccccaaatgtacgcggggcggcgaggaggggcaacaccggccctggtcgagaaccgctagcctaggctcgcccctctacctgggcgccacaacttgccagggttggttattctccctggatcctttccttcctcctcatttgagcttcacgccctcaagtatgaccaaaggttctgtcattccactcctgcagttttcattaaggtcttaggccacttccatgtcaagaaacacagtggctctttctaacccctggccatgaggcacccctggaggaggagccgtgagggtagggaagatgctgagggggatgttgaccttgccgacttccaggcgcctccgctgcatcccggaggaggcgttgggcggtgagggtgcagcgggggggcgggccccgcaggatgaggtgtccgtgtgcggctagcgccacaggcaagaccgggctccttgcggggcggaggtgaggccgtgagcatagctctcaaactggagggcgcctcagaatcacttgacgggcttgcgagaatgtggactgctgggccccaccttcatggttttagtgcaggaaaaaccgaataggctgggtgggacggagaatctgcattttctcaagttcccagatgaggctgaagctgctggtccgggcaccacccttagaaaacctccagtgtagagtgcggaaatggggtccacatctggcttgggacgcccaaacatcgattatgtgcgaccagaggatgagcagatagggagatgagacactgagagctgggagagagggggcccccggccgccggctgaaggaggacgg

SEQ ID NO: 30650 - DNA, 1043 bp, Artificial sequence
  DNA replication origin
ccttcctggccggggtgacaggggaagggctagggctgcgcatcccgggtcagctggggcgccgcggcgcagtgcacctggaaggcccgggggcagcgcgcggtgcccgtgggtttcccggtggtgcggacctgcgggcgtgcggaagtaacgacctccttccccagtgcccatgcaaggaaattagtgttatgtgcttgctttttttttttttttttcctaaggaagtttgactctgaatatcttattttgctggagctccatttgccagcacgtaagtttatgtaataagcggcatacagttcggaaaaaaattttcctgtgaaagtgctcttccttgccctctgcaggaagaattacgccgagctggttggcaggcttatccaccagcaactgtaggagctgcaggcagcagataaagtgttttttgagtaagggcacaagtcagcccttcaggacaatttttgtttttggaagattctgttatccagttccaaacaccgtgttatttcagtgttgaagatgggggaggagggaggagcacaggcttgtcaatcctaatacctcaacagaaattagctttgcaggattaactctccaagcaagcgagttgaatttggtagcccaaactacagctgaagctgagcctccatactaaagcctgtctcagttttaatagtttttcgcttgattcgtttgcctcttccaagtaggtgatcttattgtctgttaaacaacagatgtctctcatgtttttacttttttccttgtcttccatagattactctcgctgcagtgttgactattgaggttaaataggaatctttgtcttgggcttggttttagggagcattccctctgtatcttcaccgagtgtattctatcacattaagtacatttctgtttatgcctaattactaagagtttaaaaagtcaagggtgggtgttgggttttttgcccaaatgcttttgtgtagcatgcattgatatgatcatgtagattttcgtcttaaaattgttaacataagtggtggtcacattgc

SEQ ID NO: 30651 - DNA, 1197 bp, Artificial sequence
  DNA replication origin
aactgttctgtagattgaagttgtgtcactcttaccatgatcacaaactcaggctctgcctatcattttggaactatttggggaagtcgaccatcttttctgggctagttacctttttaaaaggggagggagttgcacttggtgtcatatgcatttctgctctaacattgtttcctgctatttattttccttagtatatttgcttgtacatgctcagtattgtgctgtgttttatagattacagaaataaaactgtgactcttgtctttgacacgctagttttgtggcagaaaccaactcatggtactatactaccactaaaaagaagtaatgtgtatttaagggctaatttgtgtctgctgcctgcagcctatacattggttcattcatttgttttcattcatttgttccgagtctctgtgtttataaagtttacactctagtggaggaacaataattagtaaacatgtagtatatggaatggtgatcagtgtcacagaggccagcaaagtaggagagggtgtgtgctgagggtctggcttactatttaatgtggtgcgatgagagaagcccccttagtagggtgacatttgagcaaaggcccagggagtgagagagggtgagacataaggtctatgcagtgtaggtgtcgggaggaagaatgttgcaggcagagggaacaccaagtgcaaaggccctgagatgggaacatgccccgcttatttgaggaacagtgaggaggccggtgtagcaacagcaatgtgagaaggggaaggtgagttcactgatgggggaagaggaggattattcagggccttggaggccattgtaagggctttgactttccctccaagtgagacagaaagacactggagcgttgcaagtgggggtgtgacatgatttgacctaggctttagaagcatcactctcactgtatgtgcagaatggactataaagaggcaagggcaggagaagtgagactggttaggaggcagttgcagtaatcctggcaggagatgacagcggcttggatcgggggtagcagtggaggaggtgagaagtgctgagatgtagggctatttatgatacacatactgacaggcgttgttgagggacgagatgtggcatgtgaaaggagtcgaggtttctggcctgagtcactggaagaacggaactgccacttatggagatggagag

SEQ ID NO: 30652 - DNA, 1227 bp, Artificial sequence
  DNA replication origin
ttggcctgcaggtggcgctgcagctccagcgccaacctgggctggctggtcctccctcggaggtttcggggtggcggcgcccagcctgcctgtcatgagtgccgcttcacagcgccgccggcgcacctgctcctaggcttgctcggttcaggggtatgggccagttccgcccccggcttggccactgcagcgaagttgccctagggtccgcgctgccaggacgcaagcggagtctgatggctgggtcagagcggcctgtcagcccggctggaagggcctgcccgacgccgctgcccgcccagctgctactcggcctgcgcctggagccagggaccagctctgggcattctgctgccttaggatggggccgagcagccgctccccgccctgtgccgcagccgctgcgcgcatctgcccagggtccgtgcagctggcgacccgggcaggtcggggaatgcctggtgccaccgggattgctcgcctctagtccgtcctgacccttcagcccgcgagcaccagtgagattgaagaaaagtgacggccgggcgcggtggctcacacctgtaatcccagcactttgggaggttgaggcgggcagatcacttgaggtcaggagtttgaggccagcctggccaacatggtgaaaccctgtctctactaaaaatacaaaaattagttgggcgtggtggtgcgcgcctgtagtcccagctactccagaggctgagacaggagaatcgcttgaacccgggaggtggatgttgcagtgagctgatatcgtgccaccaaactccagcctgggcgacagagcaagactccgtctcaaaaaaagaaagaaggcaggagagaacgaaggaaagagaagaaaagaaggaagaaaggaaggaaggaaggaaggaagggtgacaaagaagaatctagagagcactcaaatactaattcttgaggacaattaagacagatcgcattatgaaaaacagattttgtcactgaagcctcagggcttcagcctagatcctgcgctgctcacccacagaaagccaaccactgagatgagtattgcaaaggaagaaggctttaatcagatgctgcagccgaggagatgggagctcagtctcaaatccctctctctgaccaactaaaattagggatttttagtatagcaaagaagaaatgtaactatgtttaagaaaacatgaactaggaaggggtaaggaagcaatcatttac

SEQ ID NO: 30653 - DNA, 1403 bp, Artificial sequence
  DNA replication origin
ctgggcagatgcgcgcagcggctgcggcacagggcggggagcggctgctcggccccatcctaaggcagcagaatgcccagagctggtccctggctccaggcgcaggccgagtagcagctgggcgggcagcggcgtcgggcaggcccttccagccgggctgacaggccgctctgacccagccatcagactccgcttgcgtcctggcagcgcggaccctagggcaacttcgctgcagtggccaagccgggggcggaactggcccatacccctgaaccgagcaagcctaggagcaggtgcgccggcggcgctgtgaagcggcactcatgacaggcaggctgggcgccgccaccccgaaacctccgagggaggaccagccagcccaggttggcgctggagctgcagcgccacctgcaggccaagaagtctttttctgggaggctggagctgcagcgccacctgcaggccaaggagtctttttctgggaggctggagctgcagcgcgacgtgcaggccaaggagtctttttctgggaggctggagctgcagttgcagtgaagtcacaggttccgtgacgtcacaggtgggcaggcgcactagtctgtaacggattggcttggccttacccgcgaggctttgcagtggctgcttggcttggcagtggtcgcttggcttggcgtggcagtgatcgcttggcttggcatttctggcttagcggtcctcctttcgcagattggaaaccgcgggctatcctgctgggaggttgtggccgaggcagtagctcgctactgatggtctcctggggtggagaaaagcggggaggggctgaggggtctccgaagccggcagtctacgccacgaggaaaaccggtagcgtcaggagccaggaggaccagtggtacttgggctacccgggggaccagtggtcctcgggcttctcctacagctggtggaaaaacagcgtcggcagcgagagcaagcacggtgagggcgccttagaccagccccagcacgatgtccgcctggaagatcttggcgagctccacagagctgcccggtcgggcgacgtccctggggtggagcacgtcttggttcctggagacactggcgtggacaagagggataggaagaagaggtaatggccaggcgaaggatgcgggcgcgccgtcctgtcggggacactggctttctggtgcccgcaggccccacggcacccgggatggggaaacgtcagaggggtcaggggcccaggcctcttagtgagacgggatcaaatataaaggattattactattgcaaaagtgttggtctactttacaggagttttctttaaaaatattgcacttcccaactgtgtttatccattttctcaatttattcatcaaacataagggccgggcgcggtg

SEQ ID NO: 30654 - DNA, 815 bp, Artificial sequence
  DNA replication origin
ctgaagtcagcgtggcaggaggcaggtgcactgtctgtaccatcatgggccataaaaaggctacatagacaaagcgcccctcctcccagtccccactgcttgagtggccagaggaagggctgcccacctccttgtcgtggatcctgccccacccagtagactgttcttgccctggctggtatcccattctccctggctgcgaaaaccacattccacattcatccattcttcgagtccctagtgagtgccaggcactgtgcaaatgaacgacccacagtcccagccctctggggcctcatgggcatagggagatgggggtggagtgacagggacagacacgcaaacagttacaatggggtgctgtgaactggcatggcacagatatgtacagactccgtgggggcatggggggagcatccaacaatattctgggcagggaggactcccagaggagcgacactttggcagagcatggaagggcgattaggcgtgtgctgagggcaggctggcagagggtgcttccgggaccagggacagcatatgcaaaagcatggtggcccgagagggccttgagtgagccgtggaggttgcatgagcttcgtgggttgggggtgaggcaaggaggtggactggggccagactggggaggaattcgtatgccctgctggggaatttgggctttgtttgaagggctggggacttttaagatttttaagcagggagagagtgtgatcagatttgcttataagaaggtcactgtggcagcggttgggtgtggggggtggggaactggacccctgtagtcatggtgagga

SEQ ID NO: 30655 - DNA, 859 bp, Artificial sequence
  DNA replication origin
ctgggtcacgggggcgtaaatggcagagccaggacccacctgactccaggctgtttcctggcctccatgaggccacccgccctatggtgtggtggatgtcagatcctcaccgtagggaggaaattagggtctgtgcccggggctggggagagctgcctagatttctctttgatgggggtgttggggtgggaatcaccatacacctgactggctgagtgtatttcagggatgggacagggttctcagcacagcatggcaggtcaggcctgggagggccccccagacctccttgtctctaacagcgggtcatggtgagggaggcctctctgtgcccaaggtgaccttgccatgccggtgctctccagctgggtatctgtcccctgcagtggtgggcttcctctaagtggatggtaaaggcccatccagttcatggagagctagcaggtcaccaggtttaaggtgcagaggccctgctctctgtcaccctggctgagcccagtgtgcgggttcctgagggctgggactcccagggccccatgggaaagtgtagcctgcaggcccatacctccccctgtgaatcacgcctggcgggacaagaaagcccaaaataccccaaacaatgagtttccagtaaaatatgacagacatgatgaggcggaggagaggagggacctggctgggagttggcgctagcctgtgggtgatgaaagccaaggggaatggaaagtgccaggcccgcctcctacccatgagtataaagcactcgcatccctttccaatttacctgagcaccttctcttcactcagccaactgctcgctcactcacctccctcctcggcaccatgagcacctgcagcc

SEQ ID NO: 30656 - DNA, 720 bp, Artificial sequence
  DNA replication origin
agatccaagaggggaaagagagtcataggatttttagaaccagaagggactctgcaatcacccagtccagcctggtcaccactgaggggaaacaggcccagaggtgggaggtggggagcctcaggccacacagcaagcagagtgaagacacgaactctgcccctgcccagagtgggacatgtaggatccccgcaactgctccccaagacagcccaggatggcatcactgaggtctctttcagccaaggctgtcactgtggggcagggagttcttctgaagggctgactcactgcctggggacacagttgccacaaagccacctgtgccaaggccccactggccccaagggctccaggaacgggagcctgattcccggccacctagcctgagtcaccaccgactcacatttgtgtgtttttctctcagctccacactctcaaagctgggtgggaactctgagccagcacacagcggagttgatcctgggctgaataatccagagtgaggagttggacgggactgggagtgatgaaatccagaggggaacctggagtcagcagttaggagggccccgccttccccaggtgcatataaaggtctctggggttggaggcagccacagcatgctcttagccttcctgagcaccttcccttttttcagccaactgctcgctcgctcacctccctccttggcacgatgagcacctgcagccaccagt

SEQ ID NO: 30657 - DNA, 1045 bp, Artificial sequence
  DNA replication origin
cctcacatggtcagctgttgctcaggatgcggacagggcagagtggggggcactgcagatggggtggctgtgcccagggagcagtgccactctccctggcggtctggatcctctttggttccccactagggacaggggtggtgtgagggagggtagaaactgcctcctaggaaaatgagaaggaacagtcctgctccagccactcccggcaccctctatgagctgaccaacgccagctcttgctggtggcagcaaacgtggctgtggggagcagtctgtgggaggtgagcctgacacctggaaatcttccttgtagtaaatctggaaactgccaggtgggttggcctgctttcctggttttcttcaagcagggggttagtgggaggagggtgcctccacgtcctcactgctggacctgtggtgtctctgctgctgcggaatcagaccaaggcccccaaacaccctctctctcctggtgcctggaggctgggggtggggcccaggtccgaggagaatgggagtgaccagagccctctgagcctgggttggtgggggtttgggactggcagaggccagggatgggggtgggtactgaccactggggtatgggtgactttgggctggtcacaagccctccctggaccttggagctatgacatcccgggagagtgtttctctctgcagggtagatggctgcctggagtcggggacttgcacctgcagcggcatctgcacgactcaaagcaagggcaagctctgctccgttggaggctgacgtctccctgctctctggcagcaaatgtggggccatggagggcaggagggaggcactgtttgcaccaggcccccaccatacaccccgccacaaccagaagaacagccctgggctgcagatggctcattctggagggtgacttcatttgtctgaatagtccccggaagcagggagggtctaggggaaggcgccttgttgtgtggatggggacactgaggctccaaggagcagtgactcagcccttgtcccacagcctgaggggtcagtagt

SEQ ID NO: 30658 - DNA, 849 bp, Artificial sequence
  DNA replication origin
cccgttgttgactggcaggtcagaggtcagcttagaccagcataaagagtaagtctggggagagtttggaggggggtgctcgcatctcccaagggctggagattttcagggggtggtccaggctgcgctagacccggggtggaggcggtgtatcaggtgtggtcctaggtcgccactgcttgccctgtgagtaactctgtgacctcgggaagttaggcagtcacttcccctgactgagccttgcttttccatccgtaaatggatgggaagatctcaggtgtgggagcccgaatcctcagagatgactcactcaatcagttgctccttcctgtcctgtgggctgtgccctccccctagatggggcaggaggtgggcaagggctgggataagcacaaagggagggtgggtgggggaggcagtctgggtgattggggccccgactcctgtgtgagtctcaggaaatccccaagaggggctcccattgcctctgccctgggaatgtgagcgggagggtggtgttttcagggaaggctgcggaccccaggcaggtatgggagaaagggtggggcctctctcaaggatgtttcctcacatggtcagctgttgctcaggatgcggacagggcagagtggggggcactgcagatggggtggctgtgcccagggagcagtgccactctccctggcggtctggatcctctttggttccccactagggacaggggtggtgtgagggagggtagaaactgcctcctaggaaaatgagaaggaacagtcctgctccagccactcccggcaccctctatgagctgaccaacgccagctcttgctggtggcagcaaacgtggct

SEQ ID NO: 30659 - DNA, 757 bp, Artificial sequence
  DNA replication origin
tgtgggaacctgtggggtttgcaggaggtgaaactgacgatgcaggctggagtctgactgaggagccttgactgccaagttaaagcgtctggactagatcacgtaggcaatggggagccatggagggatttggagcagaagaggggaatgaacatcaagatattttagaacattcactctggctacagagggagaaatggatcagaggggtcagggtggggccagagagacgcgtcagggggctagagcagggagtctggccagagaagtcttgcggggtggaggctgggtgggggggcaggggaaggaaggtggtgcatgcagaagagaggttatagctcaaaacagcaggactggatgcctggatctcagggtaagcgtggctcacggtcaggactcagtaagcgttgggtgaacacatatgaaggagtgggcattgatggccctgggtttctggttccgatgactgtgtgagtccatcagccacagggtgaagagcatggtgggtggtggtcgggtttgcagttgggaagggtgatcaggccttcagctgagtgtgtcctggagtctccatgcttagtcacacgttgcagctttttgctccccgaaaatggtgaagtccatctatagtctaacgacagtctctcctgctttaattgggtctattggttgggtcctctgggacatggaaaaaccacttgctcagcttctccttgtaaattcctggtgagtgcctccaggcctactgctgtgctgt

SEQ ID NO: 30660 - DNA, 1201 bp, Artificial sequence
  DNA replication origin
cgttttcttcccctcacaccgttttcttcccatgtcctcccaccgtctcgcagcagcgtctgtcagtcgcaatcttcttcccactttcttctctccccctcccatcgtcttttttccccagcctcttattctccgccatcttcttcccctccccaccttctcgcagcagcgacttcctgccgcgtttttctctccccgcaccctcttctcccctcttccactccccaccgtcttcgcccccgatcgtcttcttgcccacccccttctcgcgctctccaactgcctttcacctagaagcgctccacgcgtgcgcccgcctgtgtccctgcgcctggtgtgtctgtgcgcccagccagccccatgagctgggcccctgagctccgccccaacagccaacaggagacccaggagagtcgctgccagggccatcacggctgccgccgcccccgcccccgccgctacctcagaactgaacagtgttggctgcgggcgaaagacagtggggcccggaagactgcggggagagggggaggaggggacggagagggtgggaaagaccttggaaagtgggatggggagaaaggtggggaagaagacagtggggagaaagtgcagggagaagacagtgtggtagagaagacagtggaggaaaacggtgaggagaaaggagggtggaaaagaagacgatgaggacaaggccgggcgcggtggctcacgcctgtaatcccagcactttgggaggctgatgcgggcggatcacaaggtcaggagttcgagacctgcctgaccaacatgctgaaacccagtctctactaaaaatacaaaaattagctgggcgtgatggcgagcgcctgtaatccagctactccagcgcctgaggcaggagaatcgcttgaaccccggaggcggaggttgcagtgagctgagaactcaccattgcactccagcctggatgacagagtgagactccatctcaaaaaagaagaacaaactacagcggggagagggcgaggggaagaagatagtgggggaaaaagagcaccgagaaagggagaagagatggggagagctctattgtgtcactgaacattcctcagttaaagttaaaatgttctcataagtttgtgtgttttcaacttttgctcttccagttggtatattcttttcttcctccatctcctttttataactccaaccacct

SEQ ID NO: 30661 - DNA, 2083 bp, Artificial sequence
  DNA replication origin
tagagactgggtttcagcatgttggtcaggcaggtctcgaactcctgaccttgtgatccgcccgcatcagcctcccaaagtgctgggattacaggcgtgagccaccgcgcccggccttgtcctcatcgtcttcttttccaccctcctttctcctcaccgttttcctccactgtcttctctaccacactgtcttctccctgcactttctccccactgtcttcttccccacctttctccccatcccactttccaaggtctttcccaccctctccgtcccctcctccccctctccccgcagtcttccgggccccactgtctttcgcccgcagccaacactgttcagttctgaggtagcggcgggggcgggggcggcggcagccgtgatggccctggcagcgactctcctgggtctcctgttggctgttggggcggagctcaggggcccagctcatggggctggctgggcgcacagacacaccaggcgcagggacacaggcgggcgcacgcgtggagcgcttctaggtgaaaggcagttggagagcgcgagaagggggtgggcaagaagacgatcgggggcgaagacggtggggagtggaagaggggagaagagggtgcggggagagaaaaacgcggcaggaagtcgctgctgcgagaaggtggggaggggaagaagatggcggagaataagaggctggggaaaaaagacgatgggagggggagagaagaaagtgggaagaagattgcgactgacagacgctgctgcgagacggtgggaggacatgggaagaaaacggtgtgaggggaagaaaacgggggacaaaacggttgtggggaaggcgcggggagaagacagtgaggagaagagggcgtggggagaggacggtggggaagaggaagagaagatggtgaggggagagaaaagcgcggcaggaagacgctgctgcgagaaggtggggatatggaggcggcaagaaaatggagaagaggctgggaaagacgacgattgggagaggagaagagggtgggaagaaggcgatggggagaggagaagagggtgggaagaagactaaggcagacatgggaagaaaagggtgcggggtgaggaagaaaacggttggcggtaataggccgggagaagacggtgaggagggggaggggagaagagggagcggcgggaagacgctgctgggggaataggcgggaaggtggagactggaagccagcgggtggagagaaggagatggaaggaaaagctgccgccacaggaacccgtgctgcgaggaatgggagagactgaggggaagaaaacggtggggaaggggaaaaaaaactgcgggggagaagaaggtgcgggaagaagacagtagggagacggcagaagaggatgcgggaagaccgcagtggggaagaaggaggggagaagacggagaggggagaaaaaggtgggaagacgttgggaaaggagaagggtcgggaaggagaggggagggaaggagaggggagggaaagggcagaaggtggggaagaagactggaaaaggggtgaagggaagaaaaggatggggagggaggagggaagagggttggggggaagaagaagggaggggaaagcggcgaagacgaccttggggaaagagatggagaggggaaaaagatgggtgggagagaagaggatgaggcagggaacgaggtggggaggggaagaaaaaggcagaaagacgggctgagaagagtgctgggagaagaagggggagcggagggagggagaagggaagcggggaaagacgatgggagaaggtggtgggggagaagaaggcagtgtgggagaagagttgagggaaaaagaaacaatagtgatgctaatgttaaacgtcgtcgtcttggagcaaaagaagcaagtgctgctttagactcccggcctaactttgttcaataaattcccacttccaaatatcttgtgattgcagtgtgggtcatttttagtacttagatccagagcagtctctgattgttagtgacagtgctgtcaaattgcatgctgttcaccagctataaacgaaaacatcacatttccttgaagtgca

SEQ ID NO: 30662 - DNA, 1051 bp, Artificial sequence
  DNA replication origin
gttctgttttgttttggtaaatattgcccaagtctttttagtttgcttcaaacatttactaaaaataaaaaattttaaatctttgcctacttaaaaataaaaaaaaatactcaaaacaaatttaagctgaagatatatactgtataaagtgcttcatctacctaattctctgaagtctttttttttctgtgttttaagactttatcattgaaaaaagaagaaattagagaagggaggtgggggggacaggagggtgaaggaatctctccaaaatgtcagatccgggcgaccctccttccctgactgcccagccaccctgtcccttctctgtcctggcggcgaggccctagctgccatcttctggggaccaaggcccaggagcccagctcgggtcccaggcagaggtgaaggcagaagcggggctcagggcctggaggccttgccggtgtctttgagagccccttgggtgggcactcaggcccccatgtcccagcagggccctagggaggtaggcgttgaggggagaggcctttggaggtggggtcctgaagccggaggaccaggcgggaaccagagccaggtgtgaggctgggggtcacagccggaggctgggtctctcccgcatcagcctctatagataatgccattctccttccaagttcaaactcatccccactgatgctggaggccggaaggccacgtgtggctctgtctcggtatagcccccgatgggctggccctctgggctgaaggctgcaccctgccctatgcggttggattgatcgatcataggttgcaccatgcgtctccgggcattaatgaaccagttgttgacttgcaggatggtgagccccgtgtcctgcaccagctgtttcttctgctcctccgaggggtacgggtgccagaggtgctggaacaaccaggctcgcatgatgttggtggccaccttggggaagatccccctcttcttgtttcgccgtggctcctggtccaagtcctcatcttctccaccagaactgggagaggccacgctggtgtccagcccgactcc

SEQ ID NO: 30663 - DNA, 912 bp, Artificial sequence
  DNA replication origin
agtggaaacatgctaggcctggctgacgggtgacaagcacagaggatggggacattcaagggcagacacgggttgtagtcacaggagagaagacctgggctacagtcacaggggatccagacaaaaagggagctcgctggctacagctgcatggcagagaggcacaccagggacagacatgggtacaggtgcaggaaagaggagtaggtgacggttggcgtgggcagagggcacagagataaagacacccgaagggagatgtggctgtaggctgaagggtggagtcacaagagtcctaatgtgggctgcatggacaagggctggagacacaggaagacaggcatgggaagcaggcacactcaatggcaggcctctgctgcagtaacaacagatggagatacccaacgaaagagactggctgcaggtacaaacactggggatagaagttttgggcatagtctcctgggagaaatgatccagaaaaaggaaagaaatgggctgaaggcacaggggaaggagacacaccagtgcagacatggcccaaaaagcatggatgaaaacactgactgtggacatggattagggggacagagaatgtagcaaacataagctggcatgggcagaagctcaggggacagacagacaaaaacatcggaatgggctgcaaacacagggattgaggcactggaggactgctactgcctgaaggctgaggagatgacaacattcaaggcaagcaatgtgctgcaagcacacagcatagagactcacacagctggcaggggctgcaggagcaagaaatggagaggcataaagtgcaggcagaggacagaccacgtgacaatacacaagggcagacatgggcttcagtcattacgggatggtgatactggtgagaagatacaggcttca

SEQ ID NO: 30664 - DNA, 868 bp, Artificial sequence
  DNA replication origin
ttgctaaactctacctcacatgaaacccgccactgcaagttccaggtgagaggatccctgcagaaacactgcagggcaggatcccaggaggcaggaccaccggggaagtgacggagcccctgtagttgggagggtctcaggcccaagagggccaggtggctccaaacctcctgctccagcttccccttactccccacaccaggcacagacccacgtgagtgccccgatgcagggaggattctgactggccatgtcttctctgccactgtgcagcctgctgaatggcagcctccttgcccattacatcattccaggcttccctttcatgggtcaccttctccctcccaacacaatgccagaatccaccccaggaggatagggaccaggaaccaaactgtggcaccatgagtggagaccctggaggcagacatgggtgtagtcacagagtggaaacatgctaggcctggctgacgggtgacaagcacagaggatggggacattcaagggcagacacgggttgtagtcacaggagagaagacctgggctacagtcacaggggatccagacaaaaagggagctcgctggctacagctgcatggcagagaggcacaccagggacagacatgggtacaggtgcaggaaagaggagtaggtgacggttggcgtgggcagagggcacagagataaagacacccgaagggagatgtggctgtaggctgaagggtggagtcacaagagtcctaatgtgggctgcatggacaagggctggagacacaggaagacaggcatgggaagcaggcacactcaatggcaggcctctgctgcagtaacaacagatggagatacccaacgaaagagactggctgca

SEQ ID NO: 30665 - DNA, 1863 bp, Artificial sequence
  DNA replication origin
caaaactgccattgtcatcatgacccgttctcaatgagctgttgagtacacctcccagacggggtggtggccgggcagaggggctcctcacttcccagtaggggcggccgggcagaggcgcccctcacctcccggacggggcggctgggtgggcggggggctgacccccccacctccctcccggacagggcggctggccgggcagaggggctcctcacttcccagtaggggcggccgggcagaggcgcccctcacctcccagacggggcggctggccgggcggggggctgacccccccacctccctcccggacggggcggctggccgggcggggggctgacctccccacctccctcccggatggggcggctggccgggcagcgggctgaccccccccgcctcccttcccgatggggcggctggccgggcagggggctgacccccacctccctcccggacggggtggctgccgggcggagacgctcctcacttcccagacagagtggctgccgggcggaggggctcctcacttctcagacggggcggttgccaggcagagggtctcctcacttctcagacggggcggccgggcagagacactcctcacatcccagatggggcggcagggcagaggcgctccccacatctcagaccatgggcggcctggcagagacgctcctcacttcctagatgggatggcggccgggcagagacgctcctcactttccagactgggcagccaggcagagaggctcctcacatcccagacgatgggcggccaggcagagatgctcctcacttcccagacggggtggcggccgggcagaggctgcaatctcggcactttggggggccaaggcaggcagctgggaggtggaggttgtagcgagccgagatcacgccactgcactccagcctgggcaccattgagcactgagtgaacgcgactccgtctgccatcccggcacctcgggaggccgaggctggcggatcactcgcggttaggagctggagaccagcccggccaacacagcgaaaccccgtctccaccaaaaaaatacgaaaaccagtcaggcgtggcggcgcgcgcctgcaatcgcaggcactcggcaggctgaggcaggagaatctggcagggaggttgcagtgagctgagatggcagcagtacagtccagctttggctcggcatcagagggagactgtggaaagagaggcagagggtccagctttggctcggcatcagagggagactgtggaaagagaggcagcggcagcggcagcggcagcggcagcggcagaggcagaggcagagccaaaagaagaaaatttaaggcacactggaagaaggtatttgccatatatgtatttgacaaaggacttacatggagaatatataaagaattcttaaaagcaataaggaagagaatgacatctgattcttaaaatggacaaaagttcatatgctgtttacagagccaatacccccgctccccaccaccaaacaaacaaagtgggcaaaaaacctgagcaggtgcatcccaaaagggactatccacatggccaatttgcatatgaaaaggtgctcaatctccactgccaaaagaaaaatgcaaatcaaaaccacaatgagacactactacacattacccacatgacctccagtaaaaagactgatgctaccaagtgttgatgaaaatgcacagaaattgacctctcataaattgctgaaaagacataaattatacaaatatttcaggcatctgtttggtactatcctagaatgtatgcataccctaaggcccaggaattccattctgaaggatgtaaccaacaggaacaagcacatatgtgtttcaagagac

SEQ ID NO: 30666 - DNA, 945 bp, Artificial sequence
  DNA replication origin
caaccgccccgtctgagaagtgaggagcccctccgcccggcagccactctgtctgggaagtgaggagcgtctccgcccggcagccaccccgtccgggagggaggtgggggtcagccccctgcccggccagccgccccatcgggaagggaggcggggggggtcagcccgctgcccggccagccgccccatccgggagggaggtggggaggtcagccccccgcccggccagccgccccgtccgggagggaggtgggggggtcagccccccgcccggccagccgccccgtctgggaggtgaggggcgcctctgcccggccgcccctactgggaagtgaggagcccctctgcccggccagccgccctgtccgggagggaggtgggggggtcagccccccgcccacccagccgccccgtccgggaggtgaggggcgcctctgcccggccgcccctactgggaagtgaggagcccctctgcccggccaccaccccgtctgggaggtgtactcaacagctcattgagaacgggtcatgatgacaatggcagttttgtggaatagaaaggggggaaaggtggggaaaagattgagaaatcggatggttgccgtgtctgtgtagaaagaggtagacgtgggagacttttcattttgttctgtactaagaaaaattcttctgccttgggatcctgttgatctgtgaccttacccccaaccctgtgctctctgaaacatgtgctgtgtccactcagggttgaatggattaagggcggtgcaagatgtgctttgttaaacagatgcttgaaggcagcacgctccttaagagtcatcaccactccctaatctcaagcacccagggacacaaacactgcggaaggctgcagggtcctctgcctaggaaaaccagagacctttgttcacttgtttatctgctgaccttccctccactatt

SEQ ID NO: 30667 - DNA, 773 bp, Artificial sequence
  DNA replication origin
ccgacggacgcacgggcgggcggccgggagccatggagcgcggccctggggcccgggggcgcgggccggggtgggcttcccacggcacgacatggagacctgtggttgcgaggctccctggggctcggcttggaccgcgatggggctgggccctggcctcctaacggggctgctgtctggggcggtagctgcgggggcgctctcccctctgcccgcgactcggagcacccccacccctcccctgccgggccaggccgggcggcgttgttggcgggggccccggtggaggcccggcccaggcggcgcccgccatgaacgggctgtcgttgagtgagctctgctgcctcttctgctgcccgccctgccccggccgcatcgctgccaagctcgccttcctgccgccggaggccacctacaccctggtgcctgagcccaagccggggcctggtggggccgggaccgcccccttggggaccctgcgggcctcctcgggcgcaccgcacccgggcgcaggaagctgcacctgacggagcataccgacttccagtacagccagcgcgagctggacaccatcgaggtcttccccaccaagagcgccagcggcaaccgcgtctcctgcatgtatgttcgctgcgtgcctggtgccagcttctacattggcctgggctcccgcctccactgcaacatcttctcctacgactactccggctacgatgccagctcgggcaggccttccgagaggaacctctatgccgacatcgacgccgcctggc

SEQ ID NO: 30668 - DNA, 2386 bp, Artificial sequence
  DNA replication origin
cgccttcctgccgccggaggccacctacaccctggtgcctgagcccaagccggggcctggtggggccgggaccgcccccttggggaccctgcgggcctcctcgggcgcaccgcacccgggcgcaggaagctgcacctgacggagcataccgacttccagtacagccagcgcgagctggacaccatcgaggtcttccccaccaagagcgccagcggcaaccgcgtctcctgcatgtatgttcgctgcgtgcctggtgccagcttctacattggcctgggctcccgcctccactgcaacatcttctcctacgactactccggctacgatgccagctcgggcaggccttccgagaggaacctctatgccgacatcgacgccgcctggcaggccctgcgcaccaggtgagggcgaccctgggggcagctcagcctgggcacacccaagaggggaccaggccgggggccggggggcgggcttccctgggaggaaggtgggcggccctgcaggaggggagccacagtggatacacagggccagagagcgggacaggcgagcttgggtgtgcaggtgcctcctccacatggctgaggtgtggccaggcggtcctcccacaccctggcctgtggagccaggctccctgggaacccctggcctgaggatgggaaggggctgagcttgtcacaggggcgtggatgccacccggcgggagggagtgggtggtcgtctgggggtctgtgcacgtgtggctgggagcccatcggccgaggcagcacttggggccaagtgaggcgaggctgctgcatccaggtccggaggcctggcccatgaggccctgtggctacggagcttggccatcctggggcagggcctacagggtaaggtgcagactcgcagcacacatccgaggtctgggccagcctcgattccagatccagccctcctagtcatccacgtccccagccctgcgcttgcctgggcccttcaccggtgtttgagcaccgcccgggccagtgctgctttggacgaggagacccaggtgggcctctggtggcttttcctgctcgccatccactggggctgtctcgtcctggcccagcccagcccactggtctgacctgctcccgcagggaccaggcacagctctgagaagtcagaggccctagggaggtggggtcatcgttgccttggtgatatgcaggcagtccctgctgtgggcctgggagctggtcccctggcaccaccctggctctgggggcctcccagcagtgtgggacgctgacaccaatcaccacttcatgcgacttccttggcccctcctgtctctactgcctgggccactggcagagtcacacctgccatggccacctctgagctctgtctgctcggccatctgtcctgctgccactttgtcctgcaggaacctaggcccagagctgtgagggggaggccagagcgtgcccagggcctccactggggatgtgtcctgttcgtttgagtggtgacatccaggtggcagctgggggctcctgcctgtagcaggtgacagggctgggctggctcagcacactactgaccatggctgccagggagcaggccagggaggctgaggcagagctggaaccacaggcacaagccaggcagcatcctttggggcatgggtgagtggcgagctgtggagtgctgccaggaggctgggattccaggccagggacggggacagccctgctggtggagtccaaatgccaggcagaggggatgcacacctgcccatgctcctgccttgcaagagggcatctgcctgggatcagagcctagagcctgtgggaggagagttgtggggtcccggcatgggcagggtggcaggtgggtcccgcgtggttgggactgggcacgaggaggccttgtaactggtgctggatcagctgggtcaggggccacacaccaatgacctggggatgggggtggccctgggtgggagctggtagtgctgaggtggctgaggacctgtccactcccaagggaaggtgctggtgggaggaccacctccgcagccaccaccctcgatgctgacctgggttgcactggcatctcattgggcgtggggactccgagagtccaaaattgggtggagacatttggggacacagctgcctgaattcctcatggccaagggggtgggcaagggctgcagggaggaagtgtccgctgtcctggccagtgcaccaggaacggctttctaacccgggcaggaaggcgtgaagcattcaggatgtgggggccacacagttcccagtgtgcacctaggggtgaccaggaggaggaaaggcgccagggcctcccctacccccgccccaggggcactccgtaggcgagatccctgcagatc

SEQ ID NO: 30669 - DNA, 1371 bp, Artificial sequence
  DNA replication origin
tgagagcaagtcttaacacaaccaatcacagcatgaaaataaagtccaatcagagtaggcctagaggttttttttctcatccaatcagaacatgtagtccaggaactgcatttgcataacctcatatataaagcatgctgaggtggcgtcaggtcatttcaggctcttctgtgtccagcggaggagcaactctgtgtccagcttagagaactggaagaagccgcaaccttccacctgctggagggtggaggatggatggagcctggagcctgggtcactacctcgctgcggttggtagtggcgatagagcagtaggagagcggtcagcagcaggagcttctcctgccaggctggaggactagaaggaagaggcactgccacatgctggaggctggaacctgtgccaccatggcttgcctcgctgtggttggtggtgacgtcggagactgcagcttagccacagtggtagaaacgtgatggggtaggtgagttttcctggcctgccctgtgtgcctctgggggcaagtgttgggtgtcctattggggttcactgctagaggctaccctgcctgtggcagtggtctggttgggggcactctccggggttgcattgctggtggtggggcaggttgcttggctatctggggctatactgcccgtggtggcaggggtggtgaggggaggcagattgtgtacactagcttgtattgctggtggctggggaaggattaggggcgttatcttctgctgcactgccagcagcagggagtgggttgggtggagttaactggggctacaatgctggcagtgggggtggtttaggggcgttgttgggtgctgcactgtctgtgactggggggtgcaccattaggagctgaactgcccgtggctgggtcagattgtgggcactattgggtggtatgctccctgaggtgtggggggagtgcttttgtggggggatattggggttacattgcctgaaactgtaggatgtattggatgtgctatctgggggctacactgctagtggcagggggcagattaggggtgccatgggggctacactgccagcggcattgacgagctgaggaggtggcagtggcagtgacagcagtggcctccttcttctcatagcttccaagtaagggatggttttcctcttctcggactccagactctagaaggcgattttctccactcgagctggattgcatggtagggcctccacacccactgtggtttcccggcctgccctcatgctttgtgttgcgaagaccacctgggactaccaggcagggagtagtatgcaccatgggggaagtgggagacagggcactgtgggtggaggtgtcaggaatgggaaccagccct

SEQ ID NO: 30670 - DNA, 1844 bp, Artificial sequence
  DNA replication origin
cttcttccagttctctaagctggacacagagttgctcctccgctggacacagaagagcctgaaatgacctgacgccacctcagcatgctttatatatgaggttatgcaaatgcagttcctggactacatgttctgattggatgagaaaaaaaacctctaggcctactctgattggactttattttcatgctgtgattggttgtgttaagacttgctctcatccaatcagaacatgatcataaagtccaatcagagtaagcctggaggtttttttctcatccaatcaagacatgcagtccaggaacctccgtgggcattaccgcagtatataaatgatgctgaagcggaaacacgttttttcaagttcctgtatttttatgtggagttgctcactgcccaacgtagaggactaggaatcaggagtcggtggccgtatgctggaggctggagccgcgggagcgcggctcgcctcgctgcggttgttggcagtgacggagagagagcagcgcggctggagcaggtaggagaaggaaaacagttttgggacagatagaggggagtaacgagggtagttagggccaaagggaaaaaaggatagcttagccggagaaggcattgcaaaaagatggcagcgaaaagatggtggggaaaaaagtttttgggtagatggaggtgtaaaaacagggtggggagcgggagggaaggaaggttttgcagaaagacggtgggtaaaaagtttaagggtagatggagggggaaaagagggtggcaggtgggcggaggaaagagagggaggtgatgggggaaaaggggggggaagggagagaaggttttgtgaaaagacagtggggagaaaatatagtgagggggaaaagtttttgggttgaacaaaagagggtagcaagtggcagaaggaaaaagagggtagccagcaggaggaagacaaagttttgtgaaaagacagtggcagaaaagaaagatggtgaagaaagaaaagacggggggtgaaaagtgttttgatagatggaggggggaagaggataatgaggaggaaagagggtggcgacaggtagcagggatgggggttgggaaaacaacggaaaaatagtttggggcagagggaggggaaaaagggtggcaagcaggataggggaaaaaagagcactagtggtaaaggggggagactttgaaaagatggtggggaaagttttggggtgtagatggagggggaaagagggaggtgaatagccgtggggagaaggctttgtgaaaagacggagggaaatgtttttgggtagatggagaagcgaaagagaatggcaaggaggaacggggaaagacgatgaagaaaacagtttttggttggatgaagcagggaaagagggtagtgagcagcaggagtggagagaaggttttgggaaaagacgggggaaaatgtttttgcttagataaaggggcaaaagagggtgatgagagcgggacggggaaaaagagggtggccagggataaggggaaaagagggtgggaagaaactggggaaagggtttgggtagatggatggggaaaagggtgttgagcaggagagtagaggcggctttgtgaaatgagggtgggcaaaaaatgatgaagtttgggggcagatggtgaaagaaaaagggtggtgagagggagggggccaaaggccgtttggaaaagaaggtagggaaataatggtgggggacaaaggtttggggtagatttttttaataagatcatttgtatgtttgcttttcagtagtttgagttctttatgcattttttgtatgaaccccttgcctgatgcatggtttgcaaatacttgcttc

SEQ ID NO: 30671 - DNA, 1288 bp, Artificial sequence
  DNA replication origin
aacattcattgattcatcccacaaacatagatggagtgctccagccccatggaaataggaatctggtgtggcccttcaaggacagtatcatctaatgggagaaatgattgtgtgtcaaggtagaaagccatagttggggccgggcgtggtggctcatgcctgtaatcccagcacttcaggaggccaaggcgggcggatcacctgaggtcgaaagttcgagaccatcctgaccaacaaggagaaaccctgtctctactaaaaaaaaaaaaaatatacaaaattagccaggcgtggtggcacatgcttataatcccagctactggggaggctgaggcaggagaatctcttgaacccaggaggcagaggttatggtgagccaagatcacgccattgcactccggcctgggcaacaacagtgaaactccgtctcaaaaaaaaaaaaaaaaaagccacagttgggagagaccaccttcagctggcggcggggggtagcagggaggtgtccctggaggaagcaccatcagaggcagattgttaagaggccacagaatgcagaaatcagttgaaggggaagggtgcctggaagagaggacagcatgagcagaggtgggaaacatagcggggaagactgagtcctgggtgggggcggggtggggtgtgaggtcaggcagggagggtcagcggtctggggcgctcaggcaccacctgcaacagccatactgggaccactgaggaggggaggaggtcacagaaagcctcaaggacaccactgctgggctgagtgtgccaggagtggaggtatcagtttctgtgcagttcactgagccctgggatagggcagggccagagtaggggaggccccatgtgggccatctgagttttcttcgaggttccaactccgtggtcttttaggtccgtcctttactctgtcaaagacacaaggacaggtgtgtatttactttgtgaagaggctcaaatgagtattctactcaagccttccattaagtggacatttagtatgtgccaggtgctgtgctgggcacttcaactctgccaacgaccctaagaagtcagtactgttattttccctttattggaaatgaggaaactgaggcatggagaggctatgaccacactgcctgcaagtggtacagccaaggtaggctctgaaatgtgggttcttatccactctcctgcaatgcctctgaaatgtgtccttaaaatatctctgtgagccacagagggaccatctcctacaattaagaatggctattggcagccgccgccg

SEQ ID NO: 30672 - DNA, 888 bp, Artificial sequence
  DNA replication origin
tgcccggccagccgccccgtccgggagggaggtgggggggtcggccccccgcccggccagccgccccgtccgggagggaggtgggggggggtcggcccccctgcccggccagccgccccgtccgggaggtgaggggcgcctctgcccggctgcccctactgggaagtgaggagcccctctgcccggccagccgccccgtccgggagggaggtgggggggtcagccccccgcccggccagccgccccgtccgggagggaggttggggggtcagccccccgcccggccagccgccccgtccgggagggaggttggggggtcagccccccgcccagccagccgccccgtccgggagggaggtggggggggtcagtccccctgcccggccagccgccccgtccgggaggtgaggggcgcctctgcccggccgcccctactgggaagtgaggagcccctctgcccggccaccaccccgtctgggaggtgtgcccaacagctcattgagaacgggccaggatgacaatggcggctttgtggaatagaaaggcgggaaaggtggggaaaagattgagaaatcggatggttgccgtgtctgtgtagaaagaagtagacatgggagacttttcattttgttctgcactaagaaaaattcctctgccttgggatcctgttgatctgtgaccttacccccaaccctgtgctctctgaaacatgtgctgtgtccactcagggttaaatggattaagggcagtgcaagatgtgctttgttaaacagatgcttgaaggcagcatgctcgttaagagtcatcaccaatccctaatctcaagtaatcagggacacaaacactgcggaaggccgcagggtcctctgcctaggaaaaccagagacc

SEQ ID NO: 30673 - DNA, 909 bp, Artificial sequence
  DNA replication origin
atccttcccctctccccccttcccccattcttcctttccctccccctcctctctgtcccctccccctcctctctgtcccctccccctcctttctctccgccctccccctcccttatccttcttggcccgggaggggcgagtgcttccgggccgggggtggtgttctcctgccctgctgcctggggagcctgggacttcggtgggcggtcccgggcgttcctgcgcgaggtccttgcggggaactctcctggttctggagggttcggggctggatgcgggtgcagagaaagaaatatttcaaaaaaatgagtaaaggatggggggctgtcgagttctgggcgttggtctgcagcggtcacccgccgccaggagcgaccttggacgggagctggggcaggaggcgggctggggggcgcggggccggagcttcgcggctgcctcggggcccgcgaggagctggaggtggagggcggcaggggctggggccggggcgagcctgtgggtgcggagccacagcccgggtttgcgttgcggctgaggagtagacttggaagcgcgccgtgggctgtgggaggccttaaccaggagtgagtcccctcggggagcccagtcttgcgtcccgcagttaggcttggtaagggtttggaaatcaaaacgtaacgtgattcttctatgtgaataaagtttatttttacagtttcacgcgcttttgtagattacaatccgagattgggagttgtgagggcagtttccaccttgagtggcatttttttatttatgggaataccaacaggctcgctgagattgtagggtatgttaagcagtaattcaaaaaaaaaattatttttttgagacgaagtctcgctttgtaccccaggctggagtgcagtggcgcgatttcggctcact

SEQ ID NO: 30674 - DNA, 996 bp, Artificial sequence
  DNA replication origin
tacataaaacacacaatatcattaccctcttggaggccaggcgcagtggctcacgcctataagcccagcactgtgggaggccgaggctggtggaccacttgctgtcagaagttcaaaaccagcctgacgaaaccccatttctagtaaaagttccagatcaacatggtgaaagcccctctctactaaaaatacaaaaattagcggcgtggtggcaggcgcctgtaatatcagctactggggaggctgaggcaggagaatcgcttgaatctgggaggcggaggtttcagtgagccgaaattgcaccactgtactccagccttgggcaacagagcgagactctgtctcaaaaataaaaaataaaaaaaaaagattaccctctcgtaatttttcatgctattaagggaagagacaataaaaaaaataagtaaatattcattacgccagatagtgataaattctttggagaaaaacaaagcagggtaagggaatggagaattttggggggcttgcaattttcattagggtggcaattttccttttcacggaaaaggaggtgtgtgataaagctggaaggaggtgagcgagcatcagacatggaatataaggatgcagagggtgagggggtagggaaagcattttagggagagggtactgcaagcacgaaggccatgaggcaaaaacctgtgctcggcaatttgtcttggccacaaaagctttatcccagtcgtcagtccattaaaccctgtagctttaagtgttgtgagatcacaatctttattttttaacttgtgatggttctggacggcaattgctgtttcctgcaatctgtggatgaatgaatgagcaaagcagttagcagcgggatgagtacaggggagcagctccacacctgacaccttatccaagttcccccagacccttggcgccctggttcccccagaacttcgtttgcattcgtctttaaatgtcttctcagtttgccttgggtcagttatt

SEQ ID NO: 30675 - DNA, 978 bp, Artificial sequence
  DNA replication origin
agccagacccggcggaactaccgtgcccacaaggcagcgcgccggaagccccgcccccggggtcgccggggcccgtagtccttctgcgagggcgcgaggactccaggagccgtcctggttcgagcatttctgaagaaactgagttcccggcgttcgcagcctgggagtcacaggcgcccacccaccggtaggtccttgagtttcgagagccagtagctgaaggagagaggagaggcaagtgcctacaactcccagagcactgcgcggaggcgcccggccgcgctgtcctggccgccaggctgcctctcccgctgggggccgccgcgctgtctgcgggctactagcgccgggcccctccgcgtcgccacgcctgcccttcacagccttggcccataaggtcaccgaggggcgggaggcgccgcccgggccctccttggaggcgggcgctgctcccgcaccatcctcccccagttctcttagactccggggtactttggaggccgagacagacacgctgtccctgctgccacggaggtccctgcttgcaggtgcaggctgttagaggagagggtctgaaaacaagaaaggggaatagctgtatgataactgcttgaaggcgagagggcccagcgacagctctgttttagacagggcctccaggcctcttagactcagtccctgccacgcacccactcctgccctggccgctgcgacggcataatctcgggatctttgaaggcagatgcggggctaaaccatcccacctgacgggaaccctgccacaggacccgacatatccctgtctggacactgctgtaacgagtcaaagtcaggaaggactaactggagcccagagattcccaggtgctgctgcctcagacctgtggactctttggaggatctcttacagtttgtgaacttctcagttcctctactgctcccacagacaacgttgctaaacatattaattggtcccat

SEQ ID NO: 30676 - DNA, 1981 bp, Artificial sequence
  DNA replication origin
gactccgtccctcacctccttcaggtctgtgcccaatgatcaccttctggatgaggccttccttcccagttctcccctgcctaacatttaaattgccgcctcctccacttctgatccccttaccctgccccatttttttccagccattgattttttcttacacaatgtatgatttatttattttatctggtttattattcattgtctctcccagctagaatacaagctgcatgagagcaggagtttgtttgttttgttcattgcagaatcccagcatctggatcagtgcctggcacacatttagtgctcaaaacatttgttgggtgggtgggtgggtgaactagtggatgggtgtgtggataggtgggtggatggatggatgggtaaatggatgaatgaatggatgagtgggtgggtgaattagtggataggtgggtggatggtgggtgggtggatggatggatgggtggatgggtgaatggctgggtggatgggtgggtggatagatggatgggtagatgagtgagtgtatggattaaagggtggatgggtgagtgggtagatgattgggtggatagatggatgggtagatgagtggatggatggaaggataggtgagtgggcagatgagtgggtggatggatggatgggtgtgggtggatgagtgggtggacagatggatgagtggatggatggattggtggatagatgagtgggtggatggatagatggacgggtggatgagtgggtggatggatgggtgggcagatgagtgggtgaatcagtggatgggtgtgggtggatggatggctgagtggatgagtgggtggatgggtgaatgagtggatgtgtgggtggatgagtgagtgggtggatgggtgggtggatgaatgagtggatgtgtgggtggatgggtgagtggatgcatgagtgagtgggtggatggatgggtgtgggtggatgaatggctgggtggatgagtgggtagatggatggaagagtggatgaatgggtggatagatgggtgggtggatggatgggtagatgggtggatgggtggatgggtggatgggtgggtgactggatgaatgggtgaatggatggctgggtggatggctggatgagtaggtgggtggatggtttggtggatgagtggatggctggctggctgggtgaatggctagaacagtgagggagagagggctccaggtggactaaccaacatgagcaaagacctagagatgagagagtcatgccatccttgaggaatcgaatgaagatgagtgaggctggcagggggaaggtcaagggatgagactggagaggtgggatggctggatgatggacagccctgaagtgtgggagagattgttagcagttcaatgggttttcactcatgggcacacagctgcacctcctgccacccacacagcagatggggcctgaggtctgcattctgcaaggagtatggatatgggctctctccaggctctctctttcccgttccaccgctgaataccattggttactaggccttgggaagggtgaatctactaactgtaaagaacacgggtttccgaatcactgcattcagcttttcaggagaaaagccacgtgccactaatgagctctcactctggcttgttatgtgagaaacacatctctgtggtgttttaatcattctgcattttggggtctatttgttacaggagatagtgtgcactaatgaatacctcaaaatagagtgccgccataacttgaaacctaaaatatgtaccattggcttagtggccaggcagcagggaacatgaaaatagatgttgcagaatggaaagtgggagacttatgtcatgcagaggtgaaatgtttgttagacctgtagcctacaatagcttgaagggaagactgggagaagtaagcctgtagctccagaagaaggtggctgagtgagctgcaataaaaatgtatgttgggctgggtg

SEQ ID NO: 30677 - DNA, 1904 bp, Artificial sequence
  DNA replication origin
cactttcagcgccgccgcctgcggtctcccaggccgtaactaccccaccgcctgccgcctgcgcccgcgctccagccccgccgcgcgcctgacctttccccgcgcgccccggcccccgccggcgccgcgccgcagccccgcgcgcagatggcgcactcggctgccgccgtgccgctgggcgcgctggagcagggctgccccatccgcgtggagcacgaccgccggcgccgccagttcactgtccggctcaacggtaaggcggccccggcccgccccgaccttttgtctgcgagcgagcggggcccgccggggccgcccccttgctgggtgcctgtcccccgcgcgcccgcggcccggctccggcccgccgcccgggaaggctgttgcaagcgcgcgccgcggggtggtcccgggcggccggagctccgggcgcgggccgggttgtgctcggggccaggtgggggcgcggccggcgctccgggaagtggaacgggctgggcgggggcagacttcccgggagagcaggggccagggcggacaggggcccctggaaaggcagaggcaggagctggggcagcgcgggtcccctgtctcagccgcaggggacccgcacctgctcaggcccacttgttcacgactgttgggcacccactgaaggctcctgtttgagatcctggaaagttggtcagccgtgacctgtccccttctgcgggtggtatatggcttcctgctgcccctgggaatcttagtctttctacacgggggaggcctgcggacctggggctgaccgcgaaaggggcttgtggtcccctggggggagtgaggggcggggggatggctatcactatcaagacttcagtggctctgggactggccatttgcctcacttctgtgtgccttagtttctccctctctgcaatgggaataataccagtgcacaccccattggctagttgtaaggatgaaagactgtaacaaatgtaaaggatcagaccagctcatgggggattagtaagtgctggtaaacgtggcccgatcgtgattcgtgaagccagaaagcaagggcaagttctcccttagtgtagagaagtttttgttttttgagatggagtctcactctgtcgcccaggcgacacaatgttcctgtgacacaatctcggctcactgcaacctctgcctcctgggttcaagtgattctcctgcctcagcctcaggagtaggtgggattacaggcacccaccaccatgcccagctaatttttgtattagagacaggctttcaccatgttggccaggctggtcttgaactcctgacctcaggtgatccacctgccatggcctcccaaagtgctgggattacaggagtgagccaccacgccctgccagtgtagagaagttttgattagcccatcccccctcaggaggtcccacaggtaggaaatagaactacaaaaacaagggctatgaactccctgtggcccacctcgccccagtgggaatgtccaagctggaccggtccttaggggccactgtgcccattttcaagaagggaaggtggagggccaggaaagggaaaggcttgcgagaggtcaggctgagagttgggcagagctgggatggcgtcctgactggtctgactccctgaacggtggggctcctgcgacccacatttggcttcagccaggaggggcctctgccagatctccgatgccatttggaatgtgccgagtgtcgagccaggccccactacagcttcgtggatgggactgtcacaataccctgacaatgttgtgacataccaccccgtgttacagatgaggaaactgaggctagggaccttaggaagtgattgcccagcatcacccagaacttcaccattggcccaaccaaccctacaccaccagg

SEQ ID NO: 30678 - DNA, 1518 bp, Artificial sequence
  DNA replication origin
ccaccccgcggcgcgcgcttgcaacagccttcccgggcggcgggccggagccgggccgcgggcgcgcgggggacaggcacccagcaagggggcggccccggcgggccccgctcgctcgcagacaaaaggtcggggcgggccggggccgccttaccgttgagccggacagtgaactggcggcgccggcggtcgtgctccacgcggatggggcagccctgctccagcgcgcccagcggcacggcggcagccgagtgcgccatctgcgcgcggggctgcggcgcggcgccggcgggggccggggcgcgcggggaaaggtcaggcgcgcggcggggctggagcgcgggcgcaggcggcaggcggtggggtagttacggcctgggagaccgcaggcggcggcgctgaaagtgacactcggcggcggcggcagcaacaaaaagggtggggggggggccaggaaatcagctgtgaggtcacgtgcggcgcgcagccagtggacgcgcggcctttttgttttgatacattccagtcacctcttaaaggggccgcgccggccgcgttcctctcgcagccccaaacaaaacaacacgggccgccgccgcgccgcgccggctacttttccgtcttgcgtttgtcccacgtgcaactttgggacccccgcaaggagccttctaaaaaagacgtaacaatcttttgtatggacattctaatcgtccccaaggcagccaccatttattaagcacttgctgtgtgcacggcctgtgtatagcaaagccctggcgcacagggcgctcagtaatcactgcgctgagatttatcaccagaagcctgagaaataggtatgcttgactccattttacagatgagcaaatagaggctaagacaagtgaaagacatgcataagttctcacgcagctgaagccctggggctactggtgctaggagtgcgcacccacccgtgttggcagcctgggtggctactggctactgggaaggaattgtcctgtgaagccttgtttgggataggagtgaaatgccacctctcccaaagagaggcgtaaatgcgggaagaggccttggggatccctggatccactccatagatggggaggctgaatcccagaaaggggcagggacttgcttgaagacacacaggactgttggggctcagacttctttgaaaggcgccttaattaggctcctcaaggctcaaccttagagccacaccctcccctcttgctcacctgaaggggcactcctgttgcccatagctgtgcagtgaatcatacaggttacttttaatattttgctaattacggtgcaaacttgatgttcacacccgtgtgaccaccatccaaatcaaaatacagaacactggtggttccctagggccctcttccaagcaatgccctaccctttgaggtaaccactgtccctgacttctagtgttgttgactaattaggtttctctagaccatcatgtaaacataatcatacaatatatactattttattttattt

SEQ ID NO: 30679 - DNA, 1137 bp, Artificial sequence
  DNA replication origin
acagagtgagcaggccaacccaggtcgtcgaagttcaaaaatggggtatttttagagaatgttaagtcactcggggactctccggcccgccacaaccccctacacagccgcgcaagcaaaggcggcagcgcagagacgccgcgggtaccgcccggccacgccctccagccacgccccccagcccgggacggagtccagggcgagcctctgattggctgcgcttgctcacatggccgcgcgggctgcagggcaagctgcaagggcgagtgtgcggctgccttcagcttttcagccgcgagtggggtggtgtggagcggcggggtcagctcagggcaggcggatggggcgcatgtgcccagggcagagccctccggccttggctgggagagtggccttcggtcccagggcagagctcagcccccagggccgggcctcccgagggccgcggaccgtggggacatggggcaggcgtggagccggacccgaagccaagccttagatctgtgcgggcagatgcgtggccgaggctgttaaaccggtgctgtaaaggcctcgttttctctccctgagcggctccccacatccccatgctgagaagaggccgcttctcctctcccgtcagctgtgcccccgggtgcagcagctacgggtccagccctttaaaggttgaagacgatcacccaccccatgctttcccagcaaggaacaggtcttgcttttatgagggtagagaggacattcaagtggtcggtcttggaaaactgccatccgaaggattgcaaacattcttggggggagagaagaatttgtccccgggtggaggaggactgctgggggctcgaggccgctgatgaagggaattcatttcctctcccgggtgcccaggattcagactgatccagacatctgttgggcgggcagccagtatgcccccggcgtgcttagagaagtggctttctttgccctcctgaggatagatttacacagtcctgagtctgcaggttattttttgtgcatggggacttgagagccaagaatagtctgcagcaagaaggatgcaccgtcttcaaggctgcccctctacaacagagcaagtcggcggggcatggtggctcacacctgtaatcccaggacttt

SEQ ID NO: 30680 - DNA, 1091 bp, Artificial sequence
  DNA replication origin
ccactcccgggacccactgagcccgctgctccctgcaggcgcccaggcccagcccggcacccccagacccgcagccccggcgggtgcgatgcgcgggcgcgttctcctgggtgcgtcgtctggaaaaaacccgagatccctaaaggtggcacggctgggcctgccgaagtgggcgggggttaaaagtgcgctgctgggctgcctcctggctctctgaacctgcagctgcctcaccctagcaagctccctagtgtctctgggcctcagtttccttttctgtaaattggacccgggttcggatccgagtcggcagctttgtagcggaactagccttggtcaggtggtgacacctgagcctcagtctacgcatctgtgagcgggcggcggtgacagctatctcccggcgctgctcgctaacacgcactgagggcctggcgccagcaaacgtcgcccgcgcccgcgctccaggcgcccggccagggcgcggggtcggtggtgagctcagcgatgcccggtgacgaggcagcacgaggagttttcgtggctggttactgctgcccctgttctacacagggggaaaccgtgtctcagagggagtgaggcggcatgcggtgcattttatcccgcgagccccgaggccccatcctggctctctcctggaccttcgttctctcctctcctcctaggatctcagtctgcccatctgcataatggctggatgggccagtcctccctctgctcccacacggaacctcgggggatttcaggaaccgctgaccaatctggcgctgggaacagatgactctggatgtaaagccagggctagtgaaggcagaatgtaccaggcaaaggtcaaggggtcagcccctggcctccaggcagacatgtgtaccctgtcagggacctcacgtgagggaagcagattccaccacctgctagaaaggcttgaggccgggcctgacctctgcttgcccaggtgtaaagtgggggtgatgcagggccccatgcacagagtggggagccacaggagataagagggaagccttgcagccatcaccattctcttcctgcgtctcctgttcacccttccc

SEQ ID NO: 30681 - DNA, 1071 bp, Artificial sequence
  DNA replication origin
atggaaacaatagcgagatgtgtgcagccagtgtaccctggtgagcaccggctctgcgccaggtgctacgctgagagaacgcctcagagctctttactattcaccaccccacaccacactcccacgtccacagaagcaggtgcgattacttccaatttacagaaaaggaaactgaggcccagagacaccagggagcttgctggggtgaagcagctgcaggttcagaaagccaggaggcagcccattcattacggctatgtccggtttggaaatctctcgcacaacccagcctactgaaactccgacgcaccaaaaacatcctttcctcttcctgaaaaaaaaaaaattccccttttgccctccgagtttcatccttccccctccgcatgacaaatcctgctgctgccacctcacaaaaatttccaggaaggccagctacttggagaagagcaaatcccttgcacagccagcaccctggcctggcggctggcccagatcccaggcagccaggacaagaataagatggggtgagaacccccagtgcagggagaagcttgcaactcaagacagagagaggccggtagagagggggctgtaccttagggaggggtgggaggacaaggaaggttcctgggagcccagggctgcaggacagggtgcaggccagccagggaaggggcaacatagggcctataaggataagaagagctgggggagagaaggacggggagttccgagctggggtgtagccagagcacccgcatagggggtacagtgaggtccgcaacaacaggagcactctggggcccagatggagactcaagttaaatcccaacctggatacagccctgggacccgaagctagaaatgggactgggtgctgcccaaggacccaggtgaaggccagtgtgaatctcacctgggtcccgctgagggagaagactgggagagttcatgtccaggctgcagccataaggcccaaatgaggtcagaatgaggctcctgacttggatggggtgagcagaacaaagtcctagtctgggtccagcctgggtgatctcgggcctgagt

SEQ ID NO: 30682 - DNA, 1278 bp, Artificial sequence
  DNA replication origin
cactgccaagcacctgtgggcagcagggggtggccatgcaccttcaggcagggccccttgccctgaggttctggggcccctgtcctgggctctggagaggatgcaggacaaggggaaggttctcccatctaaccaagtgcctgctccatgccaggcccaggctgtgccatctggcctcatacacggccactgcaggccctaccttctctatcctcaccttgtaggtgtgcagcaggctagggtgaggaggagtgaccaaggctctgccctccacagccctgccctgcctctgcccggctgtgcaaggccacctggccagggcctggcctccagggcctcacaccctccccacctctctaccctacagggacttcctcacctgcagagaacgggggatccccagactatccacctggcagcgccccctccccggtgatgctccggaccagcatggctcgggagcacccctaacatccggtggggaggccagatgctcagctgcacaggggcaaccatggctgccagagggtcctcccgcccaatgccaacagcccagcagagacaaccatggcccgcctgcaacatggaaccacttgtgctttggagggaaggacgtagggaagggccagaggcacgggcctcgctggagagggaaggaggcaacacgggaggaccccgggcagagtggctggggcacaaggcacgtgaaagacagggggcccacagcaggtggctgcgggcatcagggtgcagcctggcctcccatggccagacctcaccggtctgggtcctccatgccccatggccatcaaaatgcccattcttctgcatccagaaattccacgttgagcagcttacccccacactacaacacccactaacatttagtgaatacctactatgtgctggggtgtcctggggtgtcctctgcgtgcctggcctatgcaaatttctttcattacatctcatttgatcctctcagcaaccccttgaggcaggtactaatgtgatctccatgctgcagatggggaaactgaggcccagggtttatagaatcaaaaggctggcacatggaattggtgaggatcctgcaggtcctcagcaggatgcgaggagtggcctcccagggacaggaagagccaagagcagcaggagtacagcagtgtgagaaagaaaatgccggtcagaccatgtgaggtggctcacgcctgtaatcccagcactttgggaggccaaggcagaaggattacttgaggtcaggagtttgagaccagcctg

SEQ ID NO: 30683 - DNA, 1021 bp, Artificial sequence
  DNA replication origin
agacgcctcaccttctctccattctaggaaaatccaagaggaagaaggatctacggatatcctgcatgtccaagccacccgcacccaaccccacgtgagtctgcctcagtttctccctggctcaccctggagaggcttcccgaacagggctcaatggaaggagtgagaggcaggtggggccagccctgctttacctcgtcctgtcctgggcagcccctgctgtgcatacagccaggtgacggctgctgggggttcatgcagcaccatttgctctgctctgctcacttctcaccctgtcttggaggctcgatgaggccgtgcccagctcagtgtagatgctcagcagccagtgagaggaggtggccggagaaggcgcctccggggcaggaggcacctcgtccccacgccaggccccacactggcccatctactgctgcacttggggaagggtgtggttctctctgaagctcacggagtcttctttctccacagacccccccggaacctggactcccggaccttcatcaccattggagacagagtaggtgccagccgccacccctgcagggcctctcacttcacctgacgagcgggtagagctgaccctgcagggccactttggggggaggtgactgaggggtcagagagggtcaggctctggagaagagcctcgtcctgcgctgctggctgtgtggccctgggccacccactctttgaccctcctggtgggaatgaggaccatcggctgcctgactggagcttggcgagcccagagctggtaggaaggtttctgagctgagagcaaggccctgcacctcatcctagccctaggggagagtattgaacatgcaggctcctaggccgccctggacccgctggatcactccctcaggccagcacctgggcaacctgcattttatgcttccagaagcctcggaagggcactagccattcagaatcctggctcagggaccgtgctatgccccgttcctcccaacagaaaccctactcccaggccagg

SEQ ID NO: 30684 - DNA, 804 bp, Artificial sequence
  DNA replication origin
catgaagagctcagcatcctctgtgccagcccctagccgatggggcccctgcagcctgcgggtgccccctgcgcatctcccaaccttcctgtcaggagggtcctcaggagttcactggggaagagggagcaggtccttgcaggcagggagccatctgccagggtcagctggcatgagggtgtctgtcggtcagcagggccggctgttgccatggagctggtgcaggtgcatcctgaagctctggtggagggacccagcgaggctgtgtgctaatcctcttcctccctggagacacctggaattagggatcagatagaggaggctggcgcccgaacctggcagtgcaggcagagttggagggtgggggaagcgggcaagtgggtggtgggtgggagcccggtgaactgtggctgagtgggtgggcacacgtcggagagggggctggggctggggctggtgctggggcaggcagtgcaggtggtgcagacacgggcagcccggcagcctggctgagctctgggtgtcacccacagggagacgtgtggatctgcatggagctcatggacacatccttggacaagttctaccggaaggtgctggataaaaacatgacaattccagaggacatccttggggagattgctgtgtctgtgagtggcctgggtgggctggcggggggtcctaggtgcataggcagaggcccagccctgccagcaggcatggagcctgcctattgatggtgtcttgggcagagctgggcatcaatgtgccccctgaacctgggcagctgccctgcataggccc

SEQ ID NO: 30685 - DNA, 1418 bp, Artificial sequence
  DNA replication origin
gcctgctctctgtgaagggctgcggcatccagccaggcctgcggcgtccagccaggcctgcgagccgcgaggggcgcggtggcctgcggggcgctgggtaacttcaggggcgcgcacggtaaatctctaggcgttgggtctgctgctgtctgcaggctgcagagtccccggaagccccgagggccgggccagggggtgcacacgggcaggacagccgcagaggccgagaactgggctgacgcgtggcaagcccgcggcctccagctgcgccgaggacgcacgaggacgcggacgggcgctcggggccgggcggggctccaggacacgcggttgaagccgagctctaccgccccctggcggctacaggagacagagcctggggccgcgccccggcaagggattcattccctccctccccccttccctccctccctcattcattctttcatgtgttcattcagcagaagccgagcgctccctcggtgtcggcagcattctcagcgctgacgacacaacagtgacaagtcaggtctcggccaggataacccaggataataagctagattggctgggcctagtgggcggaggctgtttgagccagagtggtcctggaagacctcgctgaggaggtgacatgggagaccgggatggggttggggggagccagccacaggaagacgggggagggggtgttctacgcagaggggacagccagtgcaaaggccctggggtgaaaacaagtcttcatgattgaaggatggagagagggagacaacagctcccaggaactgttcgcccctgtgccagggaagggttagtgggcagagacctgtcccagactggggctggaggacaggaggagtgcagagacagaccccatggggaccctcctcctgggaacacaccctaagcttcctcagaggaccacagagaccctgctctcagaccttgagctgtagtgggcggagtcccctcatgcctgacctgacctgagctgtcacacccaccctcctggcctggggatgaattcgactccttcccagctggtaagagccagtcctgggacttcaggagtaccctgggcacggtgtgccgagctcttggagtccctgggtcctgactggtccccatgagggggtgaacctgagacggatgaacagccaaggtggatgcaagtccttcaggccatcagctgaacttcgaacctaacggtacctgaagctgagcacacccggcttacgtgagcaaattccctgctgccccagccatgctgccagcgtcacagggccagactgcagggcgccttcatcaggctgcccctactcccctcggagccttctccggagcccaccacctgtccccaagtctgtttttctgtcttataagctgtgtggctttgggtaagtgatgtcagctct

SEQ ID NO: 30686 - DNA, 977 bp, Artificial sequence
  DNA replication origin
gccttgaaagccagctaagtctgaagtttggatttgtatctgtgagcaatgggaagtgaagagagggcttatgatgggaaggtcgggatcagatgctagagaaatctccagagaaaagagatgactgcagaggctgatatagtaaataatggagaatggaaacagagggaatatgagtagatggatgagtgggcagacgggtgagtatatttacagggaaacagacaattgaatggggtgagcaggagtgctaagagggatgtaaagatggatggatggatgagtggatgggtgggtgtatagatagatggatgaattgatggatgaatggatgggtgggggattggtgagaaggtgcatggttgagtggatgggtagatgaatggtgggtggatgaatgaatggatagatagatgaatggataagtggatgggtgggtgggtaagatggatggatgtgtgagtgagtggacagatagatgaatgggtgaatggatgggtgggtgggtagatggataaattgatggatgaataaatgagtgggtgaatggatggattggtgaattggtgaaagggtgggtggatgaatgaatgggtggatgcatgggtgggtaagtggctggatgaatggatgaatggatggatgaatggatggatggatgaatggatgaatggatggatggatggatgaatggagggatggatggatggataagtgggtgagtgggtaaatgaataaatggaacgtagctgaatagatggatggatggatggatgggtgggtggttggcgaggtgagtgaatggagtcaaagggatagatagatgggcagggcatgaatgggtgagtggatgactaacggaaagatggacaggggatgaatgggtgagtggatgactaacgaattatatttctctctattccagtgaagacgtagaatatatttttagtgtttttgttttgttttgttttgttgtg

SEQ ID NO: 30687 - DNA, 1319 bp, Artificial sequence
  DNA replication origin
cctgggtctgggccatgtccccacaatgctcctgggggcagccacgtcctcttgggcaagtgcttctacccacctgggcgtcatttctccgtccatctgcctgtggcctgtggcgcaggttggcatttagcctggagcctaatgcatggcaagtgcgtggtgggcattggcccttgtcacttttgctgttgttagtatcatcaaagtgtctagtgacaaaaggtgtttagggaagagactgggctgagggcagggctgctagaactggtctctgctctgtggctcactgcctgagggacagagcctctttccaccttgtccagccagggtgtggatctggctcaggtggaaagcaaccccaccagaagagcatatcctggaaccgaccagcacaggtcctcctgctggccttatggtgggtgggggtgggaggccaggtgagacccagaccctggccgcctgcctggaggagggggcaaggcttgtgctgacagacagcctgtgattgcaggggccagcgcggctcggtgatggtgcaggtggagttgggagtggctgtgagagccaagctgcgcagagcagggtgagagaatccctcatggatgagacgttcctgagtcgggtctgtgagcactcgttttgcactcactgcatgccctcagcatgtgaggtcctgggctgcagacacgcctgaaggacatgcttctgccctcatggaggtgccatgctggtggggggaccacagtgagccagacacctcagagagtggccagctagggaagaaagcaagctgagcacagcaggtgcgtcctggtggtcggcaggcccctcacggatgtgccgtcacagctacccttgcacgtgaggcagttcagagagacagcgttcctgactgagggggaggcaggccccaaggtccagtgacagaatcaggctactggtgcccaagggcctgaatggccagtgtgttcagaaaagagtggctgagagggggagggtgtctggggcctcagggactttggctatcactcctagaaaggttaaactgggcatgctgagagctcattttacattttgatggtgggaagacgtgagggccaaagccgggccaaggtctagggtgggcaggggaagtctcagtgggctcttgggaggaggcatcttggaggggaggagatgctgggactctggggagcactggttgcagctgcctgcagggcgagcaaagccgctggggaagggccgtctggtttcacatctcactcggtgatggacttatgcctcccacaagcgcatcggcattgtggcatcaagatgtg

SEQ ID NO: 30688 - DNA, 1123 bp, Artificial sequence
  DNA replication origin
ctttaggtagactcatctcatttaatccttgctacagccccatgagtgtagtgatttctactgacaacagggaaacagaggcactgagtggtgaagtgacctgtcccacagctagtcagttgaggtgggattcaaacccagggcagactgatgtcggtgagtgctgggctggatttcacccaccagctgcctggggccaggatcctagggctggtggggcctgcagatcactctgctctgagccgccagcaatctgggtgcgggccagagagccgtcctcctcggttagaatcctgcagccagtctccctgctgtgcagacacataattatatttcacattaaaggggaagctggaggccaagggggccaaggagccctttgaggctcatgctctgggcacagactggcctcctcggcccaattctgaggccctagggccgagctgggggtcagactggtgacaaaatggagttcccctgggtcagtgtccaggcgagcaggtctgtctgccaggatgaaagacttggcccctgcgggaggctcagagatatgaggcccagacaataggcctcagaaagctgggagggcagggcatttggggacaggttgggaagaaagcctgagcctccagagacaggggctcgaaagagaagggggtcacatggggatccggtcggcagagagaggtccagggaggagcacagagaaggcaggagatgggagaagccaagcagctcaagatggagaggagaaaaatgctattagggtgggatggtgtgtgtagagggtgcgtgcctggtgtgcaggggaaaagggctctgtgggaatgcacaagcttagacctgtgtgtgcgtatgcacacgtgcagatgccatcctgcatgtgcacatatgagcgagtgtgcacatgtgcccctgcgaacatcatgcatgtgggggcatgtatcctgcatgtttatgcctgtgtgtgtgctcgccatgcacctgtgcgtgcgcgcgtgtccccggcggacgtgcctgcatgtgtgtgtatgtgtgtgtgcgcgcatgtccccgggaagtcgtgcctgtgtgtgtgtgtgtgtgtgtgtgtgtgtgtgtgtatatatatatgtgtgtgtgc

SEQ ID NO: 30689 - DNA, 1000 bp, Artificial sequence
  DNA replication origin
gaggggtgtccctgtggcccagcacactggagccaccctcctcgtctccagggtgctcgagtgagtgccctccgccctcactccctgctctctctcaggcggcttggccccaccaaatggcaggcccccagggtccccctcctagagctgccaacctcgggtcccctgtctggttggaggtgccaccagagaactgaggggcagacttcgctgtgaagtcttttgttggggggggcggtcccagcagacactgaggggctcttctcagaatacagaagggagtacccctcaaaaagagcgaaagcctctggtggcgcccagggctgagatggacctcccctctctgaccctcgcccgccacagggcggcggtccagggcggagctgcgcgaggaggggccgcggaggtgcagcgcagcgcgagggaggctggggtccagccgcgcggccagggaccggctctcctttggcatctcagagggggcgaaggctaggcccaaggctaacgccttccgggttcgcaccttccaaaggcggctgccgatttcagtggcgtgtgggcgcctcggcgctctcggagacggagcctgtgaacctgggtttggggcgcagatgtgggagccaggaggtccccagcgctttattgcagggctcgaacctgggtataggggagcaaaaaagaaactagaaatggccacaggcagcgcggtactctaagatgggaacgccccctgggaaatggggagggggaggtcccaggtgcgggcgagtccaggctgtgaggaggcaggaaaacctcccagaacaagaccgtccccaaagaaacactttgacccccattctgatcacaggttttaaaatattcacatgacatgggcacgctggatcaaaaccgaggcacagacactcgcttgggcctcaactcccatctgaaccccccaaggagcgccccaccccagctgtctctgcccatgagcccctgattcccgccccgctccccc

SEQ ID NO: 30690 - DNA, 1067 bp, Artificial sequence
  DNA replication origin
gaaggtgcgaacccggaaggcgttagccttgggcctagccttcgccccctctgagatgccaaaggagagccggtccctggccgcgcggctggaccccagcctccctcgcgctgcgctgcacctccgcggcccctcctcgcgcagctccgccctggaccgccgccctgtggcgggcgagggtcagagaggggaggtccatctcagccctgggcgccaccagaggctttcgctctttttgaggggtactcccttctgtattctgagaagagcccctcagtgtctgctgggaccgccccccccaacaaaagacttcacagcgaagtctgcccctcagttctctggtggcacctccaaccagacaggggacccgaggttggcagctctaggagggggaccctgggggcctgccatttggtggggccaagccgcctgagagagagcagggagtgagggcggagggcactcactcgagcaccctggagacgaggagggtggctccagtgtgctgggccacagggacacccctcttctccactggagggccgctgtaggcatacagtaggcagtctgtaaatgctggctgttgacccagagctggcaggtaggggctccaagtcctctatcacctcctttttcccctcccaggggagggcatggctgacacccctcatccccagcactgaagggggtggagccttctctgggaggggcaggacctgagctgtcagtccatctctggacactccccctgcagctaccccgtcaaaaccccataaggtttccaggctgccccggaggggacccctccaggaatgtgcctcaactgtgctggaaggaagaggtgcctgggaagtggtggaggggtattgcctaaaaccatgcagtgggttgggtttggacagatgccttcacctagctctttccaggccaggcgcttaccccaccagccttcctgccccagggccatggtgtccccatccctgggtctccttgaagcaggacaaagtaacactgagtggccctgcaacagcaaaataataatgacagcagtgataacaggagtaaca

SEQ ID NO: 30691 - DNA, 1566 bp, Artificial sequence
  DNA replication origin
tggtacacacggtgcccacccagtggccaccctcaccccccctgctcccaggcccagctctgggctgggcccttcctccaacaggtgcagctggtgcctgtggctgggccctggccagggctttactgtgagcgacacatgggtacacctgcccctccccgggcctgcccttggagccctgccaccggctagcgtggaggagagtcagggagggggcagcttgcgggcagcaggaggggtggaggcttggctggccacatggaaggtgcggtgggtgggggctcagccccacgggatggctgtgccgggaactggcagcgtgatggggacacggcagcagggaaaggctgaagatgaaagagagctggcctgaaactgggccgtgtgcaggttggccagagcttcagaggcaccatggggttgggggtgggggggggcctggcagaggcaggtgggttttctgaggtgctgggctcggggcaggaccagagcccccgctgggcactggccaaggacccagccctgggtcagctgacttaatttcctaatggcctgccagtgcagagggtggcattagctctattgtgcagacagggattggaggcccagggaggcactggaggcaccagcctgtggggctcagacccagagccctggtgctttcccagggacagaactgcaccttcccccattccacagacacacccctcaggggcatttgactgccaggctagctttctccctgccttaccaccaggcaggtcccacacagggcctgaggcctgcatgccatcccagctcccgggagctgtattcctaggacctagttaagccctggcacagagtaggtgcccagtaaatgctcgatgattccatgtctggactgcttcttccagccacagaggccttgctgtgctggtgagagctgtgggggctgagttctggggctggagaccccaggccctgttgcctagctgtggcccctgtgctgggtagccatacagaagtgcttaatcaatgggcattgcatacggggagacccagcccctgccctcagggatctcactatctcagaggagactcttggacagactcaggggggcaagagaggcagatgttgccaccaagatggggtcactcttcctggcctcagttcatcatctgtgaagtgggactggctccggagagtgctcaggatggggcagtaggaatgtgagacttggagcgtgcctctgggagttgggggtggggaggggctggtctcagtagaaatggacgtgtggagagggggatctgggaaggagggggtgtgagcatttgtggagccagagcctggggaactcgtcatttccccatccaaccttcccttggacatgtagggaagcaggcccagggcagggcagcgagttgctgtagcagtgggccccagatggcagtgggccccagatggcagtgggccccagatggcagtgggccccagatggcagtgggccccagtgcaggcctcctgtttcctggtgtgtcctcagtgtcccctaaccccaatcaccaccactggtgctccac

SEQ ID NO: 30692 - DNA, 2448 bp, Artificial sequence
  DNA replication origin
tgattgaatcaacaggtgggtggtcaggcagatgggtggataaatcgggttgacagatgggtgggtggacgataggggtgaccagatagatggactggctaggtgggtggaaggatgggtggatggatggttgagcagatgaatgggtgggggaatgggtgaggaacggatggcatgggcgaggggatggatggaggggtggaggcatgggtgggtggatggaaggctgagcagataaatgggtgggggaatgggtgatgaaaggatggcatggtgggtggaggggtgaaggatgtacagatgagagtctggtggaaggaatgcctagatgcacaagagcatgtcaatgacttcactcttacctcttgagttctatcttctatgtaatggtgctgagtgggcacggtactgtcttcaaggctgaattagtagtggctgccatttcccaggcaccaactggaaaggatccagtcactagaacatcctaaagttaaaagagtaaagccaagttactgcaggcggtgctgctcttctcagaggggctcacaagtaagacataaccacatgaaaccacatttctgctcacttccccagggccccacaggaggtggaagggcctctggcctgcacctttgatgccccacaccttcacagcatagcaaccatccagaaccagagaagagcagaacaagatggggtgtcagagaaaaatgaccgctgacaattattgagtgcctattgcatgccagacactatagtaggcattttacatacatcatctcacataatcctcacaattacacaaggttggaactattgttgttactattccagagaagtagttaatgtggtaattctcccactgtcacaaaggaattcaggccctcagcctgtactcccagccaccacctgcagagccttcccaacgccaaccttggagccagttgtgaatagctgggtgggtggatgaatgaatgggtggatggatggatggatggatggatggatgatggatgggtgggtggataaatgaatgcagggatgaatgggtaggtggatggataaatggatgagtgggtagatggatgaatgaatacatgggtgggtggatggatggatgggtgaatgagtggttgggtgtgagggtggatggctgtatggaggaaggatggatgagtggatgaatgggtgaatggatgagtggatgaatggataataggatggatggatggatggatggatggatgaatggatggatggatggatggttggatagatggatggataagtgtgaaagtagatgattggatggatggatgaacagaagggtagatgggtgggtgactgagtggatgggtagatgaatgaatggagggataggtgggtgaatgggtggatggatggatggatgggtggatggatggatgggtaatgggtgggtggatggatggatagacgaatgggatggatggatgggcagatgattgggtggatggatgggtgagtgaatgagtggatgggtgagtgaagaagtgaatggatagagggatggctgggtggatgggtgggtatatggttgagtgggtggatgaacagattaatggatgaatgggtgatgggtgcatggatggatggatggatggaatgttgggtgatggatgggtggagtgaatgagtggatgagtggatgggtggatagatggacaggtggatgagtgtatgggtgggtagagaaatgaatggatagagggatggaagggtggatggatggatagatgggtgaatggatgggtgggtggatgggtgggtagatggatagatggatgggtggatgggtgtgagggtgggtgatgagtgggtagatggatggatagggtgtttgggcgagtaggatagatgactagatggatgagcaggtgggcacatggctaactacgtggatgggcacacatcagtaatttgccagagatttgccttgggtacacatacatcctacatggtccctgcaatcccaaagatgcaatttccccacctgtcaaagggatccccctgccttcctatccagtgtgccgtgagaatcagagaagaggttggtgggaaggggctctgaggatctccacggtgagccacctgacatgcttctcacctccgcacctcccagccagggagttcatggggcctgccctttccaaggttacagccaaggctggtttgtcacactggtttttctggctggaattaaggcaaatgttggtaagtcacccccacctcattagcctcctgggacaggtgacagtggtttagaggcacacagacctagattcaaatcccagctctgcccctcataagctgtgtgaccttgagtgagtcacttcccctctctcagcttgttctgaaatgggatggcctgcctggtctctagtggcccttcagtccctcttcaccctc

SEQ ID NO: 30693 - DNA, 1651 bp, Artificial sequence
  DNA replication origin
ggagaaggctttgtctagctctgaggttatggtgtgactggactgggactgggggtgctgggtccctgtgggcggggaggggtgggcctgtccagctcctccgtcggggctaatgctggaaggcccaggtctccctgcttccagcctagcccagccaaggcaggctgccatccagatgtggctgtgggccaggcggtgccatagcccctagcttgcagatgccctagcctgtcactgacaggccagtgtggggcctttagtgggggcagcacagcctgtgtgtcccgggggtgggcacgtcagtggctgagagcaggctttgttctggctggcatggatgccctgctgcggggcctgtcctggggtgcctgaatgtgcagtaggctggcctggagccaggtgctgcctgcagtgagctgagggtggtgctgggaacaggtgacacccctgagcactgcccaggtgctagggtagcagccttgcaatcttccttagagatgcgggaagcaggggctggggagggccctcggctgaggtcagccagggagcagcccatgtctgggtgccagatcttaccctctttggcactgctggtgaccaagaagctgcaagcatggcatgtgggtggacactgtagagtggggcatgtgggtgtcaggagggtggtgggacccagcttggggtgttcaaagtgggtggcgacaggggtggcaggccgcattctaggccctgggaaggacaacaagaagcaaaagagaaaacgtctcacgcctgtaatcccagcacttcaggaggccgaggcaggtggatcacctgaggtcaagagtttgagaccagcctggccaacatggtgaaaccccgtctctacttaaaatacaaaagttagctggatgtggtggcgggcacctataatcccagctgctcaggaagctgaggcaggagaatcgcttgaacccaggaggcggagatggcagtgagctgaaatcgcaccattgcattccagcctaggtgacgagaggaagattctgtctaaaaaagaaaaaaagaaagaaaagaaaaaaagaaaatgtgctacccttagggagtggtggtctcagggtggggttgatggttgagtgcccctggctacgttattgttattgctgccgccattgtgcccttagaaggggcagtgctgtggatatagcagggatgggacatgggtcttcctggggcacaaggaggcctctggtgccaaggtggcgaggcagtggcaggatgtcttgcgggagggtgtccagggtgggtttgagggacagcctggggccaggggctgtggccggaaggggagtccgctggaggaggctgggaggtgaggtccgaggggtcaggagcttccctgtgcaggtcctgcatgtcctggggggcctctggcattgagcaggggagggataggcaccgactcagcttccacaggccctctgtggctgccatggagactggggggccatgggcagaggcagagaggctggcaagttgtgccccgaactggctgggcaggcactgttagattcaggccttgagggtgggagaaggggtcggatcctaaatagactcttcagagccctcagtgtgggagtgaggtgtggagctgaggtttttggctggagct

SEQ ID NO: 30694 - DNA, 1126 bp, Artificial sequence
  DNA replication origin
tccctacagggaagagtatggccatctccattaggcagtgccttgggtgtccagatggcttccaggggtgacactgcaggtctgagagaacttggattggagaaaggaactggagggatggagcaagattgggctcataggctcagcatccccagggagctgtggtgacatgagcccaagtgggaataggtgtctctgccgctgtgggagtcccaagttggtgcctggggagggcagggctgaggggttgctgggaggtgagtgttgagaggcctaggaggccacgtccatgaatgggtctggagacctggggggctgggtctgagggaacgggagcaggtataaccgagggagctggtgggaggactccagcccagctgttcaggggagccctgagtcactttgggggtgtgaggagagtggaggaagtggatggtcctggtgcctcaggtgagggggcgggctgcagggggccagccttgtgaaatgcagatcaacttggaggtgagctcgggagcatgcaggtgaggacccaagagaccggggggtgctggggcaggtggggcagagagaccaaagactgaggcccagcaggacctggggtagagaagagagggtatagggaggaaaaagggggcagcttcaccaactcatcaactaagggatggttggggtgggccaggagctaagcagggggtggggtgatgggggagatggagccctcacggggcagcggggccctgggcactggtttatgtatgaacaggtgggcaagtcctctagagtcgtggaaagtaaacatgaaacccacaactgcacacacgtcgtccctcgtttttgtcatggcgttaatctccaagtggctttggttcttccccaggcacagaatgaagcgacccaggtcatcactgtcctggagctgcccctgcctactttgacttttcttcttggcctgtatctatgtctgacacacaccagttagtttacgtgtaggtccatatgtttattgcggcactattcacaatagcaaagacttggaaccaacccaaatgtccatcaataacagagtagattaagaaaatgtggcatatatacaccacggaatactatgcagccataaaaaaga

SEQ ID NO: 30695 - DNA, 1893 bp, Artificial sequence
  DNA replication origin
cagctctgcggttagttcacagtattttacaaagcgtcgtttccaaacgctcaggaaacaccagctacctataataacgcgtgacacgcaccttcttcaacactcagcacagctctgcaataatggcccagcctgatcttcacgttggaggtgaggacacaggccctggaggattcaagtggcaaggtcacagaagtggtcacaggggaccacagccccccctgcctggactgccctaggctctggatctgtaacccctggcttgctccccattcgcctgcctgaccacagctccgaggcctctgaaaagcctggcaaggtgagcggaaggtccctgtggtgtcgcccccagggcagggatgggccatggagcttagttgagggggaggagctggtacctgctggaggaagcgcagccctggagagggtgcctctctgccctcaccccggtggtgtggagttggagagccttgactgcgggggctggggaaggtgggcaggcccagggcagtgggggagccgcctgctcagcaggagggccagagggaggagtgagctgtgtgcagggatggtgggcagcaggcaggggcaggcacaggaagtagggcgctgagctgaggtggtccaactcaggagctggggaggaagggagcatggaggggagatgggggaaactgggcaggtgcagagagggagggcggggaactgaggagaagacagagcaggggaagtgagggaaggggaagaaagcacaggagcagagggagactggaaaggaaacccggatggctctcagggcagggaagaaggaggggatgggagctgagggacatggagccaactgagatgacgtagggagggcggggatggctgggagggatggccttagcaggagagggcaggggactgcgggagggtggagaggtcaacagaggctgaaggaaagggggaggggagcatgttggaggagatggaactggagagcgaagaagggaagggcatgaatgaaggggagggaggcgggagaggtcaggtgcatccaagggaggtgaggagaggggaagggaggtaaactgaggcagggacatggacagaggggatgggaagtgagtttatcaggggagtcagagtgaggagaggaagggaaggactggaatggagggtgaagatggagtgtgagtggaggtgaagtggggaagggggaaccagtaggggctttgcatgggaggggacatgagtgagggagaggagggaggtacaaagaactggggaaagggagtaagatagaggccacaggggctcaggaggaaggggaggtcccagaatggagggaagaatcttggaagagctgcagtgggtctgtgtgtgtgtgtggcggggagcaggagggaacatgtgcctgagactgtgctgcttcttgaagaggtgacagagacaacacccttaacagagcatttttcctccccatcagcccggtcacctggtcaccctatgaccccacaccctgcagctgcactgagcttcactgaccttgggtggggatgcctcctgagggctctttctgttgttctcgcatctctccagccacatattaaagtgactcagaccattttgacgaccctccattccatgttgtaggtgacactggttatccatgtccaaatctcttcttccccagccgtttggtgtttggtggattagaacagcccatgtctgaaaccctagtcagggagttcactacttttgacatcacgaagaaaaatgttgccaaagactgaaaaataaccataccctgttgctggatctctcttgcctcatccctttacctaataagcaggagttggttacatccttagttcataaccaaagacacttagagagaaacaccgactg

SEQ ID NO: 30696 - DNA, 972 bp, Artificial sequence
  DNA replication origin
tgcctggagcggggtgaagcggctggaatccccagccgcccgccggcccctggggcgagtgcggaacgaccctctctccacgcggagccctgagcgggaggaggcaggggcccgggcagcgggaactgggaacaagccgcccggcaggaaatttcgcgtggctggaatttaggaagaagctcgcgggagctcaaaacctcctgctaaacggacaactgttaaggcgcgcatccggttctgtttcccacctgcaggctcggcgttcctcagtctggcaggcggggaggcgggtacgcgctcggagaagtggtggaaggctggggttgcggggtgcagagagtgctgagccacgaagacttggggcagcgaggccgccgagcgatggcagagcctggggaggcgtccaggctgcgggggagcggggacttgggagcagggaccctgggagacgctgagcgcagggccagggccgcgtccagaggtctcgggtaggccttgactaaagagggggctgggaagagagacgtggagaggtcaaagggccctggtgagtctgggtgaggagcaggggatctagtccccccagaactgagtccaacgttttggggggtagggacaaggaaacagtgagggggtgggggccatgggccaccgttcaagggacaaaccccgttcagaggaaataaggcacggaagtgaggtgacaagggacatgggcgtgacagggccatgagataaggggtgtcgaggtcgggccaggaaaagatcaactaaacagctgggggaagtgggggccgggggaagcaagacatggaggcatgagggagaaaaagggaggaggggaagctcagcaaatcagtcactgccgggcgcctctaggagcctgattttgtggcaccttagtcatgttttcagagaagaggttcatagtctagaggatcccatggccacatggccaacgcagggaggaag

SEQ ID NO: 30697 - DNA, 1922 bp, Artificial sequence
  DNA replication origin
gttgcggcctcttccagtcccctaagcttgacacagagctactcctccgctcgacacagaagagcctgaaatgacctgacgccacctcagcatgctttatatgtgaggttatgcaaatgcagttcctggactacatgttctgattggatgagagaaaaacctctaggcctactctgattggactttattttcatgctgtgattggttgtgttaagacttgctctcatccaatcagaacatgatcataaagtccaatcagagtaagcctggaggcttttttctcatccaatcaagacatgcagtccaggaacctccgtgggcattaccgcagtatataaatgatgctgaagcaggaccacgttttttcaagttcctgtatcttcatgttgagttcttgctgcccaacgtagaggactaggaatcaggagtcggtggccgtatactggtggctggagccgcgggagcgcggctcgcctcactgcggttgttggcagtgacggagagagcagcgcggctggagcgggcaggagaaggaaaacacttttgggatagatagaggggagtaaagagggtagttagggccaaagggaaaaaaggatagcttagccagagaagacgttgcaaaaagatggcagcgaaaagatggtggggaaaaaagtttttgggtagatggaggtgtaaaaacagggtggggagcgggagggaaggaaagttttgcagaaagagggtgggtaaaaagtttaagggtagatggagggggaaaagagggtggcaagtgggcggaggaaagagggaggtgatgggggaaaatggggcgagcagcagggagagaaggttttgtgaaaagatagtggggagaaaatacagtgaggggggaaagtttttgggttgagcaaaagagggtagcaagtgggagaaggaaaaagagggtagccaacaggaggaagacaaggttttgtgaaaagacggtgggtgaaaagtgttttgatagatggaggggggaaagagggtgatgcataggaggaaagagggtggcgagaggtagcagggatgggggttgggaaaacaacggaaaaatagtttggggtagagggaggggaaaaaagagcactagtggtaaaggggggagactttgaaaagatggtggggaaagttttggggtgtagatggagggggaaagagggaggtgaataggcgtggggaggcggctttgtgaaaagacggagggaaatgtttttgggtagatggagaagggaaagagaatggcgaggaacggggaaagacgaagaaaacagtttttggttggatgaagcagggaaagagggtagtgagcagcaggagtggagagtgttttgggaaaagactggggaaaatgtttttgcttagataaaggagcaaaagagggtgatgagagcgggacggggaaaaagggtggccagggataaggggaaaagagggtgggaagaaactggggaaagggtttgggtagatggatggggaaaagggtgttgagcaggagagtagaggcggctttgtgaaatgagggtgggcaaaaaatgatgaagtttgggggcagatggtgaaagaaaaagggtggtgagagggagggggccaaaggccgtttggaaaagaaagtagggaaataatggtgggggacaaaggtttggggtagatttttttaataagatcatttgtatgtttgcttttcagtagtttgagttctttatgtattttgtgtatgaaccccttgtgtgatgcatggtttgcaaatacttgcttccattatctgggtggtttcgtttttattaaattttaattcaatttaattttttttagacgcagtctcggtctgtcgccgaggttggagtgcagtggcacgatctctgctcactgcaagctttgcctcctgggttcacgccatt

SEQ ID NO: 30698 - DNA, 1641 bp, Artificial sequence
  DNA replication origin
cctagtcctctacgttgggcagcaagaactcaacatgaagatacaggaacttgaaaaaacgtggtcctgcttcagcatcatttatatactgcggtaatgcccacggaggttcctggactgcatgtcttgattggatgagaaaaaagcctccaggcttactctgattggactttatgatcatgttctgattggatgagagcaagtcttaacacaaccaatcacagcatgaaaataaagtccaatcagagtaggcctagaggtttttctctcatccaatcagaacatgtagtccaggaactgcatttgcataacctcacatataaagcatgctgaggtggcgtcaggtcatttcaggctcttctgtgtcgagcggaggagtagctctgtgtcaagcttaggggactggaagaggccgcaaccttccgcctgctggagggtggaggatggatggagcctggagcctaggtcactaccttgctgtggttggtggtggcgatagagcagtaggagagcggtcagcagcaggaggactagaaggaagaggtactgccacatgctggaggctggaacctgtgccaccatggctcgcctcgctgtggttggtggtaacgtcggagactgcagctcagccacggtggtagacatgtgatggggtaggtgagttttctgggcctgccctgtatgtctctgggggcaagggttgggtgtcctattggggttcaccgctagaggctaccctgcctgtggcagtggtctggtttggggcactctctgggtttgcattgctggtggtggggcaggttgcctggctatctggggttatactgcccgtggtggcaggggtggtcgggggaggcagattgtgtacactagcttgtattgctggtggctgggataggattaggggtgctatctaatgctgcactgcctgcggcagggagtgggttgggtggagttatccggggctacaatgctggcagtggggggtggtttaggggcgttgttgggtgctgcactgtctgtgactggggggtgcaccattaggagctgaactgcctgtggctgggtcagattgtgggcactattgggtggtatgctccctgaagtgtgtgtgggggggcttttgtgggggggattggggttacattgcctgaaactgtagggagtgttggatgtgctatccgggggctacactgctagtggcagggggcagattaggggtgccatgggggctacactgccagcggcattggcgagctgaggaggtggcagcggcagcgacagcagtggcctccttcttctcgtagcttccaagtaagggatcgttttcctcttctcagactccagactctagaaggcgattttctctgctcgagctggattgcacggtagggcctccacacccactgtggtttcttggtctgccctcatgctttgtgttgcgaagaccacctgggactaccgggcagggagtagtatgcaccatgggggaagtgggagacagggcactgtgggtggaggtgtcaggaatgggaatcagcccttgggtggggagggctggctgggtctgagtttctcctactcaggctcctggaggagggcagccttggtgggcccagcaattcctggccagctggactt

SEQ ID NO: 30699 - DNA, 903 bp, Artificial sequence
  DNA replication origin
catgctttgtgttgcgaagaccacctgggactaccgggcagggagtagtatgcaccatgggggaagtgggagacagggcactgtgggtggaggtgtcaggaatgggaatcagcccttgggtggggagggctggctgggtctgagtttctcctactcaggctcctggaggagggcagccttggtgggcccagcaattcctggccagctggacttggccaggggccggtttcagtgaaggcactcgatcccaccccaggccccagttcctggccagcttttgccagaaggagaggttggactttggaaggtgggtgtgagtgccttcaatgaaactgatccctgacacccagtcaccagcataacgaggtgaggctctaatggttccaatccctgagtcctgttttcggcttttcttgctttgcctgcccagctgctccaagccaggctgaaggaggagaaggagttgccgcctgtggtacggtcgagcagatgacgtggctctgcagcttgcctcatgcagttggtgttggagatggagaccacagctcgactggagcggtaggagggcacccacgggggcctggtggtaggatcctggtagggtgggctggtacgttgaggataactgcttgtattggcatcggcgctagtggtggtagcagtaggaagtctgggggccgggaagggggagtaggagcactgcagggcccaccccgttctggggtggggaggaacctgtgggtgctgtaacgaaggcctcggtggcagtggtggtggtacacctaggacaaagaggagtcctcccccttctcctgcaatctctggagtgtgccctcctcctgctggtgcctgagctaggcgtgagtggcagcattatctcattcttaacaaaatttagagggt

SEQ ID NO: 30700 - DNA, 1432 bp, Artificial sequence
  DNA replication origin
tcaagatcacggcggcacgattttggggagactctcgctaagaccgtctgcgcaggcctggggccgggatgccgtgctgcttcccatggactctgtctggggattcctcatcctggtcggccctttgcgactcgcggcatccggagacgttgccgtcgacccggtggagaggtcaggccggagcctcagagccccgacacccaagcactgccacggagggctcctgctgtgccaagcctcagggactggtttctgagacaaccgtgggaagcactgtgaccggagaagccgctcgcgcctcgcgcatgtgcattggctaggccgactggcactgcgctcgaggcagtcaggctgcgtcccctttaattaacaccaccactgcgcggcggtagcgaggctcctgctgcagccgcggcggcgggatccagggtccagtttggggcggcatgggagacggggccaccagtgtcctgtcccagggccaaacccccagaagtcctgtcctcaggagctccttaagccaacttccacccagggagagggagctttaggacgcctgctgtgttctccggactccccttcagatccgattttggccacctccaagtgagataggatgggcccaccgtatctgttgaggcaggcaggacctcgctgcagcacggaatgatcccacaggtctcaagtagtagtgtcagcggaaaattcactgatccaccagtcctcttcttcccttttcctttgaaagagcagtggcctgtcccgcttctaaaagccctggggctccggaaggccgactgcgctttacaggacacgtgcaaacaggaacaggggcgaatccgaggtggagaccatgtgaccacgcatggcactggcttatctcacagcagatggtgtgattgtgtgtcacccgaggcatatggggcgacggcgaagaaaacggtggtgtccaggcgtggtccggtagaagggtggtacgagtgacctttcaaccaatgtcaaggaaaatcaaagaacacctgggacccgtggggttgggggcctgtgcctgacccaagacacgttttcaaatgcctaccagaggagcaaagaggttcttctgtccacgagatccaacctcgggtgagagagcagcccagggacacgcaggccaacctctcctcgtgatcacgtcgacacgacttttgggaagactctcgccagcaccatctgggcaggcctgaggctgggatgccgcgctgcttcccctggactccgcctgggctttcctcctcctggtcggccctttgcgactcgcggcatctggagactttgccgtcgacccggtggagaggtcaggccggagcctcagagccccgacacccaagcagtgccacggagggctcctgctgtgccaagcctcagggactggtttctaagacaaccgtgggaa

SEQ ID NO: 30701 - DNA, 997 bp, Artificial sequence
  DNA replication origin
aacagatgtggtgagcccaccctatctcactcggagggggcgaaaatcggatctgagagggagtccgcagaacacagcaggcgtcctgaagctccctctccctgggtggaagtcggctcaaggagctcctgaggacaggacttctgggggtttggccctgggacaggacactcgcggccccctctgccatgccgccccaaactggaccctggatccagccgccgccgcggctgcaacaggagcctcactgccgccgtgcagcggtggcgttaattaaagcggacgcagcctgactgcccggagcgcagcgccagtcggcccagccaatgctcatgcgcgaggcgcgaggggcttctccgttcacagtgcttcccacgcttgtcttagaaaccagtccctgaggcttggcacagcaggagccctccgtggcagtgcttgcttgtcggggctctaaggctccggcctgacctctccaccgggtcgacgtcaacgtctccggatgccgcgagtcgcaaagggccgaccaggaggaggaaaccccaggcggagtccaggggaagcagcacgggatcccaacctcaggcctgcccagacggtgttggcgagagtcttcccaaaagtcgtgtcgccgtgatctcgaggagaggtcagcctgcgtgtccctgggctgctctctcacacgagggtggttctcgtggagagcagaacctctttgctcctctggtaggcatttgaaaacgtgtcttgggtcaggcacagaccacccaccccacgggtcccaggtgttctttgactttccttggcattggtggaaatgtcactcgttccccccttccaccggaacatgcctgcacaccactgcttttttcgccgtcgccccgtatgcctcgggtgacacacattcacaccatctgctctgagatacgccggtgccacgcatggtcacatggtctccacctcggattcgcccctgttcctgtttgcacgtgtcctgtaa

SEQ ID NO: 30702 - DNA, 1043 bp, Artificial sequence
  DNA replication origin
gggacaggccatggctctttcaaaggaggagggaagcagagggctgatggatcagtgaattttcagcggacactatgccttgagacgtatgggatcattctgtgctgcagcgaggtcctgcctgcctcacgagatgtggtgagcccaccctatctcactcagagggggccaaaatcggatctgaaagggagtccacagaacacagcaggcgtcctgaagctccctctccctgggtggaagtcggctcaaggagctcctgaggacaggacttctgggggtttggccctgggacaggacactcgtggccccctctgccatgccgccccaaactggaccctggatccagccgccgccgccgctgcagcaggagcctcgctgccgccgtgcagtggtggcgttaattaaaggggacgcagcctgactgcccggagcgcagcgccagtcggcccagccagtgcccatccgcgaggcgcgagcctcttctcctgtcacagtgcttcccacgcttgtcttagaaaccagtccctgaggcttggcacagcagtagacctccgtggcagtgcttgggtgtcgggcctctgaggctccggcctgacctctccacccggtcgacgtcaacgtctccggatgccgcgagtcgcaaagggccgaccaggaggaggaaaccccaggcggagtccaggggaagcagcacgggatcccaacctcaggcctgcccagacggtgttggcgagagtcttcccaaaagtcgtgtcgccgtgatctcgaggagaggtcagcctgcgtgtccctgggctgctctctcacacgagggtggttctcgtggagagcagaacctctttgctcctctggtaggcatttgaaaacgtgtcttgggtcaggcacagaccaccgaccccacgggtcccaggtgttctttgactttccttggcattggtggaaatgtcactcgttccccccttccaccggagcatgcctgcacaccactgtttttttcgccgtcgccccgtatgcctccggtgaaacacattcacaccatctgc

SEQ ID NO: 30703 - DNA, 1229 bp, Artificial sequence
  DNA replication origin
gcgaaaatcggatctgaaagggagtctgcagaacacagcaggcgtcctgaagctccctctccctgggtggaagtcggctcaaggagctcctgaggacaggatttctgggggtttggccctgggacaggacactcgcggccccctctgccatgccgccccaaactggaccctggatccagccgccgccgcggctgcaacaggagactcactgccgccgcgcagcggtggcgttaattaaaggggacgcagcctgactgcccggagcgcagcgccagtcggcccagccaatgggcatccgcgaggcacgagcgcttctcctgtcacagtgcttcccacgcttgtcttagaaaccagtccctgaggcttggcacagcaggagccctccgtggcactgcttgggtgtcggggctctaaggctccggcctgacctctccaccgggtcgacgtcaatgtctccggatgccgcgagtcgcaaagggccgaccaggaggaggaaaccccaggcggagtccaggggaagcagcacgggatcccaacctcaggcctgcccagacggtgctggcgagaatcttcccaaaagtcgtgtcgacgtgatcacgaggagaggttggcctgcgtgtccctgggctgctctctcacccgagggtggatctggtggacagaagaacctctttgctcctctggtaggcatttgaaaacgtgtcttgggtcaggcacaggcccccaaccccacgggtcccaggtgttctttgattatccttgatatggatggaaaggtcactcgtaccacccttccaccggaccacgcctggacaccaccgtttcttttgccgtcgccccgtatgcctcgggtgacacacattcacaacatctgctctgagatacgccggtgccacgcgtggtcacatggtctccacctcggattcgcccctcttcctgtttgcacgtgtcctgtaaagcgcagtcggccttccagagccccagggcttttagaagcgggacaggccatggctctttcaaaggaggagggaagcagagggctgatggatcagtgaattttcagcggacactatgccttgagacgtatgggatcattctgtgctgcagcgaggtcctgcctgcctcacgagatgtggtgagcccaccctatctcactcagagggggccaaaatcggatctgaaagggagtccacagaacacagcaggcgtcctgaagctccctctccctg

SEQ ID NO: 30704 - DNA, 1312 bp, Artificial sequence
  DNA replication origin
tctcgccagcaccgtctgggcaggcctgaggttgggatcccgtgctgcttcccctggactccgcctggggtttcctcctcctggtcggccctttgcgactcgcggcatccggagacattgacgtcgacccggtggagaggtcaggccggagccttagagccccgacacccaagcagtgccacggagggctcctgctgtgccaagcctcagggactggtttctaagacaagcgtgggaagcactgtgacaggagaagcgctcgtgcctcgcggatgcccattggctgggccgactggcgctgcgctccgggcagtcaggctgcgtcccctttaattaacgccaccgctgcgcggcggcagtgagtctcctgttgcagccgcggcggcggctggatccagggtccagtttggggcggcatggcagagggggccgcgagtgtcctgtcccagggccaaacccccagaaatcctgtcctcaggagctccttgagccgacttccacccagggagagggagcttcaggacgcctgctgtgttctgcagactccctttcagatccgattttcgccccctccgagtgagatagggtgggctcatcacatctggtgaggcaggcacgacctcgctgcaccacagaatgatcccatacgtctcaaggcatagtgtccgctgaaaattcactgatccatcagccctctgcttccctcctcctttgaaagagccttgacctgtcccgcttctaaaagccctggggctccggaaggccgactgggctttacaggacatgtgcaaacaggaagaggggcgaatcggaggtggagaccatgtgaccatgcgtggtactggtgtatctcacagcagatggtgtgaatgtgtgtcaccggaggcatgtggggcgactgtgaaacaaacggtggtgtccaggcatgtgctgttgcaagggggtacgagtgacatttccatcaatgccaaggaaaatcaaagaacacctgcgacccggggtttggtggggcctgtgcctgacccaagccacgttttcaaatgcctgccagaggagcaaagaggtttctgcaaaattcatcccacccctatcctccaccgcccttgtcgccctgatgcaacttcccctgcacccagctccaaccccagcccaagccctagtcgagtccctttggttccctgacattggtttcagccagaagttcaagggagtcaatccacccaggaggagaggagaggatgtccctgaagaatgagacaggaagtgcagaggaaatgcgtcaccacctgtcctataagacaaggccggtcac

SEQ ID NO: 30705 - DNA, 1626 bp, Artificial sequence
  DNA replication origin
ccccagggccccacaggagatggaagggcctctggcctgcacctttgatgccccacaccttcacagcatagcaaccatccagaaccagagaagagcagaacaagatggagtgtcagagaaaaatgaccgctgacaattattgagtgcctattgcatgccagacactatagtaggcattttacatacatcatctcacataatcctcacaattccacaaggttggaactattgttgttactattccagagaagtagttaatgtggtaattctcccactgtcacaaaggaattcaggccctcagcctgtactcccagccaccacctgcagagccttcccaacgccaaccttggagccagttgtgaatagctgggggggtggatgaatgaatgggtagatggatggatggatggatggatggatggaaggatggatggatgatggataggtgggtggaaaaatgaatgcagggatgaatgggtaggtggatggataaatggatgagtgggtatatggatgaatgaatacatgggtgggtggatggatggatgggtgaatgagtggttgggtgtgagggtggatggctgtatggaggaaggatggatgagtggatgaatgggtgaatggatgagtggatgaatggataataggatggaaagatggatggatggatggatggatgaatggatggatggatggatggttggatagatggatggataagtgtgaaagtagatgattggatggatggatgaacagaagggtagatgggtgggtgactgagcggatgggtagatgaatgaatggagggatagatgggtgaatgggtggatggatggatggatgggtggatggatgggtaatgggtgggtggatggatggatagacgaatgggatggatggatgggcagatgattgggtggatggatgggtgagtgaatgagtggatgggtgagtgaagaagtgaatggatagagggatggctgggtggatgggtgggtatatggttgagtgggtggatgaacagattaatggatgaatgggtgacgggtgcatggatggatggatggatggaatgttgggtgatggatgggtggagtgaatgagtggatgagtggatgggtggatagatggacaggtggatgagtgtatgggtgggtaaagaaatgaatggatagagggatggaagggtggatggatggacagatgggtgaatggatgggtgggtggatgggtgggtagatggatagatggatgggtggatgggtggatggatgggtgggtagatggatagatggatgggtggatgagtgtgagggtgggtgatgagtgggtagatggatggatagggtgtttgggcaagtaggatagatgactagatggatgagcaggtgggcacatggctaactacatggatgggcacacatcagtaatttgccagagatttgccttgggtacacatacatcctacatggtccctgcaatcccaaagatgcaatttccccacctgtcaaagggatccccctgccttcctatccagtgtgccgtgagaatcagagaagaggttggtgggaaggggctctgaggatctccacggtgagccacctgacatgcttctcacctccgcac

SEQ ID NO: 30706 - DNA, 1042 bp, Artificial sequence
  DNA replication origin
agcagggtggcccacccctccctggagggcttgagaggcctgcagaaggctgtgtgcagcgcctggttcacagtggtgccatccccccaggatgttctcttggggcctcagtgtcttcgtaactgagtaatgtggctgcaggtgtgctaagggagaaggctttgtctagctctgaggttatggtgtgactggactgggactgggggtgctgggtccctgtgggcggggaggggtgggcctgtccagctcctccgtcggggctaatgctggaaggcccaggtctccctgcttccagcctagcccagccaaggcaggctgccatccagatgtggctgtgggccaggcggtgccatagcccctagcttgcagatgccctagcctgtcactgacaggccggtgtggggcctttagtgggggcagcacagcctgtgtgtcccgggggtgggcacatcagtggctgagagcaggctttgttctggctggcatggatgccctgctgcggggcctgtcttggggtgcctgaatgtgcagtaggctggcctggagccaggtgctgcctgcagtgagctgagggtggtgctgggaacaggtgacacccctgagcactgcccaggtgccagggtagcagccttgcaatcttccttagagatgcgggaagcaggggctggggagggccctcggctgaggtcagccagggagcagcccatgtctgggtgccagatcttaccctctttggcactgctggtgaccaagaagctgcaagcatggcatgtgggtgtcaggagggtggtgggacccagcttggggtgttcaaagtgggtggcgacaggggtggcaggccgcattctaggccctgggaaggacaacaagaagcaaaagagaaaacgtctcacgcctgtaatcccagcacttcaggaggccgaggcaggtggatcacctgaggtcaagagtttgagaccagcctggccaacatggtgaaaccccgtctctacttaaaatacaaaagttagctggatgtggtggcgggcacctataatcccag

SEQ ID NO: 30707 - DNA, 1281 bp, Artificial sequence
  DNA replication origin
gtgacacccctgagcactgcccaggtgccagggtagcagccttgcaatcttccttagagatgcgggaagcaggggctggggagggccctcggctgaggtcagccagggagcagcccatgtctgggtgccagatcttaccctctttggcactgctggtgaccaagaagctgcaagcatggcatgtgggtgtcaggagggtggtgggacccagcttggggtgttcaaagtgggtggcgacaggggtggcaggccgcattctaggccctgggaaggacaacaagaagcaaaagagaaaacgtctcacgcctgtaatcccagcacttcaggaggccgaggcaggtggatcacctgaggtcaagagtttgagaccagcctggccaacatggtgaaaccccgtctctacttaaaatacaaaagttagctggatgtggtggcgggcacctataatcccagctgctcaggaagctgaggcaggagaatcgcttgaacctaggaggcggagatggcagtgagctgaaattgcgccattgcattccagcctaggtgatgagaggaagattctgtctaaaaaagaaaaaaaaaagaaaaaagaaaagaaaaaaaaagaaaatgtgctacccttagggagtggtggtctcagggtggggttgatggttgagtgcccccagctacgttattgttattgctgccgccattgtgcccttagaaagggcagtgctgtggatatagcagggatgggacatgggtcttcctggggcacaaggaggcctctggtgccaaggtggcgaggcagtggcaggatgtcttgcgggagggtgtccagggtgggtttgagggacagcctggtgccaggggctgtggctggatggggagtccgctggaggaggctgggaggtgaagtccgaggggtcaggagcttccctgtgcaggttctgcatgtcctggggggcctctgacattgagcaagggagggataggcaccgactcagcttccacaggccctctgtggctgccatggagactggggggccatcggcagaggcagagaggctggcaagttgtgccccgaactggctgggcaggcactgttagattcaggccttgagggtgggagaaggggtcggatcctaaatagactcttcagagccctcagtgtgggagtgaggtgtggagctgaggtttttggctggagctgctgggggcccgaagggggtggccactcgcactgggaaggcggagtggggagctggcttaggcaagaccagagcatgattgtgggtc

SEQ ID NO: 30708 - DNA, 1727 bp, Artificial sequence
  DNA replication origin
gcatccagccaggcttgcggcgtccagccaggcctgcgagccgcgaggggcgcggtgggctgcggggcgctgggtaacttcaggggcgcgcacggtaaatctctaggcgttgggtctgctgctgtctgcaggctgcagagtccccggaagccccgagggccgggccagggggtgcacacgggcaggacagccgcagaggccgagaactgggctgacgcgtggcaagcccgcggcctccagctgcgccgaggacgcacgaggacgcggacgggcgctcggggccgggcggggctccaggacacgcggttgaagccgagctctaccgccccctggcggctacaggagacagagcctggggccgcgccccggcaagggattcattccctccctccccccttccctccctccctcattcattctttcatgtgttcattcagcagaagccgagcgctccctcggtgtcggcagcattctcagcgctgacgacacaacagtgacaagtcaggtctcggccaggataacccaggataataagctagattggctgggcctagtgggcggaggctatttgagccagagtggtcctggaagacctcgctgaggaggtgacatgggagaccgggatggggttggggggagccagccacaggaagacgggggagggggtgttctacgcagaggagacagccagtgcaaaggccctggggtgaaaacaagtcttcatgattgaaagatggagagagggagacaacagctcccaggaactgttcgcccctgtgccagggaagggttagtgggcagagacctgtcccagactggggctggaggacaggaggagtgcagagacagaccccatggggaccctcctcctgggaacacaccctaagcttcctcagaggaccacagagaccctgctctcagaccttgagctgtagtgggcggagtcccctcatgcctgacctgacctgagctgtcacacccaccctcctggcctggggatgaattcgactccttcccagctggtaagagccagtcctgggacttcaggagtaccctgggcacggtgtgccgagctcttggagtccctgggtcctgactggtccccatgagggggtgaacctgagacggatgaacagccaaggtggatgcaagtccttcaggccatcagctgaacttcaaacccaacggtacctgaagctgagcacacccggcttacgtgagcaaattccctgctgccccagccatgctgccagcatcacagggccagactgcagggcgccttcatcaggctgcccctactcccctcggagccttctccggagcccaccacctgtccccaagtctgtttttctgtcttataagctgtgtggctttgggtaagtgatgtcagctctctgggtctgttttcctatctgtaaagtggaggtcacgtaacctccatgaggtcaccgtgtccagcccaggcaaagtgtgcagggtgcttgctactctgtgcacctggctgtcatcactactccaggacagtgggatgggtggccgccaccagcagactggatctgtgtgttcgctgctctgtccagtgtcagtacagggcctgatgcctggatgatcacaggatgttacctcatcacagccctctgggggcctctgtgtcctcagatgtagaagggcctggtgggtcagcagtcctccctcccctgagcatgacaccctgcccctggcccaga

SEQ ID NO: 30709 - DNA, 872 bp, Artificial sequence
  DNA replication origin
aaacgcgacggcggggcagaaaaaagccgcggcggcggggagaaaaaagccgcggcggcgggggggaaaaagccgcggcggcggggcgaaaagccgcaaaaagccggggcggcgggggcaaaaagccggggcggcaaaaagcctcggcggcgggggcaaaaagccgcggcggcgggtcaaaaagccgcagcggcaaaaagctgtggcgacgggggcagaaagtcgcggcggtgggggcagaaagctgcggccgcaggggaaaaagccgtggcggcgggggcaaaaagcaggggcgacaaaaagacgtggcggcgggggcaaacagccgcggtggcaaaaacccgcggtggcggaggcaaaaaggagcggcgacgggggcaaaaagccataaaaagccgcgacgtcgggggcaacaagctgcggcggcaggggagaaagccggggcgacgggggcaacaagccgcggcggcaacaagctgcagcggcaaaaacccgcggcggcaaaaacccgcggcggtgggggcaaacagccgcggtggcaaaaagccacaaaaacccgctgcggccgggacaaaatagtggaaatggggtagaaggctagcacagcttggcattcctggagtgtgatgtggaaggaaaagtgcagcggaagacaaagatgtaagtaggcttgactcagtgcagctaaaaacccagatgttatcttgatgttagtctatcagctaattttttgtattttagtagagaaggggttttaccacgttggccaggatggtctcgatctcctgacctcatgatccacgcacctcagcctccaaaagtgatgggattagaggcatgagccacaaagtgctcaaaaaatctattaatta

SEQ ID NO: 30710 - DNA, 1818 bp, Artificial sequence
  DNA replication origin
atcctccagcaggcggaaggttgcggcctcttccagtcctctaagctggacacagagttgctcctccgctcgacacagaagagcctgaaacgacctgacaccacctcagcatgctttatatatgaggttatgcaaacgcagttcctggactacatgttctgattggatgagaaaaaaaacctctaggcctactctgattggactttattttcatgctgtgattggttgtgttaagacttgctctcatccaatcagaacatgatcattcccattcctgacacctccacccacagtgccctgtctcccacttcccccgcagtatataaatgatgctgaagcggcaacacgttttttcaagttcctgtatcttcatgtcgagttgctagctgcccaacgtagaggactaggaatcaggagtcggtggccgtatgctggaggctggagccgcgggagtgcagctcgcctcgctgcggttgttggcagtgagggagagagagtagcgcggctggagcgggtaggcgaaggaaaacagttttgggatagatagaggggagtaaagagggtagttagggccaaagggaaaaaaggatagcttagccggagaaggcattgcaaaaagatggcagcgaaaagatggtggggaaaaaagtttttgggtagatggaggtgtaaaaaacagggtggggagcgggagggaaggaaggttttgcagaaagacggtaggtaaaaagtttaagggtagatggagggggaaaagagggtggcaggtgggcggaggaaagagagggaggtgatgggggaaaacggggcgagcagtaggcagagaaggttttgtgaaaagatagtggggagaacatacagtgaggggggaaagtttttgggttgagcaaaagagggtagcaagtgggagaaggaaaaagagggtagccagcaggaggaagacaaggttttgtgaaaagacagtggcagaaaagaaagacggtgaagaaagaaaagacgggggtgaaaagtgttttgatagatggaggggggaaagaggataatgaggaggaaagagggtggcgacaggtagcagggatgggggttgggaaaacaacggaaaaatagtttggggtagagggaggggaaaaagggtggcaagcaggataggggaaaaaagcactagtggtaaaggggggagactttgaaaagatggtggggaaagttttggggtgtagatggagggggaaagagggaggtgaatagccgtggggagaaggctttgtgaaaagacggagggaaatgtttttgggtagatggagaagcgaaagagaatggcaaggaggaacggggaaagacgatgaagaaaacagtttttggttggatgaagcagggaaagagggtagtgagcagcaggagtggagagaaggttttgggaaaagacgggggaaaatgtttttgcttagataaaggagcaaaagagggtgatgagagcgggacggggaaaaagagggtggccaggggtaaggggaaaagagggtgggaagaaactggggaaagggtttgggtagatggatggggaaaagggtgttgagcaggagagtagaggcggctttgtgaaatgagggtgggcaaaaaatgatgaagaagtttgggggcagatggtgaaagaaaaagggtggtgagagggagggggccaaaggccgtttggaaaagaaggtagggaaataatggtgggggacaaaggtttggggtagtttttttgataagatcatttgtatgtttgcttttcagtagtttgagttctttatgtattttgtgtatgaaccccttgcctga

SEQ ID NO: 30711 - DNA, 1824 bp, Artificial sequence
  DNA replication origin
cctcggctgagagaacagccctcgggcacgcaggcggacctgtcctcgagatcacgggggcacgacttctcgggagactcacccgaacaccgtcctggcaggcctgaggctgggacgccacgctgcttcccccggactccgcctgtggtttcctcatcctgctcggccccttgcgactcctggcagccggagacgttcctgtggaccccgtggagaggtcaggccggagcctcggaggcccgacacccaagcgctgccacggagggctcccgcgttgccaagcctcggggactggttcctaagacaaccgtgggaagcactgtgaagcaaaaagcggcgcgcgcctcgcgcatgcgctttggctgggccgactcgcgcttggctgctggcagtcaggcaggctgcgtcccctttaaatacgggcggctgcgcggcggcagggggcgcgcctgctgcagccgcggctgcggctggatccggggtccagtttggggccgcgtgggagagggggccacgggtgtcccagggccgagcccccaggagtcccgtcttcaggacctccttgagccgacttccaccgatggacggggagcttcagggcgcctgctgggttctcaggactcctcttcagatgcgattttggaccactctgggcgagaaaggatgggctcaccacatctgctgaggcaggcagggcctcgctgcagcacagaatgatcccatggccctcaaggcctgctgtcagcggaaaattcactgatccgtgagccctctgcctccctcctcctttgaaagagcagtggcctggcccgcttctaaaagccctggggctcctgcgagccgacaccgctttccaggacacgtgcagacagggacggggcgaatcccaggtggagacaatgcgatcacgcctggcactggcgtataccagagcagatggcgtgaatgtatgtcaacggaggcatgtggggcgagggcgaaagcaacagtggtgcccaggcatgcgcccggtagaaaggggatcaagtcgcctttccctgagtgccaagggaacacaaagaagacctgggaacctggacggggcttgtgcctcagccaagccacatgttgaaatgcctgccagaggaccacagaggtttctgcaacagtcaccccacccccaaccctccaccacccagctagccctgacgcaacctcccctgcacgcagccccagccccagtcccagcgcagtccctttgtttcctgacattcgttacagccaaacgatccagggagtctgtccacctgtgagcggaggagaggatgtccctcaagagtgagacaggaagcgcaggggaaatgcacttgtcctagaagacaaggccagtctcgccggcctagcgctcgctcatcctaggcaatccacccacccatgaggtgaaacacggagaccgaggaagcttccctgtctgagacacgtatggaagccaagagccccagggtcatcagacctgcgcaatccagcagaaacaggcttggagagagaaacagtcatgacacggatctccaggaagtgtctccctgatggacggggaagtgatcttcgtagaagatattcagccagaccgagaggcatctaggccgctcagaaacaggggagacagagcaagagggacgacagagcagaggccatagcccaggcaggatacagcgccgtgccaccgccacgggcataagaggaggggtgcgaagcgggtggcttgtccagagaggccggcgttccagggacggggattgttgccatctcccattcccggcttcctcttcaagactgtcgtttcct

SEQ ID NO: 30712 - DNA, 2479 bp, Artificial sequence
  DNA replication origin
ggcacgacttctcgggagactcacccgaacaccgtcctgacagccctgaggctgggatgccacgctgcttcccccggactccgcctgtggtttcctcatcctgctcggccccttgtgactcctggcagccggagacgttcctgtggaccccgtggagaggtcaggccggagcctcggaggcccgacacccaagcgctgccacggagggctcccgcgttgccaagcctcggggactggttcctaagacaaccgtgggaagcactgtgaagcaaaaagcggcgcgcgcctcgcgcatgcgctttggctgggccgactcgcgcttggctcctggcagtcaggcaggctgcgtcccctttaaatacgggcggctgcgcggcggcagggggcgcgcctgctgcagccgcggctgcggctggatccggggtccagtttggggccgcgtgggagagggggccacgggtgtcccagggccgagcccccaggagttccgtcttcaggacctccttgagccgacttccaccgatggacggggagcttcagggcgcctgctgggttctcaggactcctcttcagatgcgattttggaccactctgggcgagaaaggatgggctcaccacatctgctgaggcaggcagggcctcgctgcagcacagaatgatcccatggccctcaaggcctggtgtcagcggaaaattcactgatccgtgagccctctgcctccctcctcctttgaaagagcagtggcctggcccgcttctaaaagccctggggctcctgcaagccgacaccgctttccaggacacgtgcagacagggacggggcgaatcccaggtggagacaatgcgatcacgcctggcactggcgtataccagagcagatggcgtgaatgtatgtcaccggaggcatgtggggcgagggcgaaagcaacagtggtgcccaggcatgcgcccggtagaaaggggatcaagtggcctttccctgagtgccaagggaacacaaagaagacctgggaacctggacggggcttgtgcctcagccaagccacatgttgaaatgcctgccagaggaccacagaggtttctgcaacagtcaccccacccccaaccctccaccacccagctagccctgacgcaacctcccctgcacgcagccccagccccagtcccagcgcagtccctttgtttcctgacattcgttacagccaaaagatccagggagtctgtccacctgtgagcggaggagaggatgtccctcaagagtgagacaggaagcgcaggggaaatgcacttgtcctagaagacaaggccagtctcgccggcctagcgctcgctcatcctaggcaatccacccacccatgaggtgaaacacggagaccgaggaagcttccctgtctgagacacgtatggaagccaagagccccagggtcatcagacctgcgcaatccagcagaaacaggcttggagagagaaacagtcatgacacggatctccaggaagtgtctccctgatggacggggaagtgatcttcgtagaagatattcagccagaccgagaggcatctaggccgctcagaaacaggggagacagagcaagagggacgacagagcagaggccatagcccaggcaggatacagcgccgtgccaccgccacgggcataagaggaggggtgcgaagcgggtggcttgtccagagaggccagcgttccagggacggggcttgttgccgtctcccattccaggcttcctcttcaagactgtgtggtggtgtggcttcatttcgcagagaaggggcgtggaaaggtaaaaccatcttcttggacgtgggtctgctcctctcctgccggacaatgtgctaccgtggggcttttgtcctgggctgcagtgtggtcctctcgatcctagaaaagaggccgctcaggatggggatgagacttccattgctccgggcccgatgcatcccctcacgttatcgaggcctgcacagacccaaagtggaaccgccgcgaagacgatggacagctggccgcaggacccagggagagacgcagaaagaggctcaccaaaaccggtccacataaaagacatccctttttgacgcacagggcacattcgtccaaagacacacacacacacacacaaacacacacacacacacacacacagagggaaagaagcacacagagggtgagagacagagagagaagggagaatgggagacacagccccacacacagtcctaccgcggtggccgagcaatacacgcccccaggcaacccctgcggctgccgggttctgctctggaggggaacaaccctcggctgagagaacagccctcgggcacgcaggcggacctgtcctcgagatcacgggggcacgacttctcgggagactcacccgaacaccgtcctggcaggcctgaggctgggacgccacgctgcttcccccggactccgcctgtggtttcctcatcctgctcggc

SEQ ID NO: 30713 - DNA, 2522 bp, Artificial sequence
  DNA replication origin
aggcggacctgtcctcgagatcacgggggcacgacttctcgggagactcacccgaacaccgtcctggcaggcctgaggctgggatgccacgctgcttcccccggactccgcctgtggtttcctcatcctgctcggccctttgtgactcctggcagccggagacgttcctgtggaccccgtggagaggtcaggccggagcctcggaggcccgacacccaagcgctgccacggagggctcccgcgttgccaagcctcggggactggttcctaagacaaccgtgggaagcactgtgaagcaaaaagcggcgcgcgcctcgcgcatgcgctttggctgggccgactcgcgcttggctcctggcagtcaggcaggctgcgtcccctttaaatacgggcggctgcgcggcggcagggggcgcgcctgctgcagccgcggctgcggctggatccggggtccagtttggggccgcgtgggagagggggccacgggtgtcccagggccgagcccccaggagtcccgtcttcaggacctccttgagccgacttccaccgatggacggggagcttcagggcgcctgctgggttctcaggactcctcttcagatgcgattttggaccactctgggcgagaaaggatgggctcaccacatctgctgaggcaggcagggcctcgctgcagcacagaatgatcccatggccctcaaggcctgctgtcagcggaaaattcactgatccgtgagccctctgcctccctcctcctttgaaagagcggtggcctggcccgcttctaaaagccctggggctcctgcaagccgacaccgctttccaggacacgtgcagacagggacggggcgaatcccaggtggagacaatgcgatcacgcctggcactggcgtataccagagcagatggcgtgaatgtatgtcaccggaggcatgtggggcgagggcgaaagcaacagtggtgcccaggcatgcgcccggtagaaaggggatcaagtggcctttccctgagtgccaagggaacacaaagaagacctgggaacctggacggggcttgtgcctcagccaagccacatgttgaaatgcctgccagaggaccacagaggtttctgcaacagtcaccccacccccaaccctccaccacccagctagccctgacgcaacctcccctgcacgcagccccagccccagtcccagcgcagtccctttgtttcctgacattcgttacagccaaaagatccagggagtctgtccacctgtgagcggaggagaggatgtccctcaagagtgagacaggaagcgcaggggaaatgcacttgtcctagaagacaaggccagtctcgccggcctagcgctcgctcatcctaggcaatccacccacccatgaggtgaaacacggagaccgaggaagcttccctgtctgagacacgtatggaagccaagagccccagggtcatcagacctgcgcaatccagcagaaacaggcttggagagagaaacagtcatgacacggatctccaggaagtgtctccctgatggacggggaagtgatcttcgtagaagatattcagccagaccgagaggcatctaggccgctcagaaacaggggagacagagcaagagggacgacagagcagaggccatagcccaggcaggatacagcgccgtgccaccgccacgggcataagaggaggggtgcgaagcgggtggcttgtccagagaggccagcgttccagggacggggcttgttgccgtctcccattccaggcttcctcttcaagactgtgtggtggtgtggcttcatttcgcagagaaggggcgtggaaaggtaaaaccatcttcttggacgtgggtctgctcctctcctgccggacaatgtgctaccgtggggcttttgtcctgggctgcagtgtggtcctctcgatcctagaaaagaggccgctcaggatggggatgagacttccattgctccgggcccgatgcatcccctcacgttatcgaggcctgcacagacccaaagtggaaccgccgcgaagacgatggacagctggccgcaggacccagggagagacgcagaaagaggctcaccaaaaccggtccacataaaagacatccctttttgacgcacagggcacattcgtccaaagacacacacacacacacacaaacacacacacacacacacacacagagggaaagaagcacacagagggtgagagacagagagagaagggagaatgggagacacagccccacacacagtcctaccgcggtggccgagcaatacacgcccccaggcaacccctgcggctgccgggttctgctctggaggggaacaaccctcggctgagagaacagccctcgggcacgcaggcggacctgtcctcgagatcacgggggcacgacttctcgggagactcacccgaacaccgtcctgacagccctgaggctgggatgccacgctgcttcccccggactccgcctgtggtttcctcatcctgctcggccccttgtgactcctgg

SEQ ID NO: 30714 - DNA, 2514 bp, Artificial sequence
  DNA replication origin
tttctcgcccagagtggtccaaaatcgcatctgaagaggagtcctgagaacccagcaggcgccctgaagctccccgtccatcggtggaagtcggctcaaggaggtcctgaagacgggactcctgggggctcggccctgggacacccgtggccccctctcccacgcggccccaaactggaccccggatccagccgcagccgcggctgcagcaggcgcgccccctgccgccgcgcagccgcccgtatttaaaggggacgcagcctgcctgactgccaggagccaagcgcgagtcggcccagccaaagcgcatgcgcgaggcgcgcgccgctttttgcttcacagtgcttcccacggttgtcttaggaaccagtccccgaggcttggcaacgcgggagccctccgtggcagcgcttgggtgtcgggcctccgaggctccggcctgacctctccacggggtccacaggaacgtctccggctgccaggagtcacaaagggccgagcaggatgaggaaaccacaggcggagtccgggggaagcagcgtggcatcccagcctcaggcctgccaggacggtgttcgggtgagtctcccgagaagtcgtgcccccgtgatctcgaggacaggtccgcctgcgtgcccgagggctgttctctcagccgagggttgttcccctccagagcagaacccggcagccgcaggggttgcctgggggcgtgtattgctcggccaccgcggtaggactgtgtgtggggctgtgtctcccattctcccttctctctctgtctctcaccctctgtgtgcttctttccctctgtgtgtgtgtgtgtgtgtgtgtgtgtttgtgtgtgtgtgtgtgtgtctttggacgaatgtgccctgtgcgtcaaaaagggatgtcttttatgtggaccggtctttggtgagcctctttctgcgtctctccctgggtcctgcggccagctgtccatcgtcttcgcggcggttccactttgggtctgtgcaggcctcgataacgtgaggggatgcatcgggcccggagcaatggaagtctcatccccatcctgagcggcctcttttctaggatcgagaggaccacactgcagcccaggacaaaagccccacggtagcacattgtccggcaggagaggagcagacccacgtccaagaagatggttttacctttccacgccccttctctgcgaaatgaagccacaccaccacacagtcttgaagaggaagcctggaatgggagacggcaacaagccccgtccctggaacgctggcctctctggacaagccacccgcttcgcacccctcctcttatgcccgtggcggtggcacggcgctgtatcctgcctgggctatggcctctgctctgtcgtccctcttgctctgtctcccctgtttctgagcggcctagatgcctctcggtctggctgaatatcttctacgaagatcacttccccgtccatcagggagacacttcctggagatccgtgtcatgactgtttctctctccaagcccgtttctgctggattgcgcaggtctgatgaccctggggctcttggcttccatacgtgtctcagacagggaagcttcctcggtctccgtgtttcacctcatgggtgggtggattgcctaggatgagcgagcgctaggccggcgagactggccttgtcttctaggacaagtgcatttcccctgcgcttcctgtctcactcttgagggacatcctctcctccgctcacaggtggacagactccctggatcttttggctgtaacgaatgtcaggaaacaaagggactgagctgggactggggctggggctgcgtgcaggggaggttgcgtcagggctagctgggtggtggagggttgggggtggggtgactgttgcagaaacctctgtggtcctctggcaggcatttcaacatgtggcttggctgaggcacaagccccgtccaggttcccaggtcttctttgtgttcccttggcactcagggaaaggccacttgatcccctttctaccgggcgcatgcctgggcaccactgttgctttcgccctcgccccacatgcctccggtgacatacattcacgccatctgctctggtatacgccagtgccaggcgtgatcgcattgtctccacctgggattcgccccgtccctgtctgcacgtgtcctggaaagcggtgtcggcttgcaggagccccagggcttttagaagcgggccaggccaccgctctttcaaaggaggagggaggcagagggctcacggatcagtgaattttccgctgacagcaggccttgagggccatgggatcattctgtgctgcagcgaggccctgcctgcctcagcagatgtggtgagcccatcctttctcgcccagagtggtccaaaatcgcatctgaagaggagtcctgagaacccagcaggcgccctgaagctccccgtccatcggtggaagtcggctcaaggaggtcctgaagacgggactcctgggggctcggccctgg

SEQ ID NO: 30715 - DNA, 2458 bp, Artificial sequence
  DNA replication origin
ggtgagcccatcctttctcgcccagagtggtccaaaatcgcatctgaagaggagtcctgagaacccagcaggcgccctgaagctccccgtccatcggtggaagtcggctcaaggaggtcctgaagacgggactcctgggggctcggccctgggacacccgtggccccctctcccacgcggccccaaactggaccccggatccagcggcagccgcggctgcagcaggcgcgccccctgccgccgcgcagccgcccgtatttaaaggggacgcagcctgcctgactgccaggagccaagcgcgagtcggcccagccaaagcgcatgcgcgaggcgcgcgccgctttttgcttcacagtgcttcccacggttgtcttaggaaccagtccccgaggcttggcaacgcgggagccctccgtggcagcgcttgggtgtcgggcctccgaggctccggcctgacctctccacggggtccacaggaacgtctccggctgccaggagtcgcaaggggccgagcaggatgaggaaaccacaggcggagtccgggggaagcagcgtggcatcccagcctcagggctgtcaggacggtgttcgggtgagtctcccgagaagtcgtgcccccgtgatctcgaggacaggtccgcctgcgtgcccgagggctgttctctcagccgagggttgttcccctccagagcagaacccggcagccgcaggggttgcctgggggcgtgtatttctcggccaccgcggtaggactgtgtgtggggctgtgtctcccattctcccttctctctctgtctctcaccctctgtgtgcttctttccctctgtgtgtgtgtgtgtgtgtctttggacgaatgtgccctgtgcgtcaaaaagggatgtcttttatgtggaccggtctttggtgagcctctttctgcgtctctccctgggtcctgcggccagctgtccatcgtcttcgcggcggttccactttgggtctgtgcaggcctcgataacgtgaggggatgcatcgggcccggagcaatggaagtctcatccccatcctgagcggcctcttttctaggatcgagaggaccacactgcagcccaggacaaaagccccacggtagcacattgtccggcaggagaggagcagacccacgtccaagaagatggttttacctttccacgccccttctctgcgaaatgaagccacaccaccacacagtcttgaagaggaagcctggaatgggagacggcaacaagccccgtccctggaacgctggcctctctggacaagccacccgcttcgcacccctcctcttatgcccgtggcggtggcacggcgctgtatcctgcctgggctatggcctctgctctgtcgtccctcttgctctgtctcccctgtttctgagcggcctagatgcctctcggtctggctgaatatcttctacgaagatcacttccccgtccatcagggagacacttcctggagatccgtgtcatgactgtttctctctccaagcctgtttctgctggattgcgcaggtctgatgaccctggggctcttggcttccatacgtgtctcagacagggaagcttcctcggtctccgtgtttcacctcatgggtgggtggattgcctaggatgagcgagcgctaggccggcgagactggccttgtcttctaggacaagtgcatttcccctgcgcttcctgtctcactcttgagggacatcctctcctccgctcacaggtggacagactccctggatcttttggctgtaacgaatgtcaggaaacaaagggactgcgctgggactggggctggggctgcgtgcaggggaggttgcgtcagggctagctgggtggtggagggttgggggtggggtgactgttgcagaaacctctgtggtcctctggcaggcatttcaacatgtggcttggctgaggcacaagccccgtccaggttcccaggtcttctttgtgttcccttggcactcagggaaaggccacttgatcccctttctaccgggcgcatgcctgggcaccactgttgctttcgccctcgccccacatgcctccggtgacatacattcacgccatctgctctggtatacgccagtgccaggcgtgatcgcattgtctccacctgggattcgccccgtccctgtctgcacgtgtcctggaaagcggtgtcggcttgcaggagccccagggcttttagaagcgggccaggccaccgctctttcaaaggaggagggaggcagagggctcacggatcagtgaattttccgctgacagcaggccttgagggccatgggatcattctgtgctgcagcgaggccctgcctgcctcagcagatgtggtgagcccatcctttctcgcccagagtggtccaaaatcgcatctgaagaggagtcctgagaacccagcaggcgccctgaagctccccgtccatcggtggaagtcggctca

SEQ ID NO: 30716 - DNA, 2510 bp, Artificial sequence
  DNA replication origin
tcctttctcgcccagagtggtccaaaatcgcatctgaagaggagtcctgagaacccagcaggcgccctgaagctccccgtccatcggtggaagtcggctcaaggaggtcctgaagacggaactcctgggggctcggccctgggacacccgtggccccctctcccacgcggccccaaactggaccccggatccagccgcagccgcggctgcagcaggcgcgccccctgccgccgcgcagccgcccgtatttaaaggggacgcagcctgcctgactgccaggagccaagcgcgagtcggcccagccaaagcgcatgcgcgaggcgcgcgccgctttttgcttcacagtgcttcccacggttgtcttaggaaccagtccccgaggcttggcaacgcgggagccctccgtggcagcgcttgggtgtcgggcctccgaggctccggcctgacctctccacggggtccacaggaacgtctccggctgccaggagtcacaaggggccgagcaggatgaggaaaccacaggcggagtccgggggaagcagcgtggcatcccagcctcagggctgtcaggacggtgttcgggtgagtctcccgagaagtcgtgcccccgtgatctcgaggacaggtccgcctgcgtgcccgagggctgttctctcagccgagggttgttcccctccagagcagaacccggcagccgcaggggttgcctgggggcgtgtattgctcggccaccgcggtaggactgtgtgtggggctgtgtctcccattctcccttctctctctgtctctcaccctctgtgtgcttctttccctctgtgtgtgtgtgtgtgtgtgtgtgtgtttgtgtgtgtgtgtgtgtgtctttggacgaatgtgccctgtgcgtcaaaaagggatgtcttttatgtggaccggtctttggtgagcctctttctgcgtctctccctgggtcctgcggccagctgtccatcgtcttcgcggcggttccactttgggtctgtgcaggcctcgataacgtgaggggatgcatcgggcccggagcaatggaagtctcatccccatcctgagcggcctcttttctaggatcgagaggaccacactgcagcccaggacaaaagccccacggtagcacattgtccggcaggagaggagcagacccacgtccaagaagatggttttacctttccacgccccttctctgcgaaatgaagccacaccaccacacagtcttgaagaggaagcctggaatgggagacggcaacaagccccgtccctggaacgctggcctctctggacaagccacccgcttcgcacccctcctcttatgcccgtggcggtggcacggcgctgtatcctgcctgggctatggcctctgctctgtcgtccctcttgctctgtctcccctgtttctgagcggcctagatgcctctcggtctggctgaatatcttctacgaagatcacgtccccgtccatcagggagacacttcctggagatccgtgtcatgactgtttctctctccaagcctgtttctgctggattgcgcaggtctgatgaccctggggctcttggcttccatacgtgtctcagacagggaagcttcctcggtctccgtgtttcacctcatgggtgggtggattgcctaggatgagcgagcgctaggccggcgagactggccttgtcttctaggacaagtgcatttcccctgcgcttcctgtctcactcttgagggacatcctctcctccgctcacaggtggacagactccctggatcttttggctgtaacgaatgtcaggaaacaaagggactgcgctgggactggggctggggctgcgtgcaggggaggttgcctcagggctagctgggtggtggagggttgggggtggggtgactgttgcagaaacctctgtggtcctctggcaggcatttcaacatgtggcttggctgaggcacaagccccgtccaggttcccaggtcttctttgtgttcccttggcactcagggaaaggccacttgatcccctttctaccgggcgcatgcctgggcaccactgttgctttcgccctcgccccacatgcctccggtgacatacattcacgccatctgctctggtatacgccagtgccaggcgtgatcgcattgtctccacctgggattcgccccgtccctgtctgcacgtgtcctggaaagcggtgtcggcttgcaggagccccagggcttttagaagcgggccaggccaccgctctttcaaaggaggagggaggcagagggctcacggatcagtgaattttccgctgacagcaggccttgagggccatgggatcattctgtgctgcagcgaggccctgcctgcctcagcagatgtggtgagcccatcctttctcgcccagagtggtccaaaatcgcatctgaagaggagtcctgagaacccagcaggcgccctgaagctccccgtccatcggtggaagtcggctcaaggaggtcctgaagacgggactcctgggggctcg

SEQ ID NO: 30717 - DNA, 3914 bp, Artificial sequence
  DNA replication origin
ctcgcccagagtggtccaaaatcgcatctgaagaggagtcctgagaacccagcaggcgccctgaagctccccgtccatcggtggaagtcggctcaaggaggtcctgaagacgggactcctgggggctcggccctgggacacccgtggccccctctcccacgcggccccaaactggacccgggatccagccgcagccgcggctgcagcaggcgcgccccctgccgccgcgcagccgcccgtatttaaaggggacgcagcctgcctgactgccaggagccaagcgcgagtcggcccagccaaagcgcatgcgcgaggcgcgcgccgctttttgcttcacagtgcttcccacggttgtcttaggaaccagtccccgaggcttggcaacgcgggagccctccgtggcggcgcctgggtgtcgggcctccgaggctccggcctgacctctccacggggtccacaggaacgtctccggctgccaggagtcacaaggggccgagcaggatgaggaaaccacaggcggagtccgggggaagcagcgtggcatcccagcctcaggcctgccaggacggtgttcgggtgagtctcccgagaagtcgtgcccccgtgatctcgaggacaggtccgcctgcgtgcccgagggctgttctctcagccgagggttgttcccctccagagcagaacccggcagccgcaggggttgcctgggggcgtgcattgctcggccaccgcggtaggactgtgtgtggggctgtgtctcccattctcccttctctctctgtctctcaccctctgtgtgcttctttccctctgtgtgtgtgtgtgtgtgtgtgtgtctttggacgaatgtgccctgtgcgtcaaaaagggatgtcttttatgtggaccggtctttggtgagcctctttctgcgtctctccctgggtcctgcggccagctgtccatcgtcttcgcggcggttccactttgggtctgtgcaggcctcgataacgtgaggggatgcatcgggcccggagcagtggaagtctcatccccatcctgagcggcctcttttctaggatcgagaggaccacactgcagcccaggacaaaagccccacggtagcacattgtccggcaggagaggagcagacccacgtccaagaagatggttttacctttccacgccccttctctgcgaaatgaagccacaccaccacacagtcttgaagaggaagcctggaatgggagacggcaacaagccccgtccctggaacgctggcctctctggacaagccacccgcttcgcacccctcctcttatgcccgtggcggtggcacggcgctgtatcctgcctgggctatggcctctgctctgtcgtccctcttgctctgtctcccctgtttctgagcggcctagatgcctctcggtctggctgaatatcttctacgaagatcacttccccgtccatcagggagacacttcctggagatccgtgtcatgactgtttctctctcgtgtgtgtgtgtgtgtgtgtgtgtgtgtgtgtgtctttggacgaatgtgccctgtgcgtcaaaaagggatgtcttttatgtggaccggtctttggtgagcctctttctgcgtctctccctgggtcctgcggccagctgtccatcgtcttcgcggcggttccactttgggtctgtgcaggcctcgataacgtgaggggatgcatcgggcccggagcaatggaagtctcatccccatcctgagcggcctcttttctaggatcgagaggaccacactgcagcccaggacaaaagccccacggtagcacattgtccggcaggagaggagcagacccacgtccaagaagatggttttacctttccacgccccttctctgcgaaatgaagccacaccaccacacagtcttgaagaggaagcctggaatgggagacggcaacaagccccgtccctggaacgctggcctctctggacaagccacccgcttcgcacccctcctcttatgcccgtggcggtggcacggcgctgtatcctgcctgggctatggcctctgctctgtcgtccctcttgctctgtctcccctgtttctgagcggcctagatgcctctcggtctggctgaatatcttctacgaagatcacttccccgtccatcagggagacacttcctggagatccgtgtcatgactgtttctctctccaagcctgtttctgctggattgcgcaggtctgatgaccctggggctcttggcttccatacgtgtctcagacagggaagcttcctcggtctccgtgtttcacctcatgggtgggtggattgcctaggatgagcgagcgctaggccggcgagactggccttgtcttctaggacaagtgcatttcccctgcggcggttccactttgggtctgtgcaggcctcgataacgtgaggggatgcatcgggcccggagcagtggaagtctcatccccatcctgagcggcctcttttctaggatcgagaggaccacactgcagcccaggacaaaagccccacggtagcacattgtccggcaggagaggagcagacccacgtccaagaagatggttttacctttccacgccccttctctgcgaaatgaagccacaccaccacacagtcttgaagaggaagcctggaatgggagacggcaacaagccccgtccctggaacgctggcctctctggacaagccacccgcttcgcacccctcctcttatgcccgtggcggtggcacggcgctgtatcctgcctgggctatggcctctgctctgtcgtccctcttgctctgtctcccctgtttctgagcggcctagatgcctctcggtctggctgaatatcttctacgaagatcacttccccgtccatcagggagacacttcctggagatccgtgtcatgactgtttctctctccaagcctgtttctgctggattgcgcaggtctgatgaccctggggctcttggcttccatacgtgtctcagacagggaagcttcctcggtctccgtgtttcacctcatgggtgggtggattgcctaggatgagcgagcgctaggccggcgagactggccttgtcttctaggacaagtgcatttcccctgcgcttcctgtctcactcttgagggacatcctctcctccgctcacaggtggacagactccctggatcttttggctgtaacgaatgtcaggaaacaaagggactgcgctgggactggcgctggggctgcgtgcaggggaggttgcgtcagggctagctgggtggtggagggttgggggtggggtgactgttgcagaaacctctgtggtcctctggcaggcatttcaacatgtggcttggctgaggcacaagccccgtccaggttcccaggtcttctttgtgttcccttggcactcagggaaaggccacttgatcccctttctaccgggcgcatgcctgggcaccactgttgctttcgccctcgccccacatgcctccggtgacatacattcacgccatctgctctggtatacgccagtgccaggcgtgatcgcattgtctccacctgggattcgccccgtccctgtctgcacgtgtcctggaaagcggtgtcggcttgcaggagccccagggcttttagaagcgggccaggccaccgctctttcaaaggaggagggaggcagagggctcacggatcagtgaattttccgctgacaccagccttgagggccatgggatcattctgtgctgcagcgaggccctgcctgcctcagcagatgtggtgagcccatcctttctcgcccagagtggtccaaaatcgcatctgaagaggagtcctgagaacccagcaggcgccctgaagctccccgtccatcggtggaagtcggctcaaggaggtcctgaagacgggactcctgggggctcggccctgggaca

SEQ ID NO: 30718 - DNA, 2500 bp, Artificial sequence
  DNA replication origin
ccagagtggtccaaaatcgcatctgaagaggagtcctgagaacccagcaggcgccctgaagctccccgtccatcggtggaagtcggctcaaggaggtcctgaagacgggactcctgggggctcggccctgggacacccgtggccccctctcccacgcggccccaaactggaccccggatccagccgcagccgcggctgcagcaggcgcgccccctgccgccgcgcagccgcccgtatttaaaggggacgcagcctgcctgactgccaggagccaagcgcgagtcggcccagccaaagcgcatgcgcgaggcgcgcgccgctttttgcttcacagtgcttcccacggttgtcttaggaaccagtccccgaggcttggcaacacaggagccctccgtggcagcgcttgggtgtcgggcctccgaggctccggcctgacctctccacggggtccacaggaacgtctccggctgccaggagtcgcaaggggccgagcaggatgaggaaaccacaggcggagtccaggggaagcagcgtggcatcccagcctcaggcctgccaggacggtgttcgggtgagtctcccgagaagtcgtgcccccgtgatctcgaggacaggtccgcctgcgtgcccgagggctgttctctcagccgagggttgttcccctccagagcagaacccggcagccgcaggggttgcctgggggcgtgtatttctcggccaccgcggtaggactgtgtgtggggctgtgtctcccattctcccttctctctctgtctctcaccctctgtgtgcttctttccctctgtgtgtgtgtgtgtgtgtgtgtgtgtgtgtgtgtgtctttggacgaatgtgccctgtgcgtcaaaaagtgatgtcttttatgtggaccggtctttggtgagcctctttctgcgtctctccctgggtcctgcggccagctgtccatcgtcttcgcggcggttccactttgggtctgtgcaggcctcgataacgtgaggggatgcatcgggcccggagcaatggaagtctcatccccatcctgagcggcctcttttctaggatcgagaggaccacactgcagcccaggacaaaagcccaacggtagcacattgtccggcaggagaggagcagacccacgtccaagaagatggttttacctttccacgccccttctctgcgaaatgaagccacaccaccacacagtcttgaagaggaagcctggaatgggagacggcaacaagccccgtccctggaacgctggcctctctggacaagccacccgcttcgcacccctcctcttatgcccgtggcggtggcacggcgctgtatcctgcctgggctatggcctctgctctgtcgtccctcttgctctgtttcccctgtttctgagcggcctagatgcctctcggtctggctgaatatcttctacgaagatcacttccccgtccatcagggagacacttcctggagatccgtgtcatgactgtttctctctccaagcccgtttctgctggattgcgcaggtctgatgaccctggggctcttggcttccatacgtgtctcagacagggaagcttcctcggtctccgtgtttcacctcatgggtgggtggattgcctaggatgagcgagcgctaggccggcgagactggccttgtcttctaggacaagtgcatttcccctgcgcttcctgtctcactcttgagggacatcctctcctccgctcacaggtggacagactccctggatcttttggctgtaacgaatgtcaggaaacaaagggactgcgctgggactggcgctggggctgcgtgcaggggaggttgcctcagggctagctgggtggtggagggttgggggtggggtgactgttgcagaaacctctgtggtcctctggcaggcatttcaacatgtggcttggctgaggcacaagccccgtccaggttcccaggtcttctttgtgttcccttggcactcagggaaaggccacttgatcccctttctaccgggcgcatgcctgggcaccactgttgctttcgccctcgccccacatgcctccggtgacatacattcacgccatctgctctggtatacgccagtgccaggcgtgatcgcattgtctccacctgggattcgccccgtccctgtctgcacgtgtcctggaaagcggtgtcggcttgcaggagccccagggcttttagaagcgggccaggccaccgctctttcaaaggaggagggaggcagagggctcacggatcagtgaattttccgctgacagcaggccttgagggccatgggatcattctgtgctgcagcgaggccctgcctgcctcagcagatgtggtgagcccatcctttctcgcccagagtggtccaaaatcgcatctgaagaggagtcctgagaacccagcaggcgccctgaagctccccgtccatcggtggaagtcggctcaaggaggtcctgaagacgggactcctgggggctcggccctgggaca

SEQ ID NO: 30719 - DNA, 1303 bp, Artificial sequence
  DNA replication origin
ccagccgcagccgcggctgcagcaggcgcgccccctgccgccgcgcagccgcccgtatttaaaggggacgcagcctgcctgactgccaggagccaagcgcgagtcggcccagccaaagcgcatgcgcgaggcgcgcgccgctttttgcttcacagtgcttcccacggttgtcttaggaaccagtccccgaggcttggcaacgcgggagccctccgtggcagcgcttgggtgtcgggcctccgaggctccggcctgacctctccacggggtccacaggaacgtctccggctgccaggagtcacaaggggccgagcaggatgaggaaaccacaggcggagtccgggggaagcagcgtggcatcccagcctcaggcctgccaggacggtgttcgggtgagtctcccgagaagtcgtgcccccgtgatctcgaggacaggtccgcctgcgtgcccgagggctgttctctcagccgagggttgttcctctccagagcagaacccggcagccgcaggggttgcctgggggcgtgcattgctcggccaccgcggtaggactgtgtgtggggctgtgtctcccattctcccttctctctctgtctctcaccctctgtgtgcttctttccctctgtgtgtgtgtgtgtgtgtgtgtgtgtgtgtgtgtgtgtgtgtgtgtgtgtctttggacgaatgtgccctgtgcgtcaaaaagggatgtcttttatgtggaccggtctttggtgagcctctttctgcgtctctccctgggtcctgcggccagctgtccatcgtcttcgcggcggttccactttgggtctgtgcaggcctcgataacgtgaggggatgcatcgggcccggagcagtggaagtctcatccccatcctgagcggcctcttttctaggatcgagaggaccacactgcagcccaggacaaaagccccacggtagcacattgtccggcaggagaggagcagacccacgtccaagaagatggttttacctttccacgccccttctctgcgaaatgaagccacaccaccacacagtcttccaaaggaggagggaggcagagggctcacggatcagtgaattttccgctgacagcaggccttgagggccatgggatcattctgtgcttcagcgaggccctgcctgcctcagcagatgtggtgagcccatcctttctcgcccagagtggtccaaaatcgcatctgaagaggagtcctgagaacccagcaggcgccctgaagctccccgtccatcggtggaagtcggctcaaggaggtcctgaagacgggactcctgggg

SEQ ID NO: 30720 - DNA, 1085 bp, Artificial sequence
  DNA replication origin
tttctcgcccagagtggtccaaaatcgcatctgaagaggagtcctgagaacccagcaggcgccctgaagctccccgtccatcggtggaagtcggctcaaggaggtcctgaagacgggactcctgggggctcggccctgggacacccgtggccccctctcccacgcggccccaaactggaccccggatccagccgcagccgcggctgcagcaggcgcgccccctgccgccgcgcagccgcccgtatttaaaggggacgcagcctgcctgactgccaggagccaagcgcgagtcggcccagccaaagcgcatgcgcgaggcgcgcgccgctttttgcttcacagtgcttcccacggttgtcttaggaaccagtccccgaggcttggcaacgcgggagccctccgtggcggcgcctgggtgtcgggcctccgaggctccggcctgacctctccacggggtccacaggaacgtctccggctgccaggagtcacaaggggccgagcaggatgaggaaaccacaggcggagtccgggggaagcagcgtggcatcccagcctcaggcctgccaggacggtgttcgggtgagtctcccgagaagtcgtgcccccgtgatctcgaggacaggtccgcctgcgtgcccgagggctgttctctcagccgagggttgttcccctccagagcagaacccggcagccgcaggggttgcctgggggcgtgcattgctcggccaccgcggtaggactgtgtgtggggctgtgtctcccattctcccttctctctctgtctctcaccctctgtgtgcttctttccctctgtgtgtgtgtgtgtgtgtgtgtgtctttggacgaatgtgccctgtgcgtcaaaaagggatgtcttttatgtggaccggtctttggtgagcctctttctgcgtctctccacggggtccacaggaacgtctccggctgccaggagtcacaaggggccgagcaggatgaggaaaccacaggcggagtccgggggaagcagcgtggcatcccagcctcaggcctgccaggacggtgttcgggtgagtctcccgagaagtcgtgcccccgtgatctcg

SEQ ID NO: 30721 - DNA, 2286 bp, Artificial sequence
  DNA replication origin
gcagaacccggcagccgcaggggttgcctgggggcgtgcattgctcggccaccgcggtaggactgtgtgtggggctgtgtctcccattctcccttctctctctgtctctcaccctctgtgtgcttctttccctctgtgtgtgtgtgtgtgtgtgtgtgtctttggacgaatgtgccctgtgcgtcaaaaagggatgtcttttatgtggaccggtctttggtgagcctctttctgcgtctctccacggggtccacaggaacgtctccggctgccaggagtcacaaggggccgagcaggatgaggaaaccacaggcggagtccgggggaagcagcgtggcatcccagcctcaggcctgccaggacggtgttcgggtgagtctcccgagaagtcgtgcccccgtgatctcgaggacaggtccgcctgcgtgcccgagggctgttctctcagccgagggttgttcccctccagagcagaacccggcagccgcaggggttgcctgggggcgtgcattgctcggccaccgcggtaggactgtgtgtggggctgtgtctcccattctcccttctctctctgtctctcaccctctgtgtgcttctttccctctgtgtgtgtgtgtgtgtgtgtgtgtctttggacgaatgtgccctgtgcgtcaaaaagtgatgtcttttatgtggaccggtctttggtgagcctctttctgcgtctctccctgggtcctgcggccagctgtccatcgtcttcgcggcggttccactttgggtctgtgcaggcctcgataacgtgaggggatgcatcgggcccggagcaatggaagtctcatccccatcctgagcggcctcttttctaggatcgagaggaccacactgcagcccaggacaaaagccccacggtagcacattgtccggcaggagaggagcagacccacgtccaagaagatggttttacctttccacgccccttctctgcgaaatgaagccacaccaccacacagtcttgaagaggaagcctggaatgggagacggcaacaagccccgtccctggaacgctggcctctctggacaagccacccgcttcgcacccctcctcttatgcccgtggcggtggcacggcgctgtatcctgcctgggctatggcctctgctctgtcgtccctcttgctctgtctcccctgtttctgagcggcctagatgcctctcggtctggctgaatatcttctacgaagatcacttccccgtccatcagggagacacttcctggagatccgtgtcatgactgtttctctctccaagcctgtttctgctggattgcgcaggtctgatgaccctgggggctcttggcttccatacgtgtctcagacagggaagcttcctcggtctccgtgtttcacctcatgggtgggtggattgcctaggatgagcgagcgctaggccggcgagactggccttgtcttctaggacaagtgcatttccctgcgcttcctgtctcactcttgagggacatcctctcctccgctcacaggtggacagactccctggatcttttggctgtaacgaatgtcaggaaacaaagggactgcgctgggactggggctggggctgcgtgcaggggaggttgcgtcagggctagctgggtggtggagggttgggggtggggtgactgttgcagaaacctctgtggtcctctggcaggcatttcaacatgtggcttggctgaggcacaagccccgtccaggttcccaggtcttctttgtgttcccttggcactcagggaaaggccacttgatcccctttctaccgggcgcatgcctgggcaccactgttgctttcgccctcgccccacatgcctccggtgacatacattcacgccatctgctctggtatacgccagtgccaggcgtgatcgcattgtctccacctgggattcgccccgtccctgtctgcacgtgtcctggaaagcggtgtcagcttgcaggagccccagggcttttagaagcgggccaggccaccgctctttcaaaggaggagggaggcagagggctcacggatcagtgaattttccgctgacagcaggccttgagggccatgggatcattctgtgctgcagcgaggccctgcctgcctcagcagatgtggtgagcccatcctttctcgcccagagtggtccaaaatcgcatctgaagaggagtcctgagaacccagcaggcgccctgaagctccccgtccatcggtggaagtcggctcaaggaggtcctgaagacgggactcctgggggctcggccctggg

SEQ ID NO: 30722 - DNA, 2633 bp, Artificial sequence
  DNA replication origin
tgtggtgagcccatcctttctcgcccagagtggtccaaaatcgcatctgaagaggagtcctgagaacccagcaggcgccctgaagctccccgtccatcggtggaagtcggctcaaggaggtcctgaagacgggactcctgggggctcggccctgggacacccgtggccccctctcccacgcggccccaaactggaccccggatccagccgcagccgcggctgcagcaggcgcgccccctgccgccgcgcagccgcccgtatttaaaggggacgcagcctgcctgactgccaggagccaagcgcgagtcggcccagccaaagcgcatgcgcgaggcgcgcgccgctttttgcttcacagtgcttcccacggttgtcttaggaaccagtccccgaggcttggcaacgcgggagccctccgtggcggcgcttgggtgtcgggcctccgaggctccggcctgacctctccacggggtccacaggaacgtctccggctgccaggagtcacaaggggccgagcaggatgaggaaaccacaggcggagtccgggggaagcagcgtggcatcccagcctcaggcctgccaggacggtgttcgggtgagtctcccgagaagtcgtgcccccgtgatctcgaggacaggtccgcctgcgtgcccgagggctgttctctcagccgagggttgttcccctccagagcagaacccggcagccgcaggggttgcctgggggcgtgtgttctcgggcaccgcggtaggactgtcctcttgctctgtctcccctgtttctgagcggcctagatgcctctcggtctggctgaatatcttctacgaagatcacttccccgtccatcagggagacacttcctggagatccgtgtcatgactgtttctctctccaagcctgtttctgctggattgcgcaggtctgatgaccctggggctcttggcttccatacgtgtctcagacagggaagcttcctcggtctccgtgtttcacctcatgggtgggtggattgcctaggatgagcgagcgctaggccggcgagactggccttgtcttctaggacaagtgcatttcccctgcgcttcctgtctcactcttgagggacatcctctcctccgctcacaggtggacagactccctggatcttttggctgtaacgaatgtcaggaaacaaagggactgcgctgggactggggctggggctgcgtgcaggggaggttgcgtcagggctagctgggtggtggagggttgggggtggggtgactgttgcagaaacctctgtggtcctctggcaggcatttcaacatgtggcttggctgaggcacaagccccgtccaggttcccaggtcttctttgtgttcccttggcactcagggaaaggccacttgatcccctttctaccgggcgcatgcctgggcaccactgttgctttcgccctcgccccacatgcctccggtgacatacattcacgccatctgctctggtatacgccagtgccaggcgtgatcgcattgtctccacctgggattcgccccgtccctgtctgcacgtgtcctggaaagcggtgtcggcttgcaggagccccagggcttttagaagcgggccaggccaccgctctttcaaaggaggagggaggcagagggctcacggatcagtgaatttcgacgaattcttggcttccatacgtgtctcagacagggaagcttcctcggtctccgtgtttcacctcatgggtgggtggattgcctaggatgagcgagcgctaggccggcgagactggccttgtcttctaggacaagtgcatttcccctgcgcttcctgtctcactcttgagggacatcctctcctccgctcacaggtggacagactccctggatcttttggctgtaacgaatgtcaggaaacaaagggactgcgctgggactggggctggggctgcgtgcaggggaggttgcgtcagggctagctgggtggtggagggttgggggtggggtgactgttgcagaaacctctgtggtcctctggcaggcatttcaacatgtggcttggctgaggcacaagccccgtccaggttcccaggtcttctttgtgttcccttggcactcagggaaaggccacttgatcccctttctaccgggcgcatgcctgggcaccactgttgctttcgccctcgccccacatgcctccggtgacatacattcacgccatctgctctggtatacgccagtgccaggcgtgatcgcattgtctccacctgggattcgccccgtccctgtctgcacgtgtcctggaaagcggtgtcggcttgcaggagccccagggcttttagaagcgggccaggccaccgctctttcaaaggaggagggaggcagagggctcacggatcagtgaattttccgctgacagcaggccttgagggccatgggatcattctgtgctgcagcgaggccctgcctgcctcagcagatgtggtgagcccatcctttctcgcccagagtggtccaaaatcgcatctgaagaggagtcctgagaacccagcaggcgccctgaagctccccgtccatcggtggaagtcggctcaaggaggtcctgaagacgggactcctgggggctcggccctgggacacccgtg

SEQ ID NO: 30723 - DNA, 2322 bp, Artificial sequence
  DNA replication origin
agaacagccctcgggcacgcaggcggacctgtcctcgagatcacgggggcacgacttctcgggagactcacccgaacaccgtcctggcaggcctgaggctgggatgccacgctgcttcccccggactccgcctgtggtttcctcatcctgctcggccccttgcgactcctggcagccggagacgttcctgtggaccccgtggagaggtcaggccggagcctcggaggcccgacacccaagcgctgccacggagggctcccgcgttgccaagcctcggggactggttcctaagacaaccgtgggaagcactgtgaagcaaaaagcggcgcgcgcctcgcgcatgcgctttggctgggccgactcgcgcttggctcctggcagtcaggcaggctgcgtcccctttaaatacgggcggctgcgcggcggcagggggcgcgcctgctgcagccgcggctgcggctggatccggggtccagtttggggccgcgtgggagagggggccacgggtgtcccagggccgagcccccaggagtcccgtcttcaggacctccttgagccgacttccaccgatggacggggagcttcagggcgcctgctgggttctcaggactcctcttcagatgcgattttggaccactctgggcgagaaaggatgggctcaccacatctgctgaggcaggcagggcctcgctgcagcacagaatgatcccatggccctcaaggcctgctgtcagcggaaaattcactgatccgtgagccctctgcctccctcctcctttgaaagagcggtggcctggcccgcttctaaaagccctggggctcctgcaagccgacaccgctttccaggacacgtgcagacagggacggggcgaatcccaggtggagacaatgcgatcacgcctggcactggcgtataccagagcagatggcgtgaatgtatgtcaccggaggcatgtggggcgagggcgaaagcaacagtggtgcccaggcatgcgcccggtagaaaggggatcaagtggcctttccctgagtgccaagggaacacaaagaagacctgggaacctggacggggcttgtgcctcagccaagccacatgttgaaatgcctgccagaggaccacagaggtttctgcaacagtcaccccacccccaaccctccaccacccagctagccctgacgcaacctcccctgcacgcagccccagccccagtcccagcgcagtccctttgtttcctgacattcgttacagccaaaagatccagggagtctgtccacctgtgagcggaggagaggatgtccctcaagagtgagacaggaagcgcaggggaaatgcacttgtcctagaagacaaggccagtctcgccggcctagcgctcgctcatcctaggcaatccacccacccatgaggtgaaacacggagaccgaggaagcttccctgtctgagacacgtatggaagccaagagccccagggtcatcagacctgcgcaatccagcagaaacaggcttggagagagaaacagtcatgacacggatctccaggaagtgtctccctgatggacggggaagtgatcttcgtagaagatattcagccagaccgagaggcatctaggccgctcagaaacaggggagacagagcaagagggacgacagagcagaggccatagcccaggcaggatacagcgccgtgccaccgccacgggcataagaggaggggtgcgaagcgggtggcttgtccagagaggccagcgttccagggacggggcttgttgccgtctcccattccaggcttcctcttcaagactgtgtggtggtgtggcttcatttcgcagagaaggggcgtggaaaggtaaaaccatcttcttggacgtgggtctgctcctctcctgccggacaatgtgctaccgtggggcttttgtcctgggctgcagtgtggtcctctcgatcctagaaaagaggccgctcaggatggggatgagacttccactgctccgggcccgatgcatcccctcacgttatcgaggcctgcacagacccaaagtggaaccgccgcgaagacgatggacagctggccgcaggacccagggagagacgcagaaagaggctcaccaaagaccggtccacataaaagacatccctttttgacgcacagggcacattcgtccaaagacacacacacacacacacacacacacacacacacacacacacacacacacagagggaaagaagcacacagagggtgagagacagagagagaaagggagaatgggagacacagccccacacacagtcctaccgcggtggccgagaaatgcacgccc

SEQ ID NO: 30724 - DNA, 1305 bp, Artificial sequence
  DNA replication origin
cgaggcgcgcgccgctttttgcttcacagtgcttcccacggttgtcttaggaaccagtccccgaggcttggcaacgcgggagccctccgtggcagcgcttgggtgtcgggcctccgaggctccggcctgacctctccacggggtccacaggaacgtctccggctgccaggagtcgcaaggggccgagcaggatgaggaaaccacaggcggagtccgggggaagcagcgtggcatcccagcctcaggcctgccaggacggtgttcgggtgagtctcccgagaagtcgtgcccccgtgatctcgaggacaggtccgcctgcgtgcccgagggctgttctctcagccgagggttgttcctctccagagcagaacccggcagccgcaggggttgcctgggggcgtgcattgcctaggatgagcgagcgctaggccggcgagactggcctttgtcttataggacaaagtgcatttcccctgcgctttcctgtctcactcttgagggacatcctctcctccgctcacaggtggacagactccctggatcttttggctgtaacgaatgtcaggaaacaaaagggactgcgctgggactggcgctggggctgcgtgcaggggaggttgcgtcagggctagctgggtggtggagggttgggggtggggtgactgttgcagaaacctctgtggtcctctggcaggcatttcaacatgtggcttggctgaggcacaagccccgtccaggttcccaggtcttctttgtgttcccttggcactcagggaaaggccacttgatcccctttctaccgggcgcatgcctgggcaccactgttgctttcgccctcgccccacatgcctccggtgacatacattcacgccatctgctctggtatacgccagtgccaggcgtgatcgcattgtctccacctgggattcgccccgtccctgtctgcacgtgtcctggaaagcggtgtcggcttgcaggagccccagggcttttagaagcgggccaggccaccgctctttcaaaggaggagggaggcagagggctcacggatcagtgaattttccgctgacagcaggccttgagggccatgggatcattctgtgctgcagcgaggccctgcctgcctcagcagatgtggtgagcccatcctttctcgcccagagtggtccaaaatcacatctgaagaggagtcctgagaacccagcaggcgccctgaagctccccgtccatcggtggaagtcggctcaaggaggtcctgaagacgggactcctgggggctcggccctgggacacccgtggccccct

SEQ ID NO: 30725 - DNA, 1058 bp, Artificial sequence
  DNA replication origin
tgtggtgagcccatcctttctcgcccagagtggtccaaaatcacatctgaagaggagtcctgagaacccagcaggcgccctgaagctccccgtccatcggtggaagtcggctcaaggaggtcctgaagacgggactcctgggggctcggccctgggacacccgtggccccctctcccacgcggccccaaactggaccccggatccagccgcagccgcggctgcagcaggcgcgccccctgccgccgcgcagccgcccgtatttaaaggggacgcagcctgcctgactgccaggagccaagcgcgagtcggcccagccaaagcgcatgcgcgaggcgtgcgccgctttttgcttcacagtgcttcccacggttgtcttaggaaccagtccccgaggcttggcaacgcgggagccctccgtggcagcgcttgggtgtcgggcctccgaggctccggcctgacctctccacggggtccacaggaacgtctccggctgccaggagtcgcaaggggccgagcaggatgaggaaaccacaggcggagtccgggggaagcagcgtggcatcccagcctcaggcctgccaggacggtgttcgggtgagtctcccgagaagtcgtgcccccgtgatctcgaggacaggtccgcctgcgtgcccgagggctgttctctcagccgagggttgttcccctccagagcagaacccggcagccgcaggggttgcctgggggcgtgtattgctcggccaccgcggtaggactgtgtgtggggctgtgtctcccattctcccttctctctctgtctctcaccctctgtgtgcttctttccctctgtgtgtgtgtgtgtgtgtgtttgtgtgtgtgtgtgtgtgtcttttgacgaatgtgccctgtgcgtcaaaaagggatgtcttttatgtcgaccggtctttggtgagcctctttctgcgtctctccctgggtcctgcggccagctgtccatcgtcttcgcggcggttccactttgggtctgtgcaggcctcgataacgtgaggggatgcatcgggccctccgtggcagcgct

SEQ ID NO: 30726 - DNA, 1530 bp, Artificial sequence
  DNA replication origin
gacccagggagagacgcagaaagaggctcaccaaagaccggtccacataaaagacatccctttttgacgcacagggcacattcgtccaaagacacacacacacacacacacacacacacacacacacacacacagagggaaagaagcacacagagggtgagagacagagagagaagggagaatgggagacacagccccagccccagtcccagcgcagtccctttgtttcctgacattcgttacagccaaaagatccagggagtctgtccacctgtgagcggaggagaggatgtccctcaagagtgagacaggaagcgcaggggaaatgcacttgtcctagaagacaaggccagtctcgccggcctagcgctcgctcatcctaggcaatccacccacccatgaggtgaaacacggagaccgaggaagcttccctgtctgagacacgtatggaagccaagagccccagggtcatcagacctgcgcaatccagcagaaacaggcttggagagagaaacagtcatgacacggatctccaggaagtgtctccctgatggacggggaagtgatcttcgtagaagatattcagccagaccgagaggcatctaggccgctcagaaacaggggagacagagcaagagggacgacagagcagaggccatagcccaggcaggatacagcgccgtgccaccgccacgggcataagaggaggggtgcgaagcgggtggcttgtccagagaggccagcgttccagggacggggcttgttgccgtctcccattccaggcttcctcttcaagactgtgtggtggtgtggcttcatttcgcagagaaggggcgtggaaaggtaaaaccatcttcttggacgtgggtctgctcctctcctgccggacaatgtgctaccgtggggcttttgtcctgggctgcagtgtggtcctctcgatcctagaaaagaggccgctcaggatggggatgagacttccattgctccgggcccgatgcatcccctcacgttatcgaggcctgcacagacccaaagtggaaccgccgcgaagacgatggacagctggccgcaggacccagggagagacgcagaaagaggctcaccaaagaccggtcgacataaaagacatccctttttgacgcacagggcacattcgtcaaaagacacacacacacacacacaaacacacacacacacacacacagagggaaagaagcacacagagggtgagagacagagagagaagggagaatgggagacacagccccacacacagtcctaccgcggtggccgagcaatacacgcccccaggcaacccctgcggctgccgggttctgctctggaggggaacaaccctcggctgagagaacagccctcgggcacgcaggcggacctgtcctcgagatcacgggggcacgacttctcgggagactcacccgaacaccgtcctggcaggcctgaggctgggatgccacgctgcttcccccggactccgcctgtggtttcctcatcctgctcggccccttgcga

SEQ ID NO: 30727 - DNA, 2005 bp, Artificial sequence
  DNA replication origin
ctgtgacaaggggccgcgggtgtccccgggcaaagcccccaggaatcccgtattcaggacctccttgagccaacttccgccgatggacggggagcttcagggcgcctgctgggttctcaggactcctcttcagatgccattttggaccactccgggtgagaaaggaggggctcaccacatttgctgaggcaggcagggcctggctgcagcagagaatgatcccatggccctcaaggcctgctgtcagtggaaaattcactgaatcgtgagccctctgcctccctcctcctttgaaacagcagtgaactggcccgcttctgaaagccctggggctcctgcaagccgataccgctttccaggacacgtgcagacagggacggggcgaatgccaggtggtgacaatgcggtcacgcctggcactggcatataccagagcagatggcgtgaatgtatgtcaccggaggcatatggggcaagggagaaaccaacattgctgtccaggaatgtgcccggtggaaagggggatcaactggcctttccctgagtgccaagggaactcaaagaagacctgggaacatggacggggcctgtgcctcagtccaagccacattttgaaatgcctgccagaggacaacaggggtttctgcaacagtcaccccacccccaaccatccaccacccagctagccctgacacaacctccactgcacgcagccccagccccagtcccagcgcagtccctctgtttcctgacattcgttacagccaaaagatccagggagtctgtccacctgtgagcggaggagaggatgtccctcaagagtgagacaggaagcgcaggggaaatgcacttgtcctagaagacaaggccagtctcgccggcctagcgctcgctcatcctaggcaatccacccacccatgaggtgaaacacggagaccgaggaagcttccctgtctgagacacgtatggaagccaagagccccagggtcatcagacctgcgcaatccagcagaaacaggcttggagagagaaacagtcatgacacggatctccaggaagtgtctccctgatggacggcgaagtgatcttcgtagaagatattcagccagaccgagaggcatctaggccgctcagaaacaggggagacagagcaagagggacgacagagcagaggccatagcccaggcaggatacagcgccgtgccaccgccacgggcataagaggaggggtgcgaagcgggtggcttgtccagagtggccagcgttccagggatggggcttgttgccgtctcccattccaggcttcctcttcaagactgtgtggtggtgtggcttcatttcgcagagaaggggcgtggaaaggtaaaaccatcttcttggacgtgggtctgctcctctcctgccggacaatgtgctaccgtggggcttttgtcctgggctggagtgtggtcctctcgatcctagaaaagaggccgctcaggatggggatgagacttccattgctccgggcccgatgcatcccctcacgttatcgaggcctgcacagacccaaagtgcaaccgccgcgaagacgatggacagctggccgcaggacccagggagagacgcagaaagaggctcaccaaagaccggtccacataaaagacatccctttttgacgcacagggcacattcgtccaaagacacacacacacacacacacacacacacacacacacacacacagagggaaagaagcacacagagggtgagagacagagagagaagggagaatgggagacacagccccagccccagtcccagcgcagtccctttgtttcctgacattcgttacagccaaaagatccagggagtctgtccacctgtgagcggaggagaggatgtccctcaagagtgagacaggaagcgcaggggaaatgcacttgtcctagaagacaaggccagtctcgccggcctagcgctcgctcatcctaggcaatccacccacccatgaggtgaaacacgg

SEQ ID NO: 30728 - DNA, 924 bp, Artificial sequence
  DNA replication origin
tggcatctgaagaggagtcctgagaacccagcaggcgccctgaagctccccgtccatcggcggaagttggctcaaggaggtcctgaatacgggattcctgggggctttgcccggggacacccgcggccccttgtcacaggcgccccgaaactgtaccccggatccagccgcagccgcggctgcgcaggcgcgccccctgccgccccgcacctgcggttatttaaagctgacacagcttgcctgagggccaggagcccatgcgagtcgacccagccaatgcgcatgctcgagtggctcgccgcttttcgcgtcatagtggttctcacggttgtcttaggaaccagtcccttggcaacgcgggacccctccgtggcagcgcttgggtgtcgggcctccgaggcttcggcctgacctctccacggggtccacaggaacgtctctggctgccaggagtcgcaaggggctgagcaggatgaggaaaccacaggcggagtccggtggaagcagcgtggcatcccagcctcaggcctgccaggacggtgttcgggtgagtctcccgagaagtcgtgcccccgtgatctcgaggacaggtccgcctgcgtgcccgagggctgttctgtcatcggagggtcgttcccgtcaggagcagaacccggcagccgcaggggttgcctgggggcatgtatttctcggccaccgcggtaggactgtgtgtgggggtgtgtctcccattctcccttctctctctgtctctcaccctctgtgtgcttcttttcctctgtgtgtgtgtgtgtgtgtgtgccagtgtgcgtgtgtgtctttgaacgaatgtgccttgtgcgtcagaaagggatttcttgcttgtctgccggtctttggtgggtttctttctgcgtctctccctgggtcctgtccagctgtcca

SEQ ID NO: 30729 - DNA, 1043 bp, Artificial sequence
  DNA replication origin
cccacctcccccaacagcggcttttagctgcctggggccgcccgcctgaccctaggacgagtgcggaatgaccccctctccacgcggagccctgagcgggaggcggcaggggcccaggcagcaggaactgggaacaagccgcccggcaggaagtttcgggtggctggaatttaggaagaagctagcctgagctcaaaacctcctgctaaacaaaccttaaggcgcgcatccggctctgtttcccacctgcaggttccgcattccttagcccagcaggcggggaggcgggagcggggtcagaattggtggaaggctggggttgcggggtgcagagagtgctgagccatgaagacttggggcagcgaggccgagtgatggcagagcctggggaggtgtccaggctgcgggggagcagggactttggagcaatgaccctggggggacactgagcacagggccagggtggcgtccaggggtctcgggtaggcctggactaaagaggcctgggaagagagacgtggggaggtcaaagggccctggtgagtctggatgaggagcagaggattgagtccccccagaactgagtccaatgtttttggggggagggacaaggaaacagtgagggggtgggggccatgtgccactgttcgagggacaaacccagctcagaggaaataaggcacgggggtgaggtgacaagggacatgggggtgacagggccatgagatgaggggtgtcgaggtcgggccaggaaaagatcaactaaacagccgggggaagtggggacccagggaagcaagacatggaggcatgagggagaaaaagggaggagggggagctcagcaaatcagtcactgccaggcgcctctaggagtctgattttgtggcaccttagtcatgttttcagagaagaggttcatagtctagaggatcccatggccacatggccaacacagggaggaagtggggtgaagagctggggtgcccatctgtggccccgcttccttgtgaggttcccacaggccctgtgggcacacagccca

SEQ ID NO: 30730 - DNA, 1663 bp, Artificial sequence
  DNA replication origin
aggaaacaccagctacctgtaataaagcgtgacatgcacctttgtcaacactcagcacagctttgcaataatggcccagcctgatcttcacgttggaggtgaggacataggccctggagggttcaagtggcaaggtcacagaagtggtcacaggggaccacagcccccgctgcctggactgccccaagctctggatctgtaactcctggcttgctccccacttgcctgcctgaccacagcttcgaggcctctgaaaagcctggcaaggtgggcaaaaggtccctgtggtgttgcccccaggggagggatgggccatggagcttagcttggagggaggatctgggacctgctggaggaagcagagccctggagagggtgcatctcggccctcaccccggtgatgtggagagccttgactgcgggggctggggaaagtgggcaggcccagggcagtcggggagccacttgctcagcaggagggccagagggagaagtgagctgtgtgcagggagggtgggcagcaggcaggggcaggcacaggaagtagggcgctgagctgaggtggtccaactcaggagctggggagggaaactgagaaagggagcatggaggggagatgggggaaactgggcaggtgcagagagggagggcggggaactgaggagaagatagagcaggggaagtcagggaaggggaagaaagcacacaagcagagggagactggaaaggaaacccagatggctcttgggacagggaagagggagggaaggggagctgagggacatggagccaaacgaggtgaggtgaggagggcggggatggctgggagggatgtccttggcaggagagtgcaggggactgtgggagggtggagaggtcaacagaggctgaaggaaagggggaggggagcatgttggaggagatggaactggagagagaagaaaggaagggcatgaatgaaggggagggaggcaggagaggtcaggtgcatccaaggaaggtgaggagaggggaagggaggtaaactgaggcagggacatggacagaagggatgggaagtgagttcaccggtggagtcagagtgaggagaggaagggaaggactggaatggagggtgaagatggagtgtgagtggaggtgaagtggggggaaggggggaaccagtaggggctttgcatgggaggggaggtgagtgagggagaggaggaaggtacaaagaactggagagagggagtaagatagaggccacaggggctcaggagtaaggggaggtactagaatggagggaagcatcttggaagagctgcagtggatcaattgtgggtggggtggggcaggagggagcatgtgcctgagactgtgctgctttttgaagaagtgacagagacaacacccttaacagagcatttctcctccccatcagccctgtcacctggtcaccctatgaccccacaccccgcagctgcactgagcttcactgcccttgggtggggatgcctcctgagggctctttctgttgttcttgcatctctccagccacatattaaagtgactcagaccactttgatgaccctctgttccatgttgtaggtgacactggttatccatgtccaaatcacttcttcccagccctttggtgtttggtggattagaacactccatg

SEQ ID NO: 30731 - DNA, 743 bp, Artificial sequence
  DNA replication origin
gtctctgcctctgtgggggtcccaagttggtgcctggggagggcagggctgaggggttgctgggaggtgagtgttgagaggcctaggaggccacgtccatgaatgggtctggagacctggggggctgggtctgaggggacgggagcaggtataactgagggagttggtgggaggactccagcccagctgctcaggggagccctgagtcacttcgggagtgtgaggagagtggaggaagtggatggccctggtgccccaggtgagggggtgggctgcagggggccagccttgtgaagggcagacacaacttagaggtgagctcgggagcatgcaggtgaggacccaagagaccaggggggtccttcggcaggtggggcagagagaccgaagactgtggcccagcaggacctgggggagagaagagaaggtatagggaggaaaaagggggcagcttcaccaactcatcaactaagggatggttggggcgggccaggagctaagcagggggtggggtgataggggagatggagccctcaccgggcagtggggccctgggcactggtttatgtatgaacaggtgggcaagtcctctagagtcgtggaaagtaaacatgaaacccacaactgcacacacgtcatcccttgtttttgtcatggcgttaatctccaagtggctttggttcttccccaggcacagaatgaagcgacccaggtcatcgctgtcctagagctgcccccgctga

SEQ ID NO: 30732 - DNA, 1052 bp, Artificial sequence
  DNA replication origin
gggtgctatgggggctacactgccagtggcgctggcgagctgaggaggtggtggcggcagtgacagcagtggcctccttcttctggtggtctccaagtaagggatcgttctcttctcagatgccagactctagaaggcaattttctcccgctcgagctagattgcagggcagggcccccacacccactgtggttttctggcccgccctcatgctctgtgttgggaagaccacctgggactaccgggtaggtagtaggaggcaccatgggggaagtgggggacagggcactttgggtggaggtgtcaggaaagggaaccagctcttgggtggggagggctggctgggtctgagtttctcctactcaggctccctgaggagggcagccttggtgggcccagcaattcctggccagctggacttggccaggggctggtttcagtgaaggcactcactcccaccccaggccccagttcctggccagcttttgccagaagaggagaggctggactttggaagtgggtgtgagtgccttcaatgaaactgatccctgaaacccagtcaccagcatgacaaggtgaggctctaacggttgcactccctgagtcccgttttgggcttttctagctttgcctgcccagctgctccaagccaggctgcaggaggagaaggaggagtcgccagtggtatggtcgagcagatgacatggctctgaaacttgcctcatgaagttggtggtagagatggagactgcagctcaactggagcggtaggagggcacccacggggaccaggtggtaggagcctggtagggtgggctggtacattgagggtgacagtggttgtattggcatcggcgctagtggtggtagcagtaggaagtctgggggctgggaagggggagtaggagcactgcagggcccatcccgttctggggtggggaggaacctgtgggtgttgtaacgaaggcctcggtggcagtggtggtggtacatatagggcaaagaggagtcctcccccttctcctgcagtctctggagggtgccctcctcct

SEQ ID NO: 30733 - DNA, 1449 bp, Artificial sequence
  DNA replication origin
aagtcttaacacaacaaatcacagcatgaaaataaagtccaatcagagtaggcctagaggtttttttctcgtcctatcagaacatgtagtccaggaaccacatttgcattaacctcggtatataaagcatgctgaggtcgtgtcacgtcatttcaggctcttctgtgccaagcagaggagctgctctgtgcccaacttagaaaactggaagaggccgcaaccttccgcttgctggagactggaggatggatggagcctggagcctgggacactacctcgctgcggttggtggtggcgagagagcagtaggagggcagccggcagcaggagcttctcctgctgggctggaggactagaacgaagaggaaccgccacatgctggaggctggagcctgtgccaccgtggcttacctcgctgtggttggtggtgacgtcagagactgcagctcggccacagtggtagaaatgtgatggggtaggtgagttttctgaggctgccccgtatgcctctggggacaagggttgggtgtcctattggcgctcactgctagaggctactctgcctgtggcagtggtctggttgggggcactctccagtgttgcattgctggtagtggggcaggttggctggctatccggggctatacagcccatggtggcaggggtggtgtcggggaggcagattgtgtacactaatgtgtactgcaggtggctggggaaggattaggggcactatcttctgctgcactacccgcggcagggggtgggttgggtggagttatccggggctacaatgctggcagtgggcggtggtttaggggcgttgttgggtgctgcactgcctgtgactggggagtgcgccatcaggagctgaactgcctgtggctgggtcagattgtgagaactaccgggtgttatgctccctgaggtgtggagggagtgctttagggggatattggggttacattgcctgaaactagggtgtgttggatgtgctatccgggggctacactactagtggcagggggcagattaggggtgctatgggggctacactgccagtggcgctggcgagctgaggaggtggtggcggcagtgacagcagtggcctccttcttctggtggtctccaagtaagggatcgttctcttctcagatgccagactctagaaggcaattttctcccgctcgagctagattgcagggcagggcccccacacccactgtggttttctggcccgccctcatgctctgtgttgggaagaccacctgggactaccgggtaggtagtaggaggcaccatgggggaagtgggggacagggcactttgggtggaggtgtcaggaaagggaaccagctcttgggtggggagggctggctgggtctgagtttctcctactcaggctccctgaggagggcagccttggtgggcccagcaattcctggccag

SEQ ID NO: 30734 - DNA, 1825 bp, Artificial sequence
  DNA replication origin
tgcggcctcttccagttttctaagttgggcacagagcagctcctctgcttggcacagaagagcctgaaatgacgtgacacgacctcagcatgctttatataccgaggttaatgcaaatgtggttcctggactacatgttctgataggacgagaaaaaaacctctaggcctactctgattggactttattttcatgctgtgatttgttgtgttaagacttgctctcatccaattacaacattataataaagtccaatcagagtaagcctggaggttttttctcatctactcaaaacatgcagcccaggaaccctcctgggcataactgcagtatataaatgatgctgaagagggatgaggttttttcgggttcatgtatcttcctgtggagttgctcggtgtagaggactaggaatcaggagtcactggcctcctatgctaggggctggagccgtgggagcggcggctcacctcgctgtggttgttggcagcgacggagctggcagcgcggctggagtggtaggagacggaaaacagttttaggatagatggaggggagtaaagagggtagatagtgccaaagggaaaaaaaggtagcttagtcagagaaggagttgcaaaaaggtggtagtgaaaagatggtgggggaaaaagtttttgggtagatggaggcagaaaaacagggtggggagtgggaaggaaggaaggttttgcagaaagacggtgggtaaaaagtttaaaggtagatggagggggaaaagagggcgtcaagtgggaggaggaaaaagagggagatgatgggggaaaacgggggtgagcagtagggagagaaggtttcgtgaaaagatggtggggtgaaaatagagtggggggggaaggtttttgggtagaggagcaaaagagggcagcaagtgggagaaggaaaaagagggtagccagcaggaggaagacaaagttttgtgaaaagacagtggcagaaaagaaagaccatggacaaagaaaagacggtgggtgaaaagtgtttcgatagatggaggggggaaagagggtgacgaggaaagagggtagcaagagggagcagggatagagggttgggaaaacgacggaaaaataatttggggtagatggagggcaaaaaagagggtggcaagcaggatggggaaagaagagcatgagcggtaaagggaggagactttgaaaagatggtggggaaagtttttgggggtagatggagggggaaaagatggaggtgagcaggagtggggagaaggctttgtgaaaagacggggggtggaaatgtttttgggtagatggagaagggaaagagaatggcaaggaggaacgggggaaagatgatgatgagaacagtttttgggtggatgaaggggaaaagaggttggtgagcagcaggagtggggagaaggtttagggaaaagacgggggaaaatgtttttgcttagatgaaggagcaaaagagggtggtgagagtgggagggggaaaaagagggtggccagggtaaggggaaaagacggtgggaagaaactggggaaagggtttgggtagatggatggggaaaagagtgttgagcaggagagtagagaaggctttgtgaaatgagggtgggcaaaaaatggtgaagtttgggggcagatggcagaagaaaaagggtggcgagagggagggggctaaaggcggtcgggaaaagaaggtagggaaataattttgggggacaaaggtttggggtagattttttaaaataagattatttgtatttttgattttgatgagttctttattttgtgtatgaaccccttgcctgatgcat

SEQ ID NO: 30735 - DNA, 1369 bp, Artificial sequence
  DNA replication origin
agaattttccttagtacagaacaaaatgaaaagtctcccatgtctacttctttctacacagacatggcaaccatccgatttctcagtcttttccccacctttcccccctttctattccacaaaaccgccattgtcatcatggcccgttctcaatgagctgttgggtacacctcccagatggggtggtggccgggcagaggggctcctcacttcccagtaggagcggccgggcagaggcgcccctcacctcctggatggggcggctggccgggtggggggctgaccccccacctccctcccggacggggcggctggccgggtgggggctgaccccccacctccctcccggacggggcggctggccgggccgggggctgacccccccacctccctcccggatgaggcggctggcggggcggggggctgaccccccccacctccctcccgggcggggtggctgccgggcggagatgctcctcacttcccagatggggcagctgccaggcggaggggctgttcacttctcagatggggcggctgctgggcggaggggctcctcacttctcagacggggcggttgccaggcagagggtctcctcacttctcagatggggcggccgggcaaagatgctcctcacctcccagacggggtcacggccgggcagaggggctcctcacatcccagaaggggcagcggggcagaggcgctccccacatctcagacgatgggcggccgggcagagacgctcctcacttcctagatggggatggcggccgggaagaggcgctcctcgcttcctagatgggatggcggccgggcagagacgcccctcactttccagactgggcagccaggcagaggggctcctcacatcccagacgatgggcggccaggcagagacactcctcacttcccagacggggtggcggccaggcagaggctgcagtctcggcactttgggaggccaaggcaggcggctgggaggtggaggttgtagcgagccgagatcacgccactgcactccagcctgggcaccactgagcactgagtgaatgagattccgtctgcaatcccggcacctagggaggccgaggctggcggatcactcgtggttaggagctggagaccggcccagccaacacagcgaaaccccgtctccaccaaaaaaatgcaaaaaccagtcaggcgtggtggcgcgtgcctgcaatggcaggcacttggcaggctgaggcaggagaatcaggcagggaggttgcagtgagccgagatggcagcagtacagtccagctttggctcggcatcagagggagaccatggaaagagagggagagggagactgtggggagagggagagggagagagagaggg

SEQ ID NO: 30736 - DNA, 939 bp, Artificial sequence
  DNA replication origin
ccccgtctgggaggtgaggagcatctttgcccggccgccccatctgagaagtgaggagaccctctgcctggcaaccgccccgtctgagaagtgaggagcccctccgcccagcagccgccccatctgagaagtgaacagcccctccgcctggcagctgccccatctgggaagtgaggagcatctccgcccggcagccaccccgcccgggagggaggtggggggggtcagccccccgccccgccagccgcctcatccgggagggaggtgggggggtcagcccccggcccggccagccgccccgtccgggagggaggtggggggtcagcccccacccggccagccgccccgtccgggagggaggtggggggtcagccccccacccggccagccgccccatccaggaggtgaggggcgcctctgcccggccgctcctactgggaagtgaggagcccctctgcccggccaccaccccatctgggaggtgtacccaacagctcattgagaacgggccatgatgacaatggcggttttgtggaatagaaaggggggaaaggtggggaaaagactgagaaatcggatggttgccatgtctgtgtagaaagaagtagacatgggagacttttcattttgttctgtactaaggaaaattcttctgcattgggatcctgttgatctgtgaccttacccccaaccctgtgctctctgaaacatgtgctgtgtccactcagggttaaatggattaagggtggtgcaagatgtgctttgttaaacagatacttgaaggcagcatgctccataagagtcatcaccactccctaatctcaagtacccagggacacaaacactgtggaaggccgcagggtcctctgcctaggaaaaccagaggcctttgttcacttgtttatctgctgaccttccctccactattgtcctatgacc

SEQ ID NO: 30737 - DNA, 1557 bp, Artificial sequence
  DNA replication origin
  misc_feature (201)..(273): n is a, c, g, or t
acttcccagtaggggcggctgggcagaggcgcccctcacctcccggacggggcggctggccgggcggggggctgaccccacctccctcccggacggggcggctggcctggcagggggctgacccccccacacctccctcccggacgtggggctgacccccccacctccctcccagacagggcgtctggccgggcggggggnnnnnnnnnnnnnnnnnnnnnnnnnnnnnnnnnnnnnnnnnnnnnnnnnnnnnnnnnnnnnnnnnnnnnnnnngacccccccacctccctcccggacggggcggctggccgggcgggaggctgagccccccacctccctcccggacggggtggctggcccggcagaggggctcctcacttcccagtaggggcggctgggcagaggcgcccctcacctcccggacggggcggctggccgggcggggggctgatccccccacctccctcccggacggggcggctgccgggcggagacgctcctcacttcccagacggggtggctgccgggcagaggggctcctcacttctcagacggggcggctgggcagagacgctcctcacctcccatacggggtcgcggcctggcagaggtgctcctcacatcccagacggggcggcggggcagaggcgctccccacatctcagacgatgggcggccgggcagagacgctcctcacttcccagatgggatagctgccgggaagaggcgctcctcacttcctagatgggatggcggccgggcagagacgctcctcactttccagactgggcagccaggcagaggggctcctcacgtcccagacgatgggcggccaggcagagacgcttctcacttcccagacggggtggcggccgggcagaggctgcaatctcggcactttgggaggccaaggcaggcggctgggagatggaggttgtagcgagctgagatcacgccactgcactccagcctgggcaccattgggcactgagtgaaccagcctccgtctgcaatcccggcacctcgggaggctgaggctggcggatcactcgcggttaggagctggagaccagcctggccaacacagcgaaaccccgtctccaccaaaaaagtacgaaaaccagtcaggcgtggtggcgcgcgcctgcaatcgcaggcactgggcaggctgaggcaggagagtcaggcagggaggttgcagtgagccgagatggcagcagtacagtccagcttcggctcggcatcagagggagaccatggaaagagagggagagggagaccgagagggagaggggagaggggagaagggagaggggagaggggagaggggagaggcaaaagaaacaaatcttatcagagaccgtctctgtccatcctcatcagccttcccatccccaccccctccatgcacacaccactctaaccccttcccttgcctttcctcttctccctgtctagctttaatatgaagatatttcctttacttgcacggacctcaaagcgctgttaatgtaaagttgcacattctacaaaaagagtctttcaaacctgaactct

SEQ ID NO: 30738 - DNA, 997 bp, Artificial sequence
  DNA replication origin
ggaggtgaggggcgcctctgcccagccgcccctactgggaagtgaggagcccctctgccgggccagccaccccgtccgggagggaggtagggggctcagccccccgcccggccagccgccccgtccgggagggaggtggggggtcagccccccgcccggccagccaccccgtccggggggtgaggggcgcctctgcccggccgcccctactgggaagtgaggaacccctctgcccggccagccgccccctccgggagggaggtgggggggtcagccccccgcccggccagccgccctgtctgggagggaggtgggggggtcagccccccgcccggccagccgccccatgcgggaggtgaggggcgcctctgcctggccgcccctactaggaagtgaggcgccccgctgcccggccagccgccccgtccgggagggaggtggggggtcagccccctgcccggccagccgccccatccgggaggtgaggggcgcctctgccccgccgcccctactgggaagtgaggagcccctctgcccggccaccaccccgtctgggaggtgtacccaacagctcattgagaacgggccgggatgacagtggcggttttgtggaatagaaaggggggaaaggtggggaaaagattgagaaatcagatggttgccatgtctgtgtagaaagaagtagacatgggagacttttcattttgttctgtactaagataaattcttctgccttgggatcctgttgatcggtgaccttacccccaaccctgtgctctctgaaacatgtgctgtgtccactcagggttaaatggattaagggcggtgcaagatgtgctttgttaaacagatgcttgaaggcagcatgctcgttaagaatcatcaccactctctaatctcaagtacccagggacacaaacactgcggaaggctgcagggtcctctgcctaggaaaaccagagacctttgttcacttgtttatctgccgaccttccct

SEQ ID NO: 30739 - DNA, 994 bp, Artificial sequence
  DNA replication origin
ttggggcgctggtgtctaggcaaggaacccccgaaccgggagagctggaccaggtgttaccctccgcggtgccctagccaggactctggtagacctggcagccgagtctgccgatcccgccctcagacccgcggcggtgggggcaaaaagccacggcgatgggggcaataacccgcgacggcggggtgaaaaagccgcagcggtaaaaacctgcggcggcgggagtaaaaagccgcgtcggcaaaaagccacggccgcggggaaaaagccgcggtgatgggggcaaaaagccgcgagggcgggggaaaacagccgcggcgggggcaaaaaaccgcaaaaagccgcggtggcgggcgcaaaaagccgcaacggtagagttaaaaagccggggcagtgggggaaaaagccggggcgacgggggcaacaagccacggcggcgggggcaacaagccactgtggcggaggcaaacagccgcggcgacaaaaagctgcggcggcggcgggggcaaaaagctgcggtgacgggggcaaaaagccgtaaaaagtcgcagccttgggggcagaaagcaaaggcggcgggggcaaaaagtcgcggcggcggaggcataaagcggcaaaaacccgcagcggcgtggtcaaaaatccatggcggcaaaaagccgcgtcggcgggggcgaaatagtggaaatggggtagaaggcagcacagcttgacattcctggagtgtgatgtggaaggaaaagtgcagaggaagacaaacaaagatgtaagtaggcttgactcagtgcagctaagaacaaagatgttatcttgatgttatctatcagctaattttttgtattttagtagagaaggggttttaccacgttggccaggatggtctcgatctcctgacctcatgatccacgcacctcagcctcccaaagtggtgggattagaggcatgagccacaaagtgctcaaaaaatctattaattaaaaaatgtgtatgtagc

SEQ ID NO: 30740 - DNA, 1376 bp, Artificial sequence
  DNA replication origin
gcccccatcaccgcggctttttccccgcggccgtggctttttgccgacgcggctttttactcccgccgccgcaggtttttaccgctgcggctttttcaccccgccgtcgcgggttattgcccccatcgccgtggctttttgcccccaccgccgcgggtctgagggcgggatcggcagactcggctgccaggtctaccagagtcctggctagggcaccgcggagggtaacacctggtccagctctcccggttcgggggttccttgcctagacaccagcgccccaagctctgctcctgggccgctgcagcctgcatagagcggcgctgcgctcggccccgatgggagagaagaaggagagcggtggctggggtgacgcggctatcgcagagggaggctcacgggccgcggccagccaggtgctgcagcagtgcgggcagctccagaagctcatcagcatctctgttggcagcctgcgcgggctgcgcaccatgtgcgctgtgtccaaggacctcacccagcaggagatacggaccatggaggtaagggggtcagggacaagggctgggctcccgcaccggactggacatctccctcggggccccagttcactcctggccgagttgcgtccttgagcccgcgtcgcctccctggaggcttctcctccatcctgcactcgctgatgcggcagccagaggacccgggaccagccctcaccttgggcaggatttgtggggcgggtgcgtgttgggaactgtgatggaggctcgaggggcccgtgggcggggtgggctgtgcgcataaggggatgcccttatgccccgaatttccatctcgtgcagcgttctcatcttgtaggtgaggaaaccgaaggcctgagggagaaatgacttgccaggaacccctgttaaggaaaattaacaaagtgtggttattaaagaagaactgagttcggattcagacctggagtcccacatccttggttaagacattataccactttgagtctggcctgttaactgaggttgagccactccatcctcgtcttattgtggggtcctgacctcaaggggtttcctgcaggaagaagcaaatgggtttgctttcctagctctgtccagtaccttagggaccctgagaactggagagattcttggagagccatctggtgtatgtcatgggtgggccttgtttgaaggtcagtctgcccagtgggctggctcagcccgaatgaactcccttgaatctttggagttgtctgtgtacttttaagggtttctcatctttgcaccaaaagatcccctggaaattaggtgggaaaatcttaacttttgtggagccttgtatttgttttaaaagttcatgcacatagccaggtg

SEQ ID NO: 30741 - DNA, 1177 bp, Artificial sequence
  DNA replication origin
ggcaaaaagccgaggcggggtgggggcaaaacgccgaggcggggtgggggcaaaaagctgcggcgggtaaaaagcctcgggggcaggggggaaaaagccgcggcggagaaaaaagccctgacagcgggggggcaaaaagccgcggcggtggcggggcaaaaagccgcggcggcggtgggcaaaaagccgtggcgggcaaaaagccgcgaaggcaggggggcaaaaagccacggcgggcaaaaagccgaggcggggtgggggaaaaaagccgcggcagcggtggggcaaaaagtcgcggcaggtaaaaagccgaggcgggttggggggaaaaagccgtggcggccgggtgggaaaaagccgtggcggcggagggggagcaaaaagccgcggtggcgggcggcgaaatgccgcggcggcgaggggcgaaaagccgcggcagcggggtggggggggggggcaaaaagccgcggcggcgggggcaaaaagccgcggccgcggagggcaaaatagtggagatggggtagaaggccggcgcagcttggcattgctggagtgtgatgtgataggaaatgtgcagccaaagacaaaaaaagatgaaagtaaacttgactcattgcagctaagaacccagatgttatcttgagggtattaactaataagcagtttaaatcagaatggcacattctgatttgttttttgtatgttcacatttgacaggcatagatactgtttgaagagagaaaagtcagtagagagaggtaacaaacttaaatatgtgccaagtctagaaacaagagaccagggggataaggacctttcaaaataaaatgcaagatttgaaaactgataggctgggggatgaggaaaaggcaggtctttaaggtcaatccctgttttgctttaagttgttagggggtggttttatcacatattgtagaatatgtcatttcagttttgaacatcttgagttaaattgtcctaacatatcttatgaatttgattttcttccctgggaagctaatatttcaaacacttaaagagtatatagatttccaacttgtatccaatttataaaactatctctaggctgctgatttcaggaggaggctcatgaatattctctttgcagagaatctatcaggagttaacaacagcttcaatatttgtggacgaccag

SEQ ID NO: 30742 - DNA, 1136 bp, Artificial sequence
  DNA replication origin
gggacaaaaagctgcaaaaatctgcggcggcgagggcaaaaaactgtggctgtgggggcaaaaacccgtagcggcaaaaagcggcggaggcgggggcagaaagccgcggggacaaaaagcagggtcggcaaaaagcctcggcagcggggaccaaaagccgcggcggcgggttaaaaagccacagcggcaaaaatctgtggcgacgggggcagaaagccgaggccgcaggggaaaaagccacggcagcgggggcaaaaagcaggggccgcaaacagccgaggcggcaaaaacccgcggtggcgggggcaaaaagccgcgtcggcgggagcaaatcgcggcagcggcaaaaagccgtggcggcgggggcaacaagccacggcggcgggggcaacaagcagaggcgacgggggcaaaaagccataaaaacctgcggcttcgggggcaaaaagccgcggcggcgggggcaacaagccgcggcagtgggggcaaacagccgcggcggcaaaaacccgcggcggtggggacaaacagccggggtggcaaaaagccgcggcgggggtgacaaaaagccgtagtggcgacgggggcaaaaaggcgtggcggcaaaaagctgcggggacgggggcaaaaagccgtaaaaagccgtggcgtcgggggcaaaaagacgcggcggcggcggaaaaagcctgggcgacgggggcaacaagccgcggcagcgggggtaaacagccgcggtggcaaaaacccgcggcggcggggtcagaaagcagcggtagcgggggcaaaaagccacaaaaacgcgctgcggccgggacaaaatagtggaaatggggtagaaggccagcacagcttggcattcctggagtgtgatgtggaaggaaaagtgcagaggaagacaaagatgtaagtaggcttgactcagtgcagctaagaacccagatgttatcttgatgttagtctatcagctaattttttgtattttagtagagaacgggttttaccacgttggccaggatggtctcgatctcctgacctcatgatccaagcagctgagcttccaaaagtgatgggattagaggcatgagccacaaagtgttcaaaaaatttattaattaaaaaatgtgtatgtagccgtc

SEQ ID NO: 30743 - DNA, 1168 bp, Artificial sequence
  DNA replication origin
agcggcggcggggacaaaaagccgcgacggggggaaaaagccgcgtaggcaaaagccgtggcggcggggacaaaaagctgcggcggcagggacaaaatgccgcgctggcgggagcaaaaagacgcggcggtgggcgcaaaaagccctggcggtggggtgtcaaaagctgcgtcggcaaaaacccatggcggcgggggcaaaaagctgcaaaaagccgcgacggcgggggaaaaaccggcggcaaaaggccgcggcggccgggggccaaaaagcctcggcggccaaaacccgcggtgggggcgggggggcaaaaagccgcggcggcggggtcaaaaagccacggcggccaaaacctaagatgggaggagcaaaaacccgcggcgacgggggcaaatagccgcggcggccggaacaaaaaggggcggcggcggcggcggcggcggcggcggcgggggcaaaaatccccggcggcgggggtgaaaagccataaaaagcagcggcggcgggggcaaaaaaccttggcggcaggggcagaaaaccgcgacggcgggagcagaaagccgcggcggcggggacaaaaaggggcggcggcgggcagcaaaaagccgcggtggtgggggtgaaaagccgcaaaaagcagcggcggcgggggaaaaagccgcgacggcaaaaagcctcggcggcgggggcaaaaagccgcggcggcggggacaaaaaggggctgcgggaagcaaaaaggcgcggcgatgggcgtaaaaagccgcgttggcaaaacccgaggcggcgggcgcaaaaagcaccggcggccaaaccccgtggcggggggagcaaaaagccgcggcggcgggggccaaaagctgcaaaaagccgcggcggaaaaagtcgcagcggcgggggcaaaaagccgcggcggcggggacaaaaagctgcaaaaatctgcggcggcgagggcaaaaaactgtggctgtgggggcaaaaacccgtagcggcaaaaagcggcggaggcgggggcagaaagccgcggggacaaaaagcagggtcggcaaaaagcctcggcagcggggaccaaaagccgcggcggcgggttaaaaagccacagcggcaaaaatctgtggcgacgggggcagaaagccgaggccgcaggggaaaaagccacggcagcgggggc

SEQ ID NO: 30744 - DNA, 1512 bp, Artificial sequence
  DNA replication origin
attgaatttaatgtagtggagtagagtggagtggaagggaatgcaatggaatggattggaatggtgaaatgaaatgtgagcggagattgtgaactgaactccagccagggtgacagagtgaggaactgtccaaagaaaggaatggaatggaatggattcagaatgaaatgtaagggaatggaggggagtttagtggattggcgtggagtggagtggagtggagtggaatggagtggaacggaatgggaagaaatggaattcaagagagcggagaggagtggattggagtggagtggagtgaggcggagcggagaggagtggaatggaatggaatagaatcgaatggaatcaaatcaaattgaatcaaatcgaattgaattgaatggattggaatcaaatggaatcaaatggaatcgaatggaatcaaatggaatcgaatggaatcaagtggaatgcaaaggaatcgattggaatggaatcgaatcgcattgaatggaatcaaatggaatgcggtgaagtggagtagagtgtagtggaatgcagtggaatggaatggggtggaatggaattgaatggagtggagtggagtggaatggagtggagtggaatggaatgggaaagaatggaattgaatggagtggagtagagtggagtggaatggaatgcaatggattggaatggaatggaatggtgaaatgaaatgtgagctgagattgtccaatgcactccagcttgggtgacagagtgagatcctgacgaaaaaaaggaatggtatagagtggatttagaatggaatgtaatggaatggagtggagtggagtggagtggattggagtggaatgaaatggagtggtatggattgttatggaatggaatggattggagtggagtggagtggggtggagtggagtggagtggaatggagtggaatggaatgggatggaacaaaatggagtagtgtagagaggataggtgtagaatggaatggaaaggaatggagtttagtggagtggagttgggtggagtggaatcaaatggagtggaatggagtggagtggaatggagtggagtggaatgtagtggaatggagtggagtggagtgaagtggaatggaaaggagtagactggaatggattggagtgaagtggaatggactggggtggagtggaattgactggagtgggaaaaaatggaatggagtggaatggaatagagtggagagtaatggaatggagtggaatgtagtggagtggagtagtatggagtgcaaaggaatggaatggagtggagaggaatggagtggcagggagtggagtggaatggagtggagtggagtggagtggagtggactgaagtggagtgcaatggagtggaatggaatggaatgggaaaaatggaattgaatggagtggagtggaatgcaacgcaacggaatggaatggtgaaataaaatgtgagctgagattgtgcactgcactccagcctcagtgacagagtgagatcctgctgaaa

SEQ ID NO: 30745 - DNA, 935 bp, Artificial sequence
  DNA replication origin
  misc_feature (1)..(454): n is a, c, g, or t
nnnnnnnnnnnnnnnnnnnnnnnnnnnnnnnnnnnnnnnnnnnnnnnnnnnnnnnnnnnnnnnnnnnnnnnnnnnnnnnnnnnnnnnnnnnnnnnnnnnnnnnnnnnnnnnnnnnnnnnnnnnnnnnnnnnnnnnnnnnnnnnnnnnnnnnnnnnnnnnnnnnnnnnnnnnnnnnnnnnnnnnnnnnnnnnnnnnnnnnnnnnnnnnnnnnnnnnnnnnnnnnnnnnnnnnnnnnnnnnnnnnnnnnnnnnnnnnnnnnnnnnnnnnnnnnnnnnnnnnnnnnnnnnnnnnnnnnnnnnnnnnnnnnnnnnnnnnnnnnnnnnnnnnnnnnnnnnnnnnnnnnnnnnnnnnnnnnnnnnnnnnnnnnnnnnnnnnnnnnnnnnnnnnnnnnnnnnnnnnnnnnnnnnnnnnnnnnnnnnnnnnnnnnnnnnnnnnnnnnnnnnnnnnnnnnnnngaattcaatggagtggactggagtgctgtggggtggagtggaatggagtgtagttgaatggagtggaatggaatgcgatggaatggagtggagttgagcagagtgaagtggaaaggtgtagaatggaatggaatggagtggagtggagtggactcgaattgagtggagtggaatggaatggagtggaatggcgtggagtggaatggagtggagtggagtttactggaatggagtggaatggagtggagtggattcgaatgaaaaggagtggagtggagtggaatggaatggagtggactggaatggaatggagtggagtggaatggagtagagtggagtgtaatggaatggaatgaaatggagtggaatggaatggaattgaatgcaatggagtggaatggcgaaatgaaatgtgagctgagattgtgcactgccctccagcctgggtgagagagtgagatcctgtcaaaagaaaacaaag

SEQ ID NO: 30746 - DNA, 726 bp, Artificial sequence
  DNA replication origin
aatgaaaaggagtggagtggagtggaatggaatggagtggactggaatggaatggagtggagtggaatggagtagagtggagtgtaatggaatggaatgaaatggagtggaatggaatggaattgaatgcaatggagtggaatggcgaaatgaaatgtgagctgagattgtgcactgccctccagcctgggtgagagagtgagatcctgtcaaaagaaaacaaaggaatggaatggatttagaatggaatggaatgaaacggaatggaaaggaaggcagtggaaaggaatggggtgtaatgtagtggagtggaaatggagtggagtggagtggagtggaatggaatggaatcgaatcaaatggaatagaatcgaatcgaatggaatagaatcgaatggaatcgaatggaatacggagaactggaatggagtggagtggaatggagtggaagggaatggggtggaatggaattcaatggagtggagtggaatggaatcgaaaggaatggaatgggaaggaatggaattgaacggagtgcagtggagtggagtggaatggaatgcaaaggaatggaatggaatggaatggaatggaatggaatggaatggaatggaatgcaaaggaatggaatggaatggaatggaatggaatggaatggaatggaatggaatggtgaaatgaaatgtgagctgagattgtgcagtgcaatgcagcctgggtgaccta

SEQ ID NO: 30747 - DNA, 1482 bp, Artificial sequence
  DNA replication origin
tggattagcgtggagtggagtggagtggaatggaatgggaaggaatggaattgaacggagtggagtggaatgaaatgcaatggaatggaattgaatggaatggtgaaatgaaatgtaagctgagattgcgcactgcactccagcctgggtgacagagtgagatcctgtcgaaagaaaggaagggaattgaatgtatttagaatggaatataatggaatggatttagaatggaatggagtagattggagtggggtgcagtggaatggagtggagtggaatggagtgcagtggaatggcgtggagtggaatggagtgaagtggaatggagtgtagtggaatggagtggagtggaatggaatggaatggaatggaaaggaatggagtgaaaagaagtgaaatggagtgggatgcaatggcatggaatggagtcgagcggagtggagtggaatggagtggagtgcagtggaatggaattgagtggaatgtaatgtaatggaatgtagtggaatggaatataatggaagggaatgcgatggagtggagtggagtggaatggagtggagtggagtggaatggagtggagtgcaatggagtggaatggaatggaatggagtggattggaattgaatggaatggaatagaatggaatggaatggaatcgaatgaaatggaattgaacagcatcaaatggaattgaatggaatgtggtgaagtggagtggagtggagtggaagggagtggaatggaatggggtggaatgaaatttaatggaatggagtgaagtggagtggaatggagtggagtggaatggactgggaatgaatggaattgaatggagtggagtggagtggtgtggaatggaatgcaatggaatggaatggactggaatggtgaaatgatatgtgagctgagattgtgcactgcactccaacctggtgacagagtgagatcctgtcataagaaaggaatggaatggaatggatttacaatggaatgtaatggaatgaagtggagtggagtggagtggagtggaacggaatggtatggattgttatggaatggaatgcaatggagtggagtggagtgctgtggggtggagtggagtggagtggaatggagtggaatggaatgggatggaatggaatggagtggagtggagtggaaaggtgtagaatggaatggagtggactggaattgagtggagtggaatggaatggagtggaatggagtggagtggagtttagtggaatggagtggagtggattggaatgaatgggagtggagtggagtggggtggaatggagtggactggaatggaatggagtggagtggaatggagtggagtggagtggaatggaatggaatgcaatggagtgtaatgaaatggaatggaatgaaatggaatggaatggcatggaatggtgaaatgaaatatgagctgagattgtgcactgcactccagcctggatgagagtgtgagat

SEQ ID NO: 30748 - DNA, 2014 bp, Artificial sequence
  DNA replication origin
gaatgcaatggagtggagtggagtgctgtggggtggagtggagtggagtggaatggagtggaatggaatgggatggaatggaatggagtggagtggagtggaaaggtgtagaatggaatggagtggactggaattgagtggagtggaatggaatggagtggaatggagtggagtggagtttagtggaatggagtggagtggattggaatgaatgggagtggagtggagtggggtggaatggagtggactggaatggaatggagtggagtggaatggagtggagtggagtggaatggaatggaatgcaatggagtgtaatgaaatggaatggaatgaaatggaatggaatggcatggaatggtgaaatgaaatatgagctgagattgtgcactgcactccagcctggatgagagtgtgagatcctgtcgaaagaaaggaatggaatgaaatggatttagaatggaatggaatgaaatggaatggaatggagtggaatggtatgaggtggaatggagtggagtgcagtggagtggagtggaatggagtggagtggaatggaatggaatggaatcgaatggaaccgaatctaatcgaatcaaatggaatcggatcgaatggaatcgaatggaatcaaatggaatcgaatggaaaaaatggaatcgaacggaattgaacggaatcgaatcaaatggaattgaatggaaaaaatggaatcgaatggaattgaatggaatcgaatcgaatggaatcgaatggcatcgaatggaatcaaatggaatgcgctgaagtggaatggagtggaatggaatggggtggaatggaattcaacggagtggagtggagtggaatggaatcaaatggaatggaatgggaaggaatggaattgaacggagtggagaggagtggaatggaatgcaatggaatgcaatggaatggaatggtgaaatgaaatgtgagctgagattgtgcagtgcagtgaagcctgggcgaactagtgagatcctgtaaaaagaaaggaatgaaattgaatggatttaaaatggaatgtaatggaatggagtggagtggagtggagtcgagtggaatggagtggagtggaatggaatgggaaggaatggaattgaacggagtggagtggagtggaatgaaatgcaatggaatggaatcgaatggaatggcaaaatgaaatgtgagctgagattgcgcactgcactccagcctgggtgacagagtgagatcctgttgaaagaaaggaagggaatggaatggatttagaatggaatataatggaatggatttagaatggaatgtaatggaatggagtagattggagtggagtggaatggagtggagtggagtggagtggaatggagtggagtggaatggagtgcggtggaatggaatggaatggagtgaaaagaagtgaaatggagtggggtggaatggcatggaatggagtcgagcggagtggagtggaatggagtggagtggagtggaaaggaattgagtggaatggaatggaatagagtggactggaatataatggaagggaatggaatggagtggagtggagtggagtggaatagagtggactggaattgaatggagtggagtggaatggagtggagtggagtggaatgtaatgaaatgcaatggagtggaatggaatggaatggaatggaatgcaatggaatgggatggcatggaatggtgaaatgaaatgtgagctgagattgtgcactgccctccagcctgggtgagagagtgagatcctgtcgaaagaaaggaatggaatggaacggatttagaatggaatggaatgaaatggaatggaatggaatggagtggactggaatggaatggaatggagtggaatggaatggagtggaatggaatggaatggagtggaatggaatggagtggaatggaatggggtggaatggagtggagtagaatggaatggaatcgaatgggatcaaatggaattgaatcgaatcgaatcaaatggagccga

SEQ ID NO: 30749 - DNA, 840 bp, Artificial sequence
  DNA replication origin
gagtggaatagagtggactggaattgaatggagtggagtggaatggagtggagtggagtggaatgtaatgaaatgcaatggagtggaatggaatggaatggaatggaatgcaatggaatgggatggcatggaatggtgaaatgaaatgtgagctgagattgtgcactgccctccagcctgggtgagagagtgagatcctgtcgaaagaaaggaatggaatggaacggatttagaatggaatggaatgaaatggaatggaatggaatggagtggactggaatggaatggaatggagtggaatggaatggagtggaatggaatggaatggagtggaatggaatggagtggaatggaatggggtggaatggagtggagtagaatggaatggaatcgaatgggatcaaatggaattgaatcgaatcgaatcaaatggagccgaatcaaatggaatcgaatggaaaaaaatggaatcgaatggaatcaaattgaatggaatcgaatggcatcaaatggaatcgaatggaatgtggtgaggtggaatggagtggaatggaatggggtggaatggaattcaatggagtggagtggagtggaatggaattgaatggaatggaatcggaagcaatggaattgaaaggagtggagtggagtggaatggaatggaatggaatgcaatggaatggaatggaatggaatgcaatggaatggaatggtgaaatgaaatgtgagctgagattgtgcagtgcagtgcagcctggttgatagagtgagatcctgttgaaagaaaggattggaatggaatggatttagaatggaatgtaatgtaatggagtggagtgg

SEQ ID NO: 30750 - DNA, 938 bp, Artificial sequence
  DNA replication origin
atcgaatcgaatcaaatggagccgaatcaaatggaatcgaatggaaaaaaatggaatcgaatggaatcaaattgaatggaatcgaatggcatcaaatggaatcgaatggaatgtggtgaggtggaatggagtggaatggaatggggtggaatggaattcaatggagtggagtggagtggaatggaattgaatggaatggaatcggaagcaatggaattgaaaggagtggagtggagtggaatggaatggaatggaatgcaatggaatggaatggaatggaatgcaatggaatggaatggtgaaatgaaatgtgagctgagattgtgcagtgcagtgcagcctggttgatagagtgagatcctgttgaaagaaaggattggaatggaatggatttagaatggaatgtaatgtaatggagtggagtggagtggcgtggattggactggagtgcagtggaatggagtggtatggattgttatggaacggaatgtaatggagtggggtggaatggagtggactggaatggagtggaatggaatgggatggaatcgaatggagtggagtggagtggaaatgtatagaatggattggaatggaatggagttgactgaagtggagtggagttgagtggagtggaatggagtgtagtggaatggagtggaatggagtggagtggagtggagtggagtggagtggagtggaatggaatggaatggagtggagtgcagtggaatggagtggattggaatggaatggaatgaagtggaatggagtggagtggagtggaatggaatggagtggaatggaatggaatgcagtgaagtggagtgcagtggagtggaatgaagtggaatggaatggggtggaattgaattgaatagcgtggagtggagtgtagtggaatggagtgtagtggaatggagtgtagtggaatggaa

SEQ ID NO: 30751 - DNA, 1048 bp, Artificial sequence
  DNA replication origin
ggtggcaggggcaaaaagccgcggcggcgccggcaaaaagccgcggcgacgggggcaaaaagccgcggcggcgcacgcagaaaaccacaaaaagccgaggcggcaggggcaaaaagctgcaaaaagctgcggcggcgggggcaaaaagccgcggcggcgggagcagaaagccgcggtggtggggtaaaatgccgcggcgacggaggtaaaaagccccggtggggggagcaaaaggtcgcaaaaagcctcggcggcgggggcaaaaagccgcggccgggggaaaaaacccgcggcggcgggggcaagaagccgcgtaggcaaaagccgtgggggagggggcaaaaagccgcggcggccaaaatctgtggcggcgggggcaaaaggtcgcggcgggggcaaaaggccgcgacggcagggggcaaaaagccgcggcggtggggggaagaaagccataaaaagccgcggcggtgggggaaaaagccgcggcggcaaaaagccgcggcagcagggacaaaaaggcgcagtaggagaaagctgcgtcggcgggggcaaaagccacggtgggagaaagctgcggcggcgggggcaaaaagcctcggcggcgggggcaaaatagtggaaatggggtagaaggcggcacagcttggcattgctggagtgtgatgtgataggaaaagtgcagtcgaagacaaaaaaagatgtaaataggcttaacttagtgcagctaagaacccagatgttatcttgagggtattaactaataagcagtttaaatcagaatggcacattctgatttgttttttgtatgttcacatttggcaggcatagatactgtttgaagagaggaaagtcaatagatagaggtaacaaacttaaatatgtgccaagtctagaaacaagagactaaggggataaggacttttcaaaataaaatgcaagatttgaaaactgattggctgggggatgaggaaaaggcaggtctttaaggtcaatccctgttttgctttaagttgttagggggtggttttatcacatattatagaatatg

SEQ ID NO: 30752 - DNA, 1319 bp, Artificial sequence
  DNA replication origin
aaaatgaaaagtctcccatgtctacttctttctacacagacacggcaaccgtccgatttctcaatcttttccccacctttcccgcctttctattccacaaagccgccattgtcatcctggcccattctcaatgagctgttgggcacacctcccagacggggtggtggccaggcagaggggctcctcacttcccagtaggggcggccgggcagaggcgcccctcacctcccggacggggtggctggccaggcagggggctgacccccccacctccctcccggacggggcggctggctgggcagaggggctcctcacttcccagtaggggcggccgggcagaggcgcccctcacctcccggacggggcagctggccgggcaggggggctgacccccccccacctccctcccggacggggcggctggccgggcggggggctgaccccccccacctccctcccggatggggtggctgctgggcggagacgctcctcacttcccagatggggtggctgccgggcggagaggctcctcacttctcagacggggcagctgccgggcggaggggctcctcacttctcagacagggtggttgccaggcagagggtctcctcacttctcagacggggcggccgggcagagatgctcctcacctcccagacggggtcacggccgggcagaggcgctcctcacatcccagatggggcggcggggcagaggtgctccccacatctcagacgatgggcggccgggcagagacgctcctcacttcctagatgtgatggcggctgggaagaggcgctcctcacttcctagatgggatggcggccgggcgaagatgctcctcactttccagactgggcagccaggcagaggggctcctcacatcccagacaatgggcggccaggcagagacactcctcacttcccagacggggtggcggccgggcagaggctgcaatctcggcactttgggaggccaaggcaggcggctgggaggtgtaggttgtagcgagccgagatcactccactgcactccagcctgggcaccattgagcactgagtgaacgagactccgtctgcaatcccggcacctcgggaggctgaggctggcggatcactcatggttaggggctggagaccggcccggccaacacagcgaaaccctgtctccaccaaaaccagtcaggtgtggcagcacgtgcctgcgcactcggcaggctgaggcaggagaatcaggcagggaggttgcagtgagccgagatggcagcagtacagtccagcttcggctccgcatgagagggagaccgtggggagacag

SEQ ID NO: 30753 - DNA, 865 bp, Artificial sequence
  DNA replication origin
ccccgtctgagaagtgaggagaccctctgcctggcaaccaccctgtctgagaagtgaggagcccctccgcccggcagctgccccgtctgagaagtgaggagcctctccgcccggcagccaccccatctgggaagtgaggagcgtctccgcccagcagccaccccatccgggagggaggtggggggggtcagccccccgcccggccagccgccccgtccgggagggaggtgggggggggtcagcccccctgcccggccagctgccccgtccgggaggtgaggggcgcctctgcccggccgcccctactgggaagtgaggagcccctctgcccagccagccgccccgtccgggagggaggtgggggggtcagccccctgcctggccagccaccccgtccgggaggtgaggggcgcctctgcccggccgcccctactgggaagtgaggagcccctctgcctggccaccaccccgtctgggaggtgtgcccaacagctcattgagaatgggccaggatgacaatggcggctttgtggaatagaaaggcgggaaaggtggggaaaagattgagaaatcggacggttgccgtgtctgtgtagaaagaagtagacatgggagacttttcattttgttctgcactaagataaattcttctgccttgggatcctgttgatctgtgaccttacccccaacccggtgctctctgaaacatgtgctgtgtccactcagggttaaatggattaagggcggtgcaagatttgctttgttaaacagatgcttgaaggcagcatgctcgttaagagtcatcaccaatccctaatctcaagtaatcagggacacaaacactgcggaaggccgcagggtcctc

SEQ ID NO: 30754 - DNA, 1842 bp, Artificial sequence
  DNA replication origin
ctccagcaggcagaaggttgcggcctcttccagttctctaagctgagcaaagagccgctccccgacttgacacagcagagcctgaaatgacctgatgcgacctcaccatgctttatataccgaggttatgcaaatgccgttcctggactacatattctgattggatgagagaaaaacctctaggcctactctgattggactttattttcatgctgtgattggttgtgttaagacttgctctcatccaatcagaacatgatcataaagtccaatcagagtaagcctggaggttttttctcatccaatcaaaacatgcagtccaggaacctccgtgggcatagccgcagtatataaatgatgctgaagagcagtcaggtgttttcaggttcctgtgtcttcccgttgagttgctcgctccacggcatggaggactaggaatcaggagtcagtggccgtatgctggaggctggagccgcgggagcgcggctcgcctcgctgcggttgttggcagcgacggagataggagtgcggctggagcggtaggagaaggaaaacagttttgggatagatggaggggagtaaagagggtagttagtgccaaaggcagaaaaggatagcttagccggagaaggggcgttgcaaaaagatggcggcgaaaagatggtggggaaaaaagtttttgggtaaatggaggcggaaatacagggtggggagcgggagggaaggaaggttttgcagaaagacggtgggtaaaaagtttcagggtagatggagggggaaaagagggtggcaagtgggaggaggaaagagaggaaggtgatgggggaaaaggggggcgagcagtagggagagaaggctttgtgaaaagacagtggggagaaaatacagtgtgggggaaagtttttgggtagaggagcaaaagagggtagcaagtgggagaaagaaaaagagggtagccagcaggaggaagacaaggttttgtgaaaagacagtggcagaaaagaaagatggtggagaaaggaaagacagtgggtaaaaagtgttttgatagatggtgggggaaagagggtgatgaggaggaggaaagagggtggccagagggagcaggcacagaggattgggaaaacgacggaaacatagtttggtgtagatggagggcaaaaaagagggtggcaagcaggatagggaaaagaagagcatgagtggtaaaggggggagactttgaaaagatggtgggaaaagttttggggggtagatggagaaggaagagagggaggtaggcaggagtagggagaaggctgtgtgaaaagatggggggaaatgtttttgggttgatggaaaagggaaagagaatagcaaggaggaacggggggaaagacgatgaagaaaagagtttttgggtagatgaagggggaaaagagggtggcgagcagtaggagtggggagaaggttttgggaaaagatgggggaaaatgtttttgcttagatgaaggagcaaaagagggtgatgagagcaggagggggaaaaagggtggccagggataaggggaaaagatggtgggaagaaacagtggggaaggggtttgggtaaatggatggggaaaaggtgttgagcaggagagtagagaaggctttgtgaaatgatggtggggaaaaaaatggtgaagaagtttgggggcagatggaagaaaaagggtggcgaggggaagggggccaaaggtgctcgggaaaagaaggtagggaaataatggtgggggacaatggttttgagtagattttttaaataagatcatttgtatttttgtttttgaatagtctgagatcttcatatattttgtgcat

SEQ ID NO: 30755 - DNA, 1360 bp, Artificial sequence
  DNA replication origin
aggtcatttcaggctctgctgtgtcaagtcggggagcggctctttgctcagcttagagaactggaagaggccgcaaccttctgcctgctggaggctggaggatggatggagcctggagcctgggacactaccttgctgtggttggtggtggcgacagagcagtaagagggtggccggcagcaggagcttgtcctgctgggctggaggactaggagaaggaagaggcaccaccacatgctggaggctgaagcctggagtctgtgccaccatggctcgcctcgctgtggttggtggtgacgctggagactgcagctgggccacagtggtagaaatgtgatggggtaggtgagttttctgggctgccctgtacgcttctgggggcaagggttgggtgtccttttggtgatcactgctagaggccaccctgcctgtgtcagtggtctggttgggggcactctccagggttgcattgctggtagtggggcaggttggctggctatctggggctatactgcctgcggtggcaggggtggtggggggaggcagattgtgtacagtaatgtgtgctgctggtggctggtgaaggattaggggcactatcttctgctgcactgcccacagcagggggtgggttgggtggagttatctgggtctacaatgctggcagtggggggtggtttaggggcattgttgggtgctgcactgcctgtgactggggggtgcaccatcaggagctgaactgcccgtgatggggtggggggaggcgggtttgggatgctatctaatgcagcaacacccgtggctgggtcagattgtgggcactattgggtggtacactccctgaggtgtggggggagtgctttggggggggggcattggggttacattgcctgaaactgtagggtgtgttggatgtgctatccgggggctacactgctagtggcagggggcagattaggggtgctatgggggctacactgccagcagcattggtgagctgaggaggtggcagcagcagcgacagcagtggtctccttcttctggtggcctccaagtaagagatcgttctcctcttcccggactccagactctagaaggcaattttctcccgctcgagctagattgcacggcagggcccccacacccactgtggtttcccagcctgccgtcatgctctgtgttgcaaagaccacctaggactactgggcagggactagtaggcaccatgggggaagttggggacagggcactgtgggtggaggtgtcaggaatgggaaccagcccttgggtggggagggctggctgggtctgagtttctcctacttgggttccccgagaagggcaggcttggtggacccag

SEQ ID NO: 30756 - DNA, 1026 bp, Artificial sequence
  DNA replication origin
acactgccagcagcattggtgagctgaggaggtggcagcagcagcgacagcagtggtctccttcttctggtggcctccaagtaagagatcgttctcctcttcccggactccagactctagaaggcaattttctcccgctcgagctagattgcacggcagggcccccacacccactgtggtttcccagcctgccgtcatgctctgtgttgcaaagaccacctaggactactgggcagggactagtaggcaccatgggggaagttggggacagggcactgtgggtggaggtgtcaggaatgggaaccagcccttgggtggggagggctggctgggtctgagtttctcctacttgggttccccgagaagggcaggcttggtggacccagcaattcctggccagctggacttggccaggggccagtttcagtgaaggcattcactctctccccaggccccagttcctggccagcttttgccagaaggagaggctggactttggaaggtgggtgtgagtgccttcaatgaaacggatccctgccacctagtcaccagcgtgacaagatgaggctctaacggttccactccctgagtcctgtcttgggcttttctggctttgcctgcccaactgctccaagccaggctgaaggaggagaaggaggagtcacctgtggtacggtcgagcagatgatgtggctctgcagcttgcctcatgtgtttggtggtggtgatggagaccgcagctcaactggagcagtaggagggcacccacggggaccaggcggtaggatcctggtagggtgggctgatacattgagggtgacagtggttgtattggcattggtgctagtggtggtagcagtaggaagtctggggaacgggaagcgggagtaggagcactgcagggcctatcccattctggggcggggaggaaactttaggtgctgtaacgaaggccttggtggcagtggtggtggtacatctagggcaaagaggagtcctcccccttttcctgcagtctctggaggg

SEQ ID NO: 30757 - DNA, 1299 bp, Artificial sequence
  DNA replication origin
ctcacctcccagatggggcggctggccgggcggggggctgaccccccctccgccctcccggacggggcggctggccaggcagaggggctcctcacttcccagtaggggcggccgggcagaggcgcccctcacctcctggatagggcggctggccgggcggggggctgttccccccacctccctcccggacggggcggctggccgggcagaggggtcctcacttcccagtaggggcagccgggcagaggcgcccctcacctcccggacggggcggctggccaggcagggggctgatccccccacctccctcccggacggggcggctggccgggcggggggctgaccccccccacctccctcccggacggggcggctggccgggcagaggggtcctcacttcccagtaggggcggccgggcagaggagcccctcacctcccggacggggcggctggccgggcggggggctgaccccccccacctccctcccggacggggtggctgccgggcggagacgctcctcacttcccagacggggtggttgccagacggaggggctcctcacttctcagacggggcggttgccaggcagagggtttcctcacttctcagacggagcggccgggcagagacactcctcacctccgagacagggttgcggcccagcagaggcgctcctcacatcccagacagggcggcggggcagaggtgctccccacatctcagacgatgggcggccgggcagagacgctcctcacttcctagatgggatggcggcggggaagaggcgcttctcgcctcctagatgggatggcggccgggcagagacgctcctcactttccacactgggcagccaggcagaggggctcctcatatcccagacgatgggtggccaagcagagacgctcctcacttcccagacggggtggcggccgggcagaggctgcaatctcggctctccgggaggccaaggcaggcggctgggaggtggctgcagcgagccgagatcacgccactgcactccagcctgggcaccattgagcactgagtgaacgagactccatctgcaatcccggcacctcgggaggccgaggctggcggatcactcgcggccaggagctggagaccagcccggccaacacagcgaaaccccatctccaccaaaaaaaaacgaaaaccagtcaggcgtggcggcgcgcgcctgcaatcgcaggcactcggcaggctgaggcaggagaatcaggcagggaggtcgcagtgagccgagatggcagcagtaccgtccagctttggctcggc

SEQ ID NO: 30758 - DNA, 927 bp, Artificial sequence
  DNA replication origin
cccggccagccgccccgtccgggaggtgaggggctcctctgcccggccgcccctactgggaagtgaggacccctctgcccggccagccgccccgtccgggagggaggtggggggggtcagccccccgcccggccagccgccccgtccgggagggaggtggggggatcagccccctgcctggccagccgccccgtccgggaggtgaggggcgcctctgcccggctgcccctactgggaagtgaggacccctctgcccggccagccgccccgtccgggagggaggtggggggaacagccccccgcccggccagccgccctatccaggaggtgaggggcgcctctgcccggccgcccctactgggaagtgaggagcccctctgcctggccagccgccccgtccgggagggcggagggggggtcagccccccgcccggccagccgccccatctgggaggtgaggggcacttctgccgggccgcccctactgggaagtgaggagcccctctgcccggccacgaccccgtctgggaggtgtgcccagcggctcattggggatgggccatgatgacaatggcggttttgtggaatagaaaggcgggaagggtggggaaaaaattgagaaatcggatggttgctgggtctgtgtggatagaagtagacatgggagacttttcattttgttctgtactaagaaaaattcttctgccttgggatcctgttgatctgtgaccttatccccaaccctgtgctctctgagacatgtgctgtgtccactcagggttagatggattaagggcggtgcaagatgtgctttgttgaacagatgcttgagggcagcatgctcgttgagagtcatcaccactccctaatcttaagtacccagggacacaaacgctgcggaaggccgcagggtcctctgcctaggaa

SEQ ID NO: 30759 - DNA, 1194 bp, Artificial sequence
  DNA replication origin
gggcctccggaccctggccccgcgtcgccgctcttgcccgctgctgccgccaggaggccgctgggaggaggcgaagctggggccgcattcggaagcccagcgccgtaagggagaggcggcgcctgccctaccaaaggtgcggagttcctgcgcctccggaggaggctctgcgcagggccgcccggggcagcgtccctggggtccacccctcatcggggtgaccgcgggcctgacacaacagacggctgggccctggcccacgatccgctcccggaggcgccctgccccgggccgtgcggcgagccgggcgaggggaactccaggctgcccctgagcgccggggccacggggctaggctcgtggagaggacgcccctgccccagacccggccccggcccagcgaggaccaggcgcccccgccccaggccgcgaggggtgcggctcgggcatcacgcttcacgtagcaggcgggagccgggagcggcagcagccgcccaagtccgggctgtggactcgggcccctctgcacttttgggggcccaggaaggtgctcgccttgtccttgcaggcttggaggtgcctgttcccattgcttggcctctgctagctcccggcccccgcacggatctcgaagtggggttggggcctagcccgagggctgtcacacccccgcctggtgtgcgcatgctaggggcagtgctgacacgctccactggtttcagatcaactttggagaatttggcgatagctagttaaagccgaagatgtgcatgcactgtgatctagcaaccatatgcctcgcaaaacaggccgggcgcggtgactcatgcctgtaatcccagcaatttgggaggctgaggcgggtggatcacttgagcccaggagttttgaaaccatcctcctggtcaacatggcaagacccctgtctacaaaaaatttaaaatttagctgggtgtggtggcatgcgcctgtagtctcagctacttgggaggctgaggtgggaggattgcttgaacctaggaagttgaggcttcagtgagctgtgattgtgccaatgcactccagcctgggtggcagagcaataccctgtctcaaaaggaaaaaacacccacacatcgatacaagaattttcactgcagtgctgtgtgtaataacgaaaatgggaacaaccaacagtccattaggaaaggaaca

SEQ ID NO: 30760 - DNA, 1788 bp, Artificial sequence
  DNA replication origin
agcagaagttcctgaacaatattttgaccagtagttattttaatatctgcaagagcttttgcccaagcgagcttttgaagtgctcaccaatcgcaaaagatggcaacaagagtaatgacaaagccaatcatgggaagtttatgactaccctgatataggttcctgtaaccaacataaagcacgacagcaatgcagtacaggaagacagagactgcaaatgtaatggaattgtgcagaagcacagtcatctcctaggaggacttgactttccaatttatatcatacacattaatacctggaggtgactgaaatgatgcctgatttaacctgaatggataatcagaagtagctgtaatagtttcgtcagtaactgtaggaggacaattcacttgaatttctgtttgctcttaaaaacctccacaggtggcaaaagagaagatggaagccatctactccaggcccttgaggaagctgagcggctccctgagtagggttgaggtggatccagaaggcaacatcctctggaaggaaggagagtcaggatggtgggggcctcactatggttttgatttgcgtttccctaaagattagtgatgttgaacatcttcccaagtgcttattggccgcttgtttattttctttggagaaatgcctattcaagtcctttgcccatttttgaatcaggattgattttctatggtctagctgtagttctttatacactgtggatattgattccttatcagagctatgatttgaaaatattttctcccattctataggttgcttttttcactctgttgattatactctttgacacacccatggagaagattttaaagggcaggtagaagtcagacagtttgagcagcagcgtagtgaagagaaggcctttcaatcgaaggaaatagtctgtgcaaacacacagaggagagaaccgcaacatgcaggtagttgggtcttgctagtacactggtgaggggtaggaggtggggacaggtgagactggaggaaccacatgacagaggacggttctaggtccgccaagtagcaggacttcgttctaaggtggcactactcaaaagagtggtctgaggaccctggcccagcaccccctactaggagtttgttaaaaatgcaaattccggctgggatcctggctgatgcctgtaatcccagcacgttgccgagctgaggcgggaggattgcttgagtctaggagtttgagaccagcctgggcaacacagtgagaccccatctcaataaaaaaggataatttaaaaaatgcaaattcatggaggcccagttttgtcctgctgaatcagaatctccggggtggggccgggggatccgggttttaacctgcccccgggattattctgaggttcagtagagtttaagggaagtggaggaaccgccaaggggtcggctaaggttttggaaacatccttggtgagaaagacggcccgggttgttcttcaggccgggcaccctgggcttggctgcgtccccatcctcttccagccaccccgtccccacacgaccccgcctgagttctggccgccttccgacccctcggggcccgccctgcgccccagcctcctccccgccgtggggtccggggtcaggggcgcgcggctgcagtcaggcccacattcctcttacttcccgccattgtcctgggttcctgtggccgcgtctccacactcgctcccggccgccccacggtcccagggagtgatgactcatttcctttcctccgctgacatcatcgtgcccccagcgtgg

SEQ ID NO: 30761 - DNA, 1494 bp, Artificial sequence
  DNA replication origin
caccctgggcttggctgcgtccccatcctcttccagccaccccgtccccacacgaccccgcctgagttctggccgccttccgacccctcggggcccgccctgcgccccagcctcctccccgccgtggggtccggggtcaggggcgcgcggctgcagtcaggcccacattcctcttacttcccgccattgtcctgggttcctgtggccgcgtctccacactcgctcccggccgccccacggtcccagggagtgatgactcatttcctttcctccgctgacatcatcgtgcccccagcgtggcccggccggggcggcggcctccgccctcccaggtctcctcccagcccctctcggcgagcgggcgcaggcgcggtgcggcccttctcggccggcagggggcgccggagcccgccggggcctctagggcctccccagccacggcccgggccggcgaagagggaggggcagagagccgccgcggtcccgctctcccggggagagcctggctgggagtcagagctctcacggtaacggatagggaagctgagttccgagccttgaccaaggcagcacagcccaccctgagaagtgggggactggaattcaggacgctcggccccaggcccgtggtttcccacagacttgcaggtgttaatcctcccgcaccccctggtatgtattttcagcacaaagtctgcagacaatattcccccgatttccatcacttgtgggccctgaagcgtggtcgcccctggaaccagcaggatccgagggccacttgggctccacctgggaagcacgtggagcctgcatttattgggcggcgctgcccccggctgacctggctgtgtcgggagatgcccctcaccctcgcatccaccccggcttcccagcacccactgctggtcctcaggacccgaccctgtcccctctgccttccctgtcaggtttcagggaggcagaggaactcactcagcctgaaaatttcagatatttcataagacctagagccacgtaagagtgcgtccctttaagacacatggaagaagtcatgcaaggccacacggtgagctagagctgaaatcatacctgtcctgcctcagacctgtcacctctcatgctgcccagataatgaatgcaaaatgctccacccagtgtctgacagtagtgtaagcactcaatgaatggtagtcattgtcattaggaagctagttgcctaacttctcagagcctcaggcttcttcatctgtaaaatggacgcagtagtacgataccttattgtgaggattaaatgagctcatgcatggaaggtacttacagcagtggtgtccagcaagcatgcaacagtccaccagcgcttgggctccatgaaaggggggttctgttgtctgtttcttgtttgtttgttttgttttgtttagacagggtcttactctgtcgcccaggctggagtgcagtggtgcgatcatggcttactgcagccttgacctcccc

SEQ ID NO: 30762 - DNA, 1288 bp, Artificial sequence
  DNA replication origin
ccgagccaggagagctggaccaggagcgcccctcggcgctgcccgagccgggacgccggtagagccggccgctgagtctgccgcttccaccctcccagccgcggcagcaaagcgaaagccgcggcgacccgacggctgcggctcccggagcctttaagcggcggcgggggctgggtcagggcggccgggcatgctgggacttgtagtccacgccgcgcacctgccgccggcctccgccctcggggccccggaccgcgcccgcgccgccctccctgccctcctctcccctcccctcccggcggccgcggcgaggcaggcggtgagggccggccccaaccgggagccccgggtggagctgctccgcgccagctcctcccccaggcgccgagagtcgggggagcagcgtctccccgtccgcctccgtcccccacccggcctaggagcttcccgcgacccccggatggggcggcgccccctggacgcccggcgggtgtgcgtcccgcagttcctcagctgcagcccagccctggaagatggggaccagggaggttccaggatttgtatgtgggtttaggggctgccatctagtgggaaggggcttacagcacttctgtagctggctcacaaagcgctctactctggactgcctgcgccaaaacgattgctcaggcttggagaaagacgaagagctttcttctgaaccacatttacctgccaaaataagtgtcccattcccccgccattcccagcccaccaagccagcccagacacgggggacagcacactgaattgtcggtggcttcggagcaagtggccaggattcaaattctgactccaccacggtctagggtgagactttgggcacgttcgatttccagtgaatgcccgactctcctcatcaaataactctttaatagggttcctatgaagaatcagttaatacatgtacagcacctagattgattactggcacatgtggtcgctggataaatgttagcaattcttactatctaacctcagatctgaatgtggccctggacccaggtagtggccatggagcagtacagtactgccaaggactggtagtcctttgtcctctgtgcatttctgtgcctcctaacccagcaatcaagccttgcccatctgttcaccctcctctcccattagttcaccccatgcgttctattatctggcaaaactgaaaaaccaagtctctgatcaaagctcccacaccttcatgctttcgacatctgtcaaccagaaaaaatgtctcccctctcaattttct

SEQ ID NO: 30763 - DNA, 1580 bp, Artificial sequence
  DNA replication origin
gcattctccaagcccagcaacaccgaagtccaaccacgcacactctgccagacagcgacccctcctcccggaactgagcctcacaggccccctattgttgtcagcttaaaaactgaactttgctgagcaaacacactcagctgtgttcaaaaaatcagtttctctcaatacttggaaaactgcagcatgcatgcagaaaggccagttgtagggggttttgtttgttttttaagcaaagccttggtcagtacagctttagccaactgtaataaaaaataataatacccagcactgactgtattcttccaatgtcctgtggttttatagcttttaagaaaataaaactgagggagagtcacccccgagcatttggaatcaaacaaggattcggctttgtggcatgcctggaggaaggattggtcttgtaataattaccgcgatcacagagggccttatgacagctggcagaggcaattagcaataaggggcggggggagggtttgggggaggagaaattgaggatctaataaaacaaaacatccccagacctgcaggaggccagatgtggcagggcaagatggtgagaggttccttcttcaagacggggcagctattaactggtctgacgtttcaccgccccgtccctggccaaaatcacattcagaatccactagttgccctcatttgtgtatggacagggtgccccaacaaccctcgggctggtttttccaaatccttcagatacttccccagctataatttgagagaggaaggcccgcatatcttatttcttctttacactccagactgtctccatcagaaccctttaaacagtttcatcttcccaccaaaggcttgcttcccagcataatccttcctaagcctaaatccaatctttggggggaagcagggggagtcagcgggtaattattaatacattttaagcagcgagcctccgtggcaacgtgaaaggaaagcaccaaacgcctgaataacaaaaatgcagtttcagcaacactttttgaaaaggcggcagacaagacctgagaggagaggaaaggaagggacaggacggcgtctggggcgtgaggggaacaggggacggcaggcctgcgatcacgcttcaggggaacctcctccgtcaccctggcccacgggtgctcggctcagtcacacggggaaaagtccagcttgtgactcggtgggacaacgagtcctgcggccccgcaaactggaaatggggtgggggcggagaaggggggaaaggggatgtccgcgcgcagcccaccccgcacgggcccctcgagcctccatcccagttcccacgacgcacccgccccacaaatcctgcccaagatgagggctggtcccgggtcctccggctgccgcatcagcgagtgcaggagggaggggaagcctccaaggggggcgacgcgggctcaaggatgcaactcggccaggagtactggggcccggagggaggtgtccgggcccgctcctcgagcccagcctggtccccgacccacttacctccagggtccgtatctcctgctgggtgaggtcgttggacacagcgcact

SEQ ID NO: 30764 - DNA, 741 bp, Artificial sequence
  DNA replication origin
tttacacacgtctataggggttgattttattggtccttccatatatctttatgattagaaaaccacagagggcacttttggtagctgcccagaaggagcactcacctcatcgaggagacgtcatcaatgcggttccccagctgagactcatgggacttgctccgggtgagtgtggggaagctgggcagcagctggaagaccttgcggctgggtggggggggcgtccgtggtggcttcagcttggtgtgccgtcgcagctggggtgtggtgggcggggtgatgaagctgtgcagggcacggggggtcagccggccgctggcgtgcaggggaatacaggtgtctgagaggccctcactgaagctgggggtgggggagtctgaggcgggcagagctgacacggagatggagcgtgggccctgggcgctgttgcctgctctgcccagctgggagctccctgggggccagggcaggctggctgctgagagggtgtccgtggaaggccctgagccactttcccgccgcgcatccaatgaactccaactggagtcctccttgtgctcccctcctgtggaccaagacgtggagtcacagatggtcagggctggaaggaattcacaggggagatggctaggggccagagatgttcaacacctggtgtgaggctgcactgtttcttaagggaaggcttcaactaccaacctttacctggtttataaaggccgctcactcatgcgcacacat

SEQ ID NO: 30765 - DNA, 971 bp, Artificial sequence
  DNA replication origin
ctcgtcgccgcggcggcgtccggggctggcgttcccctggaggctggtgagccgcgctgcgcaggccgaggccgagggcgggggcgcgggggcagcggcggccggagccactgggtggcgggggcgggctagggatgtggaggcctcgggtgtcctcggatctattgaagacctaggggcgacccgcgccggcaccttttcccttgcggtctgcgctcttccaccggagagctgagtgcaccggagcgcggcgcccgggcttgacgcaggcctggccgggcggcctcggaggagcaggaaaggcctgcagcgcgagctaggggcgcgaggtccggggcagcccggaggccagcctctcagaggctcacgggcctggccacttttaaaaggagaatgtcccctccaccgtccctctgcccgcggcacccggtggccggagcaaccttgtcgtgatgatttatgcttctgcgtaagagcaagttgctccgtggccaaaaccctttcgctcctaggattgatcctttttgtggttattgttttaaaaagttttattgagatataattcacgaagcatacagttcacccatctaaagtgcacaattcagtgtcttttagtgtgtttgcagagttgtgcagctgtcaccataatgttttagaacattaccccccaaaagaaacacctcctttagctgtcactcccccctcccatctactcccattctcccagccctaggcaaccaccaatgtacttctgtctctgtacttttgcctattctggatgtttcgtataaatggaatcatacattaagtagccccttgtgactgggtttgttcacttagcgtaatgttttctgggttcacctgccataggttcttgacttcaggacagtttcctgctggctttagtttcctctggtaacttgggaatcaattgacatctatggaacttctgttatggttcaggtactata

SEQ ID NO: 30766 - DNA, 1719 bp, Artificial sequence
  DNA replication origin
ctatacccagctctgatttttctctatagcacttatcagatatattccatgcttatttatttatttatttttaatttgtttgagacagagtctcactttgtcacccaggctggtgtgcagtggcaccatctcagctcactgcaacctccgccccccaggttcaagcaattctcctgcctcagcctcccaagtagctgggatcacaggcgtgtgccaccacacttggctaatttttgtacttttaatagagacgagatttcaccatgttggccaggctggtcttgaactcctgacctcaggtgatccacctgcctcagcctcccaaagtgctgggattacaggcatgagccaccacgcccagcctccatgcttattgatttattttctatttcctgtcactagaatgtgagctctatgagggcaagggttttgcctgtttgttcactgccctatcccagtccctagatgagtgcctggcacacagcagggacttcataaacgcttgttgaatgaggatcgaattactcttgctgtatgaccatctgctgtctgcaggaccctgggcatgaggaaatgcctgcaggcggaagggcagtgggccagtgctgcacagtgcacgatgatcaaagagagggcttatgtgtggggagtgggtacgggcaggtgggtgatggggtgcaaaattctagacctctaaggatgaatggcagaggccacacccccttgatgagtgacccttgagcccaccggacaaggggaatggttggctagggtccaggtccatggtctccctgacttagggtggccttgcccggggctctgagaatggggccaaggaagccctagtgattctgtcccctacccttcaaggacaagttggaggcaggccctggtctcaaacatctacaaaaacaattgtgtctgaactttctgccctcacagatgtcagccccccaacccccagacatgtctcatgaccactgagtcatgcatcaatgatgggtgtgggtgtgtggatggatgtagccaagcccattgaccgaggactgagacatactccccactaatcaacaagttaacaagctctctgatgaggaggcagtgattaatgaaccaatcggcttgccctgtaagtggggagtgaaattggagggtgggagtatgatggatagggagggcttggagggatgtgtgaggctggctcctggtccacactgagactatctgggtgcccatttactttggctataaatgaggaagtgacttcttcagaggttgtagcccaaattcaggccatcccataccctttagcttctataatgtctctcctgtcttcccatctgtccttggaccccatattccccaagacatgacggggttccagggatgtcagattccctgtggacatctcacaggctccatctctctgcctggaatcagtgcactagaaactccctatccccccatggttagtgctgcagggtcagaagagcaaacaggcccctactctctggtatccttgcccccattagcctgcagggtccttctgtaggccctgacccctgggatcacagatgtactaacaggctcccactgccccctccatcccagggtgagcacctgtcttttgtctttccatggaggagtggaattctttgatttctgctgtcacccctccaaacaggacaacagctgtctctctgtttgtctctctgtatc

SEQ ID NO: 30767 - DNA, 1655 bp, Artificial sequence
  DNA replication origin
ggccgggcggggggccgacacccccacctccctcccgggcggggcggctggccaggcggggggccgacccccccacctccctcccggaaggggcggctggccgggcggggggcggacccccccacctccctcccggatggggcggctggccgggcagaggggctcctcacttcccagtaggggcagccgggcagaggcgcccctcacctcccagacggggcggctggccgggcggagggctgacccccccacctccctcccggacagggcggctggccgggcggggggctgacccccccacctccctcccggacggggcggctggccgggcagaggggctcctcacttcccagtaggggcggccgggcagaggcgcccctcacctcccagacggggcggctggccgggcggggggctgacccccccccacctccctcccggacggggtggctgctgggcggagacgctcctcacttcccagatggggtggctgccgggcggagaggctcctcacttctcagacggggcagctgccgggcggaggggctcctcacttctcagacggggtggttgccaggcagagggtctcctcacttctcagacggggcggccgggcagagacgctcgtcacctcccagacggggtctcggccgggcagaggcgctcctcacatcccagatggggcggcggggcagaggcgctccccacatctcagacaatgggcggcggggcagagacgctcctcacttcctagatgtgacggcggctgggaagaggcgctcctcacttcctagatgggatggcggccgggcggagatgctcctcactttccagactgggcagccaggcagaggggctcctcacatcccagacgatgggcggccaggcagagacactcctcacttcccagacggggtggcggccgggcagaggctgcaatctcggcactttgggaggccaaggcaggcggctgggaggtgtaggttgtagtgagccgagatcacgccactgcactccagcctgggcaccattgagcactgagtgaacgagactccgtctgcaatcccggcacctcgggaggccgaggttggcggatcactcgcggttaggggctggagaccggcccggccaacacagcgaaaccccgtctccaccaaaaccagtcaggcgtggcggcgcgtgcctgcaatcgcaggcactcggcaggctgaggcaggagaatcaggcagggaggttgcagtgagccgagatggcagcagtacagtccagcttcggccccgcatgagagggagaccgtggggagacggagagggagacggagagggagacggagagggagagggagagggagagggagagggagagcaacaagctcttaaacatgtgagaatcctttgtggtcatttgttacagcagccccaggaaactctcagtcactcttttatgggttcaatcacctgcattctccgcagatggctccttatcagccagtcaggccccatgggaccacacatcccaggaaacaccagggtgccctgctgagcatggaggtggaagaggacaccaggacaaggggacatagatcctacctttgaaggaaggagaaaaatcattcttcttagggacccctcatccagggggcaaggcacggccct

SEQ ID NO: 30768 - DNA, 950 bp, Artificial sequence
  DNA replication origin
gcccggccagccgccccttccgggagggaggtgggggggtcggccccccgcctggccagccgccccgcccgggagggaggtgggggtgtcggccccccgcccggccagccgctccgtccaggagggaggtgggggggtcagccccccgcccggccagccgccccgtccgggagggagttgggggcggtcagcccccctgcccggccagccgccccgtccgggaggtgaggggcgcctctgcccggccgcccctactgggaagtgaggagcccctctgcccggccagccgccccatccgggagggaggtgggggcgtcagccccccgcccggccagccgccccgtccgggagggaggtgggggggtcagcccccctgcccggccagccgccccatccgggaggtgaggggcgcctctgcccggccgcccctactgggaagtgaggagcccctctgcccggccaccaccccgtctgggaggtgtgcccaacagctcattgagaacgggccaggatgacaatggcggctttgtggaatggaaaggcgggaaaggtggggaaaagattgagaaatcggatggttgccctgtctgtgtagaaagaagtagacatgggagacttttcattttgttctgcactaagaaaaattcctctgccttgggatcctgttgatctgtgaccttacccccaaccctgtgctctctgaaacatgtgctgtgtccactcagggttaaaaggattaagggtggtgcaagatgtgctttgttaaacagatgcttgaaggcagcatgctcgttaagagtcatcaccactccctaatctcaagtaatcagggacacaaacactgcggaaggccgcagggtcctctgcctaggaaaaccagagacctttgttcacttgtttatctgctgaccttccctccactattgtcccatgaccctgccaaatccccc

SEQ ID NO: 30769 - DNA, 1372 bp, Artificial sequence
  DNA replication origin
gtgtgccaggctggatacacaggtagctgactcagctgcttctggttgggggactggcttctgcctcctcctgcctcttttcccaactctttaatggagagagaacataacggagtgttcagagaggcctctcccccaggatatcataaactgcaggccaggagcccaaggtcaggtgctcccacccctgcctccaggagaaagactttcccccagaggtcctgtcactcctcagcccttctccaaggtattactgagcagaggctgaaaagagttgtgttttggaaagagtggtcacagatcccacaggctggaagaaatgtgtctaccctcccaccccccactcccaccatggactggctagggaagacagaatctcattcctggtcctaggggctgccccaggagtctaatccaaccacttcacttcctcaggaggctggacctgcccctgcggggctgtgggctgaacacagggttcaggctaggtaccccatccagtgggaccccaaatctgagcatggcagctgccccctgagctcctatgaggtggagacgtcacacagtggctgagcgtaagctcaaggatctggtgcgggtggaaggaggaagaagggcgcaccccctgctggctccccctccccgtgggactccctttcctttccaggcggggatataagccccgaaaggaaagccctgagcagaggaggcctcagcttgacctgtcccagtgcgcccttgaaactttcctcgccttccacctcctgctcatctgcttcacaagctgtcgctgtgagtggctggagctcaagcatggtctggtactaggaaatccaggctgttttgtggggaaactgaggctgggatggtggaagctgggggtgagtggtgggaaactggattggagggggccattggaggtgggaaggaggcccgggagtcccgttgccagcacaaccctctttaatctacctctctggacagcagcgggggtgggggtggggttacgtcaggcagggcttatgtccctctgacagattaggaaactgaggcaggagacggtgcagtgccggagaacatatggcaagctggtggctgaaccttggtccgctaccagccccagggagagcaccggagcacggccccgacggcagccgcagcctcccgccgtggagggtcgaggctcggaatgacccacaccccaatgtcgccttcccaggtggtgtcggttcgcaggtcgtggcctctcatggccacggtgcttttggccctgctcgtctacctgggggcgctggtcgacgcctaccccatcaaacccgaggctcccggcgaagacgccttcctggggtagctgagccgctgctacgcctat

SEQ ID NO: 30770 - DNA, 866 bp, Artificial sequence
  DNA replication origin
ctcactgcaagctccgcttcccgggttcacgccattctcctgcctcagcctcccgagtagctgggactacaggcgcccgccaccgcgcccggctaattttttgtatttttagtagagacagggtttcaccttgttagccaggatggtctcgatctcctgacctcatgatccacccgcctcggcctcctaaagtgctgggattacaggcgtgagccaccgcgcccggcccccacgtacttcttgatcgagcctaaattcagccagctggcggccctggactgctgcggcacctgcagcccctcgcccagggcgccctccggcggcagcagcacccacacgaggccggccacgaccagagcgcatgagcagcgcagagcccgcgtctggagggggcagggcggacagagccgcgggcggtcacgtgaccccacggctggggtcggcgcgatccctgacggtagcttgcgggtgttccgcgccgtgggcagcctggcgtgcaggggcgctcagccgagggacgtggctatttctgggacacacaccagtgcacggacgccctaagggacatcctggtgcccaggggaatggtgcacacctggacatgcccggtgatgcacgcagaaagcatcgaggtaaaaatgaacggggagacacctctaaggtgtacgcacgaggacggcataaaaccattggtcagctccctaatctcaccgacctctctcccgcaaattccttatcgccctcctttctccctgcccttccctcaaagtgtcagtcaggttgtcctcagcccagaagactcttcctccagacatcctcatggccggctctgtcgccccctggaggcattagctcaaaatccacct

SEQ ID NO: 30771 - DNA, 1153 bp, Artificial sequence
  DNA replication origin
gggcaggagccagggagtaagaaagtggggaaatggaggcaggaagtgtagacagctggtcacgaaggggagaagacatggggcagtagctggagagagatgcactcgagagtttattttgcaggtgagaaagacttgagctagtttagttttgacagtgggagaggttacccctactcgagaagagcaggaaatgcggctcaaagccctggaggaggcggagggaatggaaggattggggtgggttaggtgggtgcactgcgctccgcccagcttccccttcccttggggcgctgtgggctaggacagagggattatggcagtgttgaaggcccagctgaggtggggggccgctgacccggaggccccaatctcttaggctgtgtgctttgcatttctctagtgcggggtctacccagaagaaggctgttggacccctacagagtttgggttcagaaaagcgaaaggtggctttgaagagctgaagaagagtgattgaggtgcagaaggttgcagttcaagctaggtagggggagagggagaggtgaggccaaagggggctgtaagacagggagacagtggaggcctgctgaggaacacgtgccagcgtgatgggagtcactgggccggaagggtgggagcttatgaggagggcgtgcaatacctgaattcctggggtcaggaagaggttctgcccgtgggagtgtgcggctgaaatggagtggaggggaaggtctttggagatgaggtcaagggaaggccacccagggtggtggtggcgaaaatgccactgcacacgggggagtaaccagaaggaaggtgagcatgggatgagagtggaggggaaactgtgtggacatggccttgcggagggaggaggccgcttatcctgaccttgaagggtgcgagaaggtgaatagcctgcgctggagagggctgtggggaagctgagtcctcagccaagtgccagttactgggggaggtaacagtggaggggtttggctggagaggaggaggagcaggttggaaggagacagtaggagaaatgtggaggtctttgggtggggagcaggggatgaacagcatgggtggctgagcatcgtgagggcacacagttctggcgtcccccaagtctcaggtcagccttgcccag

SEQ ID NO: 30772 - DNA, 1691 bp, Artificial sequence
  DNA replication origin
cgcaccggaagttgctctgagctccggggtgggaccaggcgggccaagagggccgggacgccgcgcggggcagtgtgggactggggcggaacgccgcccggccgcgggtcgggctctgtgtcagcagccgggcgggcgctcgggcgggacatggcagcctgtacagcccggcgggccctggccgtgggcagccgctggtggtcccggtcgctgactggggcccggtggccaaggccgctctgtgcggcggccggagctggagccttctcgccagcgtcgaccacgacgacgcggaggcacctctcgtcccggtgagggacggagccagggggcgcgaggaactgggcctggagcccagagagcgtgttcctagccagtgcggaggccaggggcccgggcctgctgagggtgactggagtttgacccgggagagggtcccgagcagggagccgacctgcgctgtctgggacatgtgccaggagcagggaagccagcgcggcccagagccctggttgtacagggctggccctgggggggaacaggttaccctccccaagtgaatcctacttccccggctggggtccccagcaccgatgtcagagggaagctttttaattcagccctagggcattggcttgaaccctcagcctttggatttggtgaaggtctgcctcagaaagatgctagaggtgggaaacgagactcttgggtgtggaccctcgtaggccccaggtttccaagtgactttggggagatcgattttctatctgtgacttggggaagggggtttgaggccatggggatggtgtggaaactgtttccacggatgggacaggcggatcaaatgggctggtggatcagtgggaggaagcataaagttcacatcttcaaaacagtaaaaacagcctttatttgaagggcccctagaaagagcagccctgttcagagtggtgactgacattttagtggctgatattagacactgaacattggggagagatgatagctatttgcaatttaagacccctgtgagaatatgaacaaaaacggtattgagagagcgatgtgccgtaggaaatctagagatgtttaagcttttcaagggcaatgtaagggctacaggttagagggggagatggacatggaattataatacaggacaaatattttttgagcacctcttgtacactaggctctgagggggcagtaccagctaatcagactcaggcattgctcccagggaatttacagtatttaataaagataagacatggacacaactgaaatgtaaagggagcaggatattgtttgatgacttgtgatatagaaaatgtaagaaaagaagaaaaaaagatactccccttctaaaaaaattgaaaaagtgagcaagacagttaaagtgctgtgggaggtcaggagggtgggttagggaagaaacaagggcaggggtacatttgagcagagtgtgagggcatgatatgaagaatgcccagtgaagagagaagacagtagtatgggagcggtcacatctaacactgggagactgtggaggttttcaccaaggaggaggaaagcctttcctgctccagctggtcccactaccccaaacccttctctgctgtcatcgccctggcccctcagtatcctaggagctttttcttatggataactaccattaccttctcagcttt

SEQ ID NO: 30773 - DNA, 783 bp, Artificial sequence
  DNA replication origin
caggatctgctccagcaggcgcgcggcctgcacacgcgtctccaactccggcgcctgcagcagccgcaacagcaggtcgaggccgccatcgaggcggatggcgtcgcacagaccctgggctacctcgcggcccacggccggcagcagccaggcctcctccaccagttggaagacctcggccaggccggcgcccacggcccgcgcgccgcccgcctgcttcagcgcggacaaggcctgctgcagctccggcagcgcgcgctccagggcgtcctgcacctcggtgcctgcccccggcgacacttcgcggggcccgcggccacccgcagcccaccatgggcccgtgccaccgcccccatctggcccaggcaccgccagccgctcggcgcccggccgtgggcccgacatggcgaagaagcgacacagcttgtaggcggagagaagcagcgtcaggaccatgggcgcggggccgcgggggacatccccggcctggaggcggggccacgcggagagacccgggttttgggaaaagagggacccgagaggggtcggggaaagaagatggagggggaggaatggagagaagggtaccaggcaagggtgccggtcagaagtttgggggaggagtgtcggcaggatcgggggagcggttggcaaaggtgatgcaggcccagatgcagggagtgggcgaaaggagagagcgagcaggcgagggatggctccggacgccgtagggtagaggaggcggcggctggaacaaagcgtggcctgggcacgggctcggct

SEQ ID NO: 30774 - DNA, 1386 bp, Artificial sequence
  DNA replication origin
caaaacccgggtctctccgcgtggccccgcctccaggccggggatgtcccccgcggccccgcgcccatggtcctgacgctgcttctctccgcctacaagctgtgtcgcttcttcgccatgtcgggcccacggccgggcgccgagcggctggcggtgcctgggccagatgggggcggtggcacgggcccatggtgggctgcgggtggccgcgggccccgcgaagtgtcgccgggggcaggcaccgaggtgcaggacgccctggagcgcgcgctgccggagctgcagcaggccttgtccgcgctgaagcaggcgggcggcgcgcgggccgtgggcgccggcctggccgaggtcttccaactggtggaggaggcctggctgctgccggccgtgggccgcgaggtagcccagggtctgtgcgacgccatccgcctcgatggcggcctcgacctgctgttgcggctgctgcaggcgccggagttggagacgcgtgtgcaggccgcgcgcctgctggagcagatcctggtggctgagaaccggtgagcgcgccaggccggggttgggagagcgccgcgtggtgtggacagttaagcgcctgcgttcccgtgtgccttgcgccgtgcctttgcctccctcacctctctgactgcctgcactacatctctgttaggggtcagcctgtctgtttcacagataaggaaactgagccttgggaaagtttagtgacttgctcagtggatcacagtgaactaagatttgctcccagggctagtggggtgaggaatggagttacaggacaggagtccgtccctggctctatggatggagatggcatcctattgccaattctccctctcccccgccccccaagcccacagctctccttcccaccggcttgggttcccgtctatgacaccttctctcgccatcatcccatccctctcccaatgagagaagaagggaaacacaacgctcagaaaagagggagggagacctctcctttccctcctccccaggctgtaaggcgtgctggcctgaggctgcttactcccttcttgccgccccaatccaacttctgctccatccttcattctggttcttgcaacaggccagacatgatctcattctgcagctgctgatgggaaacagttttctgctgggaggcatgggtgggggaagaggacaccggggtgcagagcccggcggggaccaggcagagtgtgtgttctctcccttcaccccacttagcaccaagatgccgcaagagggtcaaacagaggcctggttgccactcttgcatgtctcttgggatctctcctggagtatgaagacctccaaggactcactttccctcccttctgatgccagagcagaccaagctgtcacact

SEQ ID NO: 30775 - DNA, 1502 bp, Artificial sequence
  DNA replication origin
catgccagaggctggtggcggccggcggcctggacgcggtgctgtattggtgccgccgcacggaccccgcgctgctgcgccactgcgcgctggcgctgggcaactgcgcgctgcacgggggccaggcggtgcagcgacgcatggtagagaagcgcgcagccgagtggctcttcccgctcgccttctccaaggaggacgagctgcttcggctgcacgcctgcctcgcagtagcggtgttggcgactaacaaggaggtggagcgcgaggtggagcgctcgggcacgctggcgctcgtggagccgcttgtggcctcgctggaccctggccgcttcgcccgctgtctggtggacgccagcgacacaagccagggccgcgggcccgacgacctgcagcgcctcgtgccgttgctcgactctaaccgcttggaggcgcagtgcatcggggctttctacctctgcgccgaggctgccatcaagagcctgcaaggcaagaccaaggtgggtgcagatgtggggttgggtggatcaggggttagagagcctttgggaaggtttcccagaggaagtcacattcaaccgggtcttgaaatacacatcagaattagatgaagcaagacaaaggaggagcgggccagtcattttggcgttgaaggcaaacccgaagtttggacttggttttgggggcaagaggaagacactaagaagcttttaagcaaggggacacttgtgttttacaaagatcatcctagctgctgtgtggaaaggggcttggcaagggtgaggacggaggcaaggcaacccaataaaaaactatgacttgcaggggtgggcgttgggggaagggggagacagcgatgccagtggcagagagcagattcaagagatgtttaagagatggagttagcacttggtggctgggagaaggagaaagaggagctgaggatgactcctggccctgaacataggcaatgaataaagtgaactgggtgagagacaagtggaagtggggaaggggaagaaagtgacttctgcaggacatatggagtttgagatgcctgagagatgcccagctggggagcttcagtgggtagtgtagccttttgagtctggagtcaagatggctgttagagacagaggcttgcggcttgggacaggacatcagtgtgtcagccagataacccccatcggagtcccaaggggtcctcatgtccagggcctaatccaccagtgacctttgcccactgctttaacttgctgtgtgaccttgagcacctggcttcccctctctaggcctctatctgggcctcatttttatcttctggaaaattcagtaaattggaccacagcagcagttcttaccctagatgtgggatagttttagcaccacaagtttgtggattgtactttttggaaacagagatctactatattgcctaggctggcatcaaactctcaggctccaagcgatcctctctgcctcagcctcccaagtagctgggacta

SEQ ID NO: 30776 - DNA, 1531 bp, Artificial sequence
  DNA replication origin
aaatgttacaggttgaagattctccctacaatatcactctctcttctttgcatttttttgtggaggcttggaggttggtgatagctggtgcacagagatgtggtgcataccccatgacccaccttgtctgtaccccagctgtcatctgggggtgctcaaaggagtgtgtcttacagatgattgtcacccatcatgtatgtccctgcagatcaaaaagagactgctggctgggtgaggtggttcatgcctgtaatcccagcactttgggaggccgaggcaggtggatcacttgaggtcaggagttcaagaccagcctggacaacatggtgaaactctgtccctactaaaaatacaaaaattagctgggcatggtggcaggtgcctgtaatcccagctactcgggaggctgaggcagaagaatcacaggaacctgggaggcagaggttacagtgagctggaatcgcaccactgcactccagcctgggctacaaagtgaggctccatctcaaaaaagaaaaagaaaaaggagactgctatgttaggggggtctctggggcctctttcaacatccagtgttctaggaacttctgattcttctctctgcactccagagctgggtcagggaggacctgctctacaaggcaggtcattttgcttagggaaaagggtcttaaaggaagtagggagtgaggaccccaaggattggatctgggccgcaaccatgatcaccagcctgtcacccctttcccatcgaggccaagtgagtgtagttcaacaaagacatctcgagtcccactctgtgtccttcatcgtgccagatgcaggtttccagtagtgactaagacatgtcctcagcttatactccagtggaagttgcatcgtcaaccagtgacagtggcattcagagtgtggtataagacctcattggaggtgtgggccaggatgtgggggaatcaaagcaggctgcatgaaggaggtgctaatcaatttggattctggtggatgagtaggatttccgtggagtgggaggattcccatgagcagactggaagaactaagggtttggaaacatagtgggccaagacccagaggtgtgaaagccttggaatgtgtgcatgtgcgtgtgtgtgtgaagtgtaagttagtggaaggtgaggtgaactgggagtgatgggcagctgcactgtgccctgcctggcgctatgctgagagctcaactttattccagggccggtggatgctgtagaagggatataaaggagggataggcccctccgcccccaacccatccgagtcaggacctggtcaagaattgagagaacttcaggagggggaatccgcaggaccccatgacttagtggctgaaggtggggccagggcagatggagagactttgggttgtgagaagagacaaggagagggactgggcacgtgtgggagcacctggagagctggtgggacctacagccctctccccactccctccctaggtgttcagcgacatcggcgccatccagagcctgaaacgcct

SEQ ID NO: 30777 - DNA, 1087 bp, Artificial sequence
  DNA replication origin
gtcctctctgaaatctagacctgggtggatggggtgggctgggcttcctctgtgctcccactggagacctgggtagcttcctgccggggccgcttgcctgtttaatagcctccttcctcccaccgcctacccacctcagactgggaacttcttgaggtaaagtgcaacgtattcatctttacatcctcagagcccagtgtgacccacgtttgtgctcaatcaatccacggcgaggctggaaggctccaccccgtgtctcccctcaccattccagggccgtggctggggctggggctggggcggggtcccgggtgagcgggctgacctctggccgccgtgaggatgcgggcgcggtgcacgcccaggtggatgccgcagtcttccagcagctgctgctcagacacgcggtgcagcagggagcggtccaggccgcagctgaccaggccgtaggtgtactggcggaagcgcgggtccaggctgcccagccagtccgccaggttgctgcggtcgcacgtagaatagttggcgaaggtcttgagctccgtgagctccctaaagaacctgcaccccacggaggagaagacgctgaggtccagactcggacgggctgtgggcggagggggagcttatttagacctagctggggtccggcgggcaggaggctccgtacctcttgcgggtgatgcccgatttcatgcccaggtcggtctggagttcctcctccgtgagccgcagaagcaggtcgccatccacctgctgctcctgggggaggagtcgggtgtcaggaagggcttcgctactccgcccttggacctcgagcacaagatgcaagggaaggaactggagatggcgtggaggaggcggatgggacctagatcagagccgagtgaccctaacggtggctgcgtacaggctccccgcccccaaaagcgaccctggcgccgcgggattgcgaggcggggagggaacgcagtccctgtgcacagggcgcccgctctgactcgggggaggcgtatcccacgcgactctacccggaagctctcgcagtacttggagaaaccgatctgctgcagccacgtctgaacct

SEQ ID NO: 30778 - DNA, 918 bp, Artificial sequence
  DNA replication origin
cccgcgggctgggggtgccgggcccctcgctggcccacgcccagccaggtgcacccgcggcgagagtccggtggcctcaggtcacaggcccctccccgccggacatttaaggagggacgccgggcgcaggcgcagacagcgcaagccccacgccacgcgtcgctggtcccaggcagcgagtcgctcgcgcgccccgccgcccgcctggcgacagctccgccgcgcacgcacatggaggggagcgcgagccccccggaaaagccccgcgcccgccctgcggctgccgtgctgtgccggggcccggtagagccgctggtcttcctggccaactttgccttggtcctgcagggcccgctcaccacgcagtatctgtggcaccgcttcagcgccgacctcggctacaatggcacccgccaaagggggggctgcagcaaccgcagcgcggaccccaccatgcaggtagcggggcggcgaggagcctggcaggtggagggccctggtctggagcgtgggggcagcggaggggcggggcctgcgtaatggtagtggcgggtaactggagggagggtgcattttggatggtgggcgggaccagagcaaaggggcctgaccgagaacctcagcgggtgggatgcgaaaagctgagctaaagtctggccttgcaggttaacaaaaggggggggaaaggaaagggaatggggccttggtccatgtccttccccctctccactggcagattttgaaagctgtgctaagattctctgaggtttagggctccaaaggaagtcctcatccctgtagctcccgggatggcgaggatttggggattgtggaacccagagtgaggaaccgcaccctggtcattgtgcccctacaggaagtggagacccttacctcccactggaccctctacatgaa

SEQ ID NO: 30779 - DNA, 955 bp, Artificial sequence
  DNA replication origin
tgcccggccgagaccccgtctgggaagtgaggagtgtctctgcccggccgccccgtctgagaagtgaggagaccctctgcctggcaaccaccccgtctgagaagtgaggagcccctccgcccggcagctgccccgtctgagaagtgaggagcctctccgcccggcagccaccccatctgggaagtgaggagtgtctccgcccggcagccaccccgtccgggagggaggtgggggggtcagccccccgcccggccagccgccccatccgggagggaggtgggggggcagcccctctgcccggccagccgccccatccgggagggaggtggggggtcagccccccgcccggccagccgccccgtccgggagggaggtgggggggggggtcagcccccctgcccggccagccgccccgtccgggaggtgaggggcgcctctgcccggccgcccctactgggaagtgaggagcccctctgcccggccaccaccccgtctgggaggtgtgcctaacagctcattgagaacgggccaggatgacaatggcggctttgtggaatggaaaggcgggaaaggtggggaaaagattgagaaatcggatggttgccgtgtctgtgtagaaagaagtagacatgggagacttttcattttgttctgcactaagaaaaattcctctgccttgggatcctgttgatctgtgaccttacccccaaccctgtgctctctgaaacatgtgctgtgtccactcagggttaaatggattaagggcggtgcaagatgtgctttgttaaacagatgcttgaaggcagcatgctcgttaagagtcatcacccatccctaatctcaagtaatcagggacacaaacactgcggaaggccgcagggtcctctgcctaggaaaaccagagacctttgttcacttgtttatctgctgaccttccctccactattgtcccatg

SEQ ID NO: 30780 - DNA, 1123 bp, Artificial sequence
  DNA replication origin
aaggcagaggaatttttcttagtgcagaacaaaatgaaaagtctcccatgtctacttctttctacacagacacggcaaccatccgatttctcaatcttttccccacctttcccgcctttccattccacaaagccgccattgtcatcctggcccgttctcaatgagctgttaggcacacctcccagacggggtggtggccgggcagaggggctcctcacttcccagtaggggcggccgggcagaggcgcccctcacctcccggacggggcggctggccgggcaggggggctgacccccccccccacctccctcccggacggggcggctggccgggcggggggctgaccccccacctccctcccggatggggcggctggccgggcagaggggctgcccccccacctccctcccggatggggcggctggccgggcggggggctgacccccccacctccctcccggacggggtggctgccgggcggagacactcctcacttcccagatggggtggctgccgggcggagaggctcctcacttctcagacggggcagctgccgggcggaggggctcctcacttctcagacggggtggttgccaggcagagggtctcctcacttctcagacggggcggccgggcagagacactcctcacttcccagacggggtctcggccgggcagaggcgctcctcacatcccagatggggcggcggggcagaggcgctccgatggtgggacttctcagcctccatagttgcatgagccaattcccataacacatctctttatacatgtatacatttgtataaatagacgtgtgtgtgtgtgtgtgtgtgtgtttatagtctgtttctctggagaacgctgacaatacagcttctcaggagtaatcataaaggaggtctggtacctaatgctgagcactgttggtgtagacagtcgtagcagtggggtctgtgctagagaagccttgtggtctggtttgagtattgttaatggtagcagaggctctaagcctgaactctggctgtcccagggatttttcaaaagacttaatcaattattttctgctaaaactagttacagtaaagtatgttatttgctattaggaatgctaactgggcc

SEQ ID NO: 30781 - DNA, 1255 bp, Artificial sequence
  DNA replication origin
acacagcacatgttttagagagcacagggttgggggtaaggtcatagatcaacaggatcccaaggcagaatttttcttagtacagaacaaaatgaaaagtctcccatgtctacttctttctacacagacacagcaaccatccgatttctcaatcttttccccacctttcccccttttctattccacaaaaccgccattgtcatcatggcccgttctcaatgagctgttgggtacacctcccagacggggtggtggccgggcagaggggctcctcacttcccagtaggggcggccgggcagaggcgcccctcacctcccagacggggcggctggccggtgggggggctgacccccccgtctccctcccggacggggcggctggccgggcggggggctgacccccccacctccctcccggacagggtggctgccgggcggagacgctcctcaattcccagacggggtggctgccgggcggaggggctcctcacttctcagacggggcggctgccgggcggaggggctcctcacttctcagacgggggagctgccgggcggagggtctcctcacttctcagacggggcggccgggcagagacgctcctcacctcccagacggggtcgcggccgggcagaggcgctcctcacatcccagatggggcggcggggcagaggcgctccccacatctcagacgatgggcggccgggcagagacgctcctcacttcctagatgagatggcggccgggaagaggcgctcctcacttcctagatgggatggcgggcgggcaaagacgctcctcactttccagactgggcagacaggcagaggggctcctcacatcccagaagatgggcggccaggcagagacgctcctcacttcccagacggggtggcggccgggcagaggctacaatctcggcactttgggaggccaaggcaggcggctgggaggtggaggttgtagcgagccgagatcacgccactgcactccagcctgggcaccattgagcactgagtgaacgagactccatctgcaatcccggcacctcaggaggccgaggctggcggatcactcgcggttaggagctggagaccagcccggccaacacagcgaaaccccgtctccaccaaaaaaatacgaaaagcagtcaggcgtggcggcgcacgcctgcaatcgcaggcactcggcaggctgaggcaggagaatcaggcagggaggttgcagtgagccgagatggcagcagtacagtcc

SEQ ID NO: 30782 - DNA, 941 bp, Artificial sequence
  DNA replication origin
gatgtggggagcgcctctgccccgccgccccatctgggatgtgaggagcgcctctgcccggccgcgaccccgtctgggaggtgaggagcgtctctgcccggccgccccgtctgagaagtgaggagaccctccgcccggcagctcccccgtctgagaagtgaggagcccctccgcccggcagccgccccgtctgagaagtgaggagcccctccgcccggcagccaccccgtctgggaattgaggagcgtctccgcccggcagccaccctgtccgggagggaggtgggggggtcagccccccgcccggccagccgccccgtccgggagggagacgggggggtcagcccccccaccggccagccgccccgtctgggaggtgaggggcgcctctgcccggccgcccctactgggaagtgaggagcccctctgcccggccaccaccccgtctgggaggtgtacccaacagctcattgagaacgggccatgatgacaatggcggttttgtggaatagaaaagggggaaaggtggggaaaagattgagaaatcggatggttgctgtgtctgtgtagaaagaagtagacatgggagacttttcattttgttctgtactaagaaaaattctgccttgggatcctgttgatctatgaccttacccccaaccctgtgctctctaaaacatgtgctgtgtccactcagggttaaatggattaagggcggtgcaagatgtgctttgttaaacagatgcttgaaggcagcagcatgctggttaagagtcatcaccactccctaatctcaagtacccagggacacaaacactgcggaaggccgcagggtcctctgcctaggaaaaccagagacctttgttcacttgtttatctgctgaccttccctccactattgtcctatgaccctgccaaatccccctttgcgagaaacaccca

SEQ ID NO: 30783 - DNA, 748 bp, Artificial sequence
  DNA replication origin
aactcctgggctcaagcaattctcccgcctcgtcctcacaaagtgctgggattataggtgtgagccactgcgcctggccaatgtagggttttgagcagagtgggacacatgggaaatgaccggggagacagtggatccgagggcggggagtgactccattcagagtattttggggtatcaaatgagcaggaccttctgctgcacgtggaaaggagggaaggagaagaatcaagaatgcccccgagtttttggctgttgcagcaaggtagatggttgaagcatttcttgatgcctaagccaactggagaagggcaggaagggttttggtttggacgtggaaaagtgtaacctgcttatcctgcttacaaagaaaatattcaattagggagatggctggtgttcattggataataccagtttagagtttagggctggggttacagattgataactcattggcatagagatgctttttaaagcacgagatggcataagatcagctaggggaagtggggaccctggaaaacctcagagtcagatggagaaggaacctcagagtcaggaaaggtgggaaggggcagggctgggcaggaaccaggagaaggtgtcaccaaagccaagagaagacagcacggcaaagacggggtgacagctgtgacaaatgctgccgagggactgaggaatgtgagggtggcccagggtttggtcacaaggaagttgatgggatctgagtcttggagatgggagc

SEQ ID NO: 30784 - DNA, 2018 bp, Artificial sequence
  DNA replication origin
cttactaagccttgaagtgagaagtgcactgggaggccctcccacccaagcccctctttatctgacagatggggaaaccgaggtcccaccagtgggagagattgttccctgctatgcaggcatctgtgcgctgctccttcctccaggtgctggggctatgggaagcagctctcagcacctaatcatgtccctggagaaggggcaggctctgggggcattttcctgagcccatccagctccttggctccagctgccatctttctcccttgaccaccctcagatcatactggatttggcattgccaccccaaataattttttctccaaaacccttcccactttaggcagattgaccacgcttgcgggaaggcacagagaagcagagccacctctatgaagccacatgctcttggtgcccaacgtgggctccaggaaccctctccagaggaagctggggacactgcccccactgacagtgaagactgctgtggtcactctgggcctgcgtggaggaggggtgctaagtgcagagtctgataattgggttttctgatcacagcgatgtgtgtgtgtgtgtgtgtgtgtgtgtgtgtgtgcgtgtgtgtgcgtgtgtgtgtgtgtccttcctcatgtacattctatgccttccgagactgatgggctggtgcagtccgggacatggctatggaatttacaagtgtaagtgggacctccaactgtctccaggcaatctggttccagggatgcaccccattctcattctgtgtgtgtgcgtgcgcgtgtgtctgtgtgtgtctctgtgtgtgtctctctgtatgtatatatgtatgcgtgtgtgcatgtatgtatctctgtgcatgtgtctgggtgtgtgtctctgtgtgtgtgtgtctctgtgtgtatgtgtgtctctgtgctgtagtttgtcagaggcagtggggggagccctgaaggccccggagggtgtatgagggcaggatttggagctgactgacagtgcatcctcctgtgagcatggggtggagggcgagggtcagaccttgcagtgggctttctgttgcattctggaaggggatgggaggatctggagggttgcctacccctggaagcttctagagtagctgtgagagcacaggttcccttttctccatgactcacagctggctctccagtcaagttccccaagagatcacgattcagcgaattctctccctggccccattaatctgagctgactaagcaagggccacaggcagggtagagacccggggatgcgcactcctaatcaaccctaaaaatccctgctcctgcttccatgccccctcttccttggcccgccatgcctgataggatcagttacgctcccagccccctgagaaagcctgccccggccccgctttggggctctatgagggtgtctctccatccccgcttcactgccacatgcccgcagtgtggaggtctgtctgggcgccagccctccacttgtcttgttgcatctgaactcatttttactgtttggtgagcatccagcctttacggcccagataggatgaggaagctaagggctgctccagggatgatcttgtcctgctcgttttgtctattggcatggctctgggcttttcctcaatgctcagacaacctgggggacaccccagaacctggcggggatgctggtgaggggtgttagactccaagggaacctgtgacataggaggagatccatcctgaggaatggagcaggaggtggagatggggataggagtgtggttggaggtgggagtgaggagatgaggtaaggaggaaggagcaggatggggtggtggtgatggaggcaagtttggggacggggatgagtaggaagggggctgggcgggattgaaggtgggaatggagataggttatgatggggaaagagacagagacgggtggaagggtcagggatgaggttggagttgggcacagagagggagggaggggcaggggatggagatgaataagctggaaagacccaat

SEQ ID NO: 30785 - DNA, 2635 bp, Artificial sequence
  DNA replication origin
acttgatctgccctggcatcagagagaagaaagaaacggccctttgacttgagtagaggggatgacgagtgagaaatttcccagaaaggctgacaacaggatcaataatcatcaaggatcaacagtcatcattactgcattcctgctctgtgcccttctcacaaacagccggcctgcgcccgctctacccatcaacatctccccacctctcagagagccttctcttggctccttaggactcaggcagagggggccgtttaggagtggaagccaggagacattgtgctggctgtgtgatgttggataactcacttcccctttctgtacttcagttcctctataagtcaaacgaggccctgggaccatttgcatctaaagatgctgaggctaatcctgtggaggtgtgtacctggtggaggagtgtaccctgcggaggtgtgtaccctgtggatgtgtgtaccctatggaggtatggatcctatgaaggtgtgtaccatgtggaggtgtgtaccctatggaggtgtgtaccctgtggaggtgtgtaccctgtggaggtatggatcctgtggaggtgtgtatcctgtggaggtgtgtaccctgtggaggtgtgtatcctgtggaggtgtgtaccctgtggaggtatggatcctgtggaggtgtgtacccagtggaggcatgtaccctgtggaggtgtgtaccctatggaggtctgtaccctgtggaggtgtgtaccctgtggaggtatggatcctgtggaggtgtgtaccctgtggaggtatggatcctgtggaggtgtgtatcctgtggaggtgtgtaccctgtggaggtgtgtatcctgtggaggtgtgtaccctgtggaggtatggatcctgtggaggtgtgtacccagtgcaggcatgtaccctgtggaggtgtgtaccctatggaggtctgtaccctgtggaggtgtgtaccctgtggaggtatggatcctgtggaggtgtgtaccctgtggaggtctgtaccctgtggaggtgtgtaccctgtggaggtatggatcctgtggaggtgtgtaccctgtggaggtatggatcctgtggaggtgtgtaccctgtgcaggcatgtaccctgtggaggtatgtaccctgtggaggtgtgtaccctgtggagttgagtaccctatggaggtgtgtaccctatggaggtgtgtaccctgtggaggtgtgtaccctgtggaggtatggatcctgtggaggtgtgtaccctatggaactatggatcctgtggaggtgtctgccctgtggaggtgtgtaccctgtaccctgtggaggtgtgtccctgtggaggtgtgtatcttgtggaggcatgtaccctgtggaggtgtgtaccctgtggaggtgtgtccctgtggaggtatggatcctgtggaggtgtgtacccagtggaggtgtgtaccctgtggaggtgtgtatcctgtggaggtgtgtaccctgtggaggtgtggatcctgtggaggtgtgtaccctgtggagatgtgtacccttttgaggtatggatcctgtggaggtgtgtaccctgtggaagtgtgtaccctgtggaggtgtggatcctgtggaggtatgtactctgtggaggcgtgtaccctgtgatggtatggatcctgtggaggtgtgtaccctgtggaggtatggatcctgcggaggtgtgtaccctatggaggtatggatcctgtggaggtgtgtaccctgtggaggtgtgtccttgtggaggtatggatcctgtggaggtgtgtacccagtggagttgtgtaccctgtggaggtgtgtaccctgtggaggtgtgtatcctgtggaggtgtgtaccctgtggagatgtgtacccttttgaggtatggatcctgtggaggtgtgtaccctgtggaagtgtgtaccctgtggaggtgtggatcctgtggaggtatgtattctgtggaggcgtgtaccccgtgatggtatggatcctgtggaggtgtgtacccagtggaggtgtgtaccctgtggaggtatggatcctgcggaggtgtgtaccctatggaggtatggatcctgtggaggtgtgtaccctgtggaggtgtgtatcctgcggaggtgtgtaccctgtggaggtgtgtactctgtggcggtatggatcctgtggaggtgtgtactctgtggaagtgtgtaccctgtggaggtgtggatcctgtggaggtatgtactctgtggaggcatgtaccccgtgatggtatggatcctgtggaggtgtgtaccctatggaggtatggatcctgtggaggtgtgtaacctgtggaggtgtgtaccttgtggaggtgtggatcctgtggcagtgtgtaccctgtagaggtgtgtaccctgtggaggtatggattctgtggagatgtgtatcctctggagatgtgtaccctttggagctatggatcctgtggaggtgtgtaccctgtggaggtgtgtaccctgtggaggtatggatcctgtggagatgtgtaccctgtggatgtaaggatcctgtggaggtgtgtaccctgtggagatgtgtaccctgtggaggtatggatcctgtggaggtgtgtatcctgtggagttatggatcctgtggagttgtataccctgtggaagta

SEQ ID NO: 30786 - DNA, 744 bp, Artificial sequence
  DNA replication origin
gagggcccctcgcaccctctccccttcccacccgcgggcggcgctccctcgcgggtgctcaccaccggtgatccgctgcagccccagcacgtcctccggcccgatcggctgcttcctctgcagcggccccggcctgggccctgggcctgcgtccggctccgactcggacccagattcggattccgcaggcggctgtggtatgggggccacgctctggcccgagggccccggagcggactccgtcgccgtcccggccccaccgccgcccttcttcaccttcatggccttgcggggccgaggctcgcctgctgctgccgccgctgcctgcgccggctggagccgggggaagtgggagcatccgcagccccgcccccggccggggccccaggtactgccccgccccggccccgcccctggggtgggccctgcgctgatcccgcccgccgcccggcccaaccctcccgaaatgcgacgggcgcgggggatgggagtcggggtatcctgccctgggcttcattctgtttttctaacactttcttgtactggtactagtggggtcctgactacctctccgcttactcattgtgttccagcctttctgcccgtgagttccaggctcagggtctctgcttggatggtcttccccagatggcctcttttctcctagtcacagctcaaatgtcatctgctcaaagggcctccctcacacccagtctgaagtccttccccctcagtcaccatctg

SEQ ID NO: 30787 - DNA, 996 bp, Artificial sequence
  DNA replication origin
cccggcaactgccccgtctgagaagtgaggagcccctccgcccggcagccgccccgtctgagaagtgaggagcccctccgcccggctgccaccccgtctgggaagtgaggagcgtctccgcccagcagccaccccgtccgggagggaggtgggggtcagcccccgccaggccagctgccccatccgggagggaggtggggtgtcagccccctgcccggccagccgccccgtccgggaggtgaggggcgcctctgcccggctgcccctactgggaagtgaggagcccctctgcccggccagccgccccgtccgggagggaggtgggggagtcagccccccgcccggccagccgccccttccaggagggaggtggggggttcagcccaccgcccggccagccgccccgtccgggagggaggtgggggggtcagccccccgcccggccagccgccccgtctgggaggtgaggggcgcctctgcccggctgcccctgctgggaagtgaggagcccctctgctgggccaccaccccgtctgggaggtgtacccagcagctcattgagaacgggccatgatgacaatggcggttttgtggaatagaaaggggggaaaggtggggaaaagattgagaaatcggatggttgctgtgtctgtgtagagggaggtagacatgggagacttttcattttgttctgtactaagaaaaattcttctgccttgggatcctgttgatctatgaccttacccccaaccctgtgctctctaaaacatgtgctgtgtccactcagggttaaatggattaagggcggtgcaagatgtgctttgttaaacagatgcttgaaggcagcatgcttgttaagagtcatcaccactccctaatcgcaagtacccagggacacaaacactctgcctaggaaaaccagagacctttgttcacttgtttatctgctgaccttccttccactattgtcctatgaccctgccaaatccccctctg

SEQ ID NO: 30788 - DNA, 1511 bp, Artificial sequence
  DNA replication origin
caaaaccgccattgtcatcatggcccgttctcaatgagctgctgggtacacctcccagacggggtggtggcccagcagaggggctcctcacttcccagcaggggcagccgggcagaggcgcccctcacctcccagacggggcggctggccgggcggggggctgacccccccacctccctcccggacggggcggctggccgggcggtgggctgaaccccccacctccctcctggaaggggcggctggccgggcggggggctgactcccccacctccctcccggacggggcggctggccgggcagaggggctcctcacttcccagtaggggcagccgggcagaggcgcccctcacctcccggacggggcggctggccgggcagggggctgacaccccacctccctcccggatggggcagctggcctggcgggggctgacccccacctccctcccggacggggtggctgctgggcggagacgctcctcacttcccagacggggtggcagccgggcggaggggctcctcacttctcagacggggcggctgccgggcggaggggctcctcacttctcagacggggcagttgccgggcggagggtctcctcacttctcagacggggtggccgggcagagacgctcctcacctcccagacggggtcacggccgggccaaggcgctcctcacatcccagacggggcggcggggcagaggcgctccccacatctcagacgatgggcagccgggcagagacgctcctcacttcctagatgggatggtggccgggaagaggtgctcctcacttcctaggtgggatggcggccgggcagagacgctcctcaccttccagactgggcagccaggcagaggggctcctcacatcccagacgatgggcggccaggcagagacgctcctcacttcccagacggggtggcgtccgggcagaggctgcaatctcggcactttggggggccaaggcaggcggctgggaggtggaggttgtagcgagccgagatcacgccactgcactccagcctgggcaccactgagcactgagttaacgagactccgtctgcaatcccggcacctcgggaggccgaggctggcggatcactcgcagttaggagctggagaccagtccggccaacacagcgaaaccccgtctccaccaaaaaaatacgaaaaccagtcaggcatggcgccgcgcgcctgcaatcgcaggcactcgacaggctgagtcaggagaatcaggcagggaggttgcagtgagccgagatggcagcagcacagtccagcttcggttcggcatgagagggagaccgtggaaagagagggagagggttgggcatgagagggagaccatggaaaggagggagagggagagggttcggcatgagagggagaccgtggaaaggagggagagggagagggagagggagagctctattttatatactttctcatgttgttttaattttttgtttttgttgttctgatagagtttctctcttgt

SEQ ID NO: 30789 - DNA, 1161 bp, Artificial sequence
  DNA replication origin
cttggtccgctccccctcgccctcctcccggaaccacgcccgctcctcgcgcacgcagcccgtcggccctgcagcgtcgtaggacagggcgggactggggtgggaggccgttggttggctggcgggctgcggaaggcggggctcgtgtgcgcaccagcgcgtcctcgctcagcgttgctcctgcgcgcgcagctggtcggcccgcggcggtgctgcgcggatccggcgtcggggcccggcatggcgggggccggggccaagccgggccggacccggacctaaatgcctctgttcttctccgcgctgttggtcttgctgctagttgcgcttagcgccctctttctaggccggtgagggttcccggccgcgccggcggcggcggcggcggcgggagggagggggcggagaggaggaagaaagactgaggagggggcgcgcgccttactgaggcgcgtgaggcagagtgggtagggtggagggagggggcgcgcggcgaggggagggatcgtgaggaggcgcgtggcccgagctcccagggatgggctgcgagttggggagactgaggaagcgggcggggtctgaggaaatgctgaggccaggaactgaataggagtgtgaggaaggggcctggttcagtggcttccctttccccctccacccacccctgcatgtccctttcgccaagcgcgatgggcacctgcagcatcggtctggggagaacagcattcgagctgccgggtctgacctcaaagtgccttctcgtggatacctgtctggagggtgggagcaggagacagacagaccctctggggagtgtgatggcacatgtgacagagccgcctccgctttgactcttgctggggtcttctctctctgcctctgggattcataacaatttgagggattttgtttttgtcttcaacttagagggtgcagtttctggtttcatctgggtggaggggtcagtcgggagctaggatcttgatcagcgtggctgaatgtatatgacagagtggtgctttggaagaaaggagagttgctcagatccagtttcaggaacgaccttttgcaaggctttgaaagaccagcaaggggtgagggaaaccatcattggaaaaaggtcctatgaattaacaggaatttttctgcaggtggcttgtg

SEQ ID NO: 30790 - DNA, 1281 bp, Artificial sequence
  DNA replication origin
tcacactctcctgtgattgttttttccatttctgttccctcgcagcactgggctcctcacccttgccttgcctgttaacagatgtgtgtgaagccagcaccacagtccaggtgtggtgtttgtgctgcaccgggtgtgggagttctgtgttccgtgtgcatgttgtattagtctgtgtgtggtgagtatattctgtgtgtgtgtgatatatgcatgcgcagagtgtgtatgttgtacctgagggcgtgaggggtgtcactgggatgaggttcctatgaatgcagcctgccctgttctccagattgtctatcaggataagcttacgactctctattgggcagtattgtctctagaatagggtgtcccctgggggccaggggcgggaacgctgcggggtggcgcaggggctgggagccgacatcaggtcctcagcccggagttaggtcttcggagaggcctgtgggcggagaaaggggaagcccgggctccaccagaggcggagggacctcgaagcccggaaggtggaggggaaatggcgacgccaggacctccctgggctcaggggatcctcccatctcagcctcccgagtagctgggactacaagtgcgcaccactaaactagctaatttttgtattttttgtagagatggggttcgctctctcgccagcgggcagaggcggggctgcggctgggttcccaagggtcggtggggcggggagcgggacgggagtgtgcggtttagagaatggccggggcggggctaagaatggggctgggggcaaggctcgttgtaacactaagaattggggctacgatctggaggcagggtgaaaatctggggtttggactgcaagctggaaccagagatgggtggtgagagctgggcctgtaaggttaaggtctgagataaagaggggcctgggaggcgccggaggccccggatgaagaacgcggctgacgctgagacccagctgggaagactacgcagcctggagccgggctggggaggccggcgggggctgcgccagcatgaggcggggttaggggctaggcgggggcgaagccgagactggagttcacggctgggccgagggctcggccgggctgaggctcagggttggacttcacgcaagagtcctgtagagacgaagacctgggcggagagcgatgtgggtcaggacgacgctcacaattgaaagatggactaaggaaaagaccgagcccaaggcccgctcgtgggatgagagcagatgccgcggtaagaggggcggggcagggg

SEQ ID NO: 30791 - DNA, 1426 bp, Artificial sequence
  DNA replication origin
ggagtcccgtctggtgggggccgggcccgcgcagaccctacgattacgcggggccggatagttcctacgattacgcggggccggatggttcctacaataacccggggccgcggagacccgacgtcatctcggggctgaggctgccctaccattacagagcggcccgggggcgcggagcggccccgccacacggggtcagtgtgggcaggggcggcgctgccaaggcccgcaggccgctggaggagggggcgaggggcccagtccggctacagggcctcgagtcccactccgctcgggctccgccaacgctgtaacacgatccccggaaattcctggagaagggccgccccccgcccctctcctggcggctccaggcctcgctgcccgccctcgccaccccctcctctccacccttctgcgttgccccgctcaggctccctcttttgacgcttcaccgggcaccaggaccgccccgacccaggctggagcctatccagatagggactccccaggctgctctcccctgcacctctatacccggctgcgccttcatggggacccttacccagccgaattggtgatggggaatcggagactgctgcgcagcatctggcgatgccaggaaccagcagggaggggaaagggggagagaaggggcccaaggagaggcggcgcttccctcctcaactccaggcctgggaggtgactcatagagtctgccccctctcgcccttctgccctgggaggtcgggggtgaggatggtggaggggaagcgtgcgaagggggtgccagggttagaatgaggtgcccaccgaggagagagacgtctgaagtctggcgtcttttccttcaaggctgctgtgtagattgtgaggtgggagggctgaagatcaagttccctcgagggaggttaaagaagggctaagtggacccggaaactctgctcttcggggtggtctccgctctgggaggcggggactcccctctggtatgggtgttcattgttctggccccattggaatctatcccccagggacaactcctttgtgcaaagtcctgcaggatagaagagggggcagtgcacaatcaatttcaccgtcaaaggggacatgtctggttttatgaagggagagggaagaagaaaggatcaagtggggatgggttaggcacacaccttaggagaagcgaacctgagtgttaagaaacctttctctgtgtctggagctgaatttgaggatgtaaagatgaccaggacacggaagggaagactagtttagggcaggggattgtgagtgaagttactaaccggaaaaactagcgaatcttggagaaatgtgtggaattttcatagaacttcaaatgcattatcaggaaacgcagtaaaacttgacagtatcagtgtcgcaggtaaagaggggcaggtgt

SEQ ID NO: 30792 - DNA, 1488 bp, Artificial sequence
  DNA replication origin
actccgtcggcagtcgggaggcgccagcgaggggtgtctcggcgacgacgcccccagcacagctcctagttacccgaagtccgcgggagccggccggtggccgagaggccacggggacacccggctcgcgcggcagcagcgcctgaggggcgggggcaggcggacggggcgggggcaggcgggcggggcgggggcgcgggcggctgggggcgggggcagaggcctcgcagggagggcgaggaggagccaaggggcctagagggcttcgccaactgtgtggggctggcggccggcgggagaggcggccggcctggactggcccgagagggatcccggttcccagaacagacctaggaggcggcctcgagggcggacggcagggagggccagcatgccccgactgctgcaccccgccctgccgctgctcctgggcgccacgctgaccttccgggcgctccggcgcgcgctctgtcgcctgcccctacccgtgcacgtgcgcgccgaccccctgcgcacctggcgctggcacaacctgctcgtctccttcgctcactccattgtgtcggggatctgggcactgctgtggtgagtgagcgactgtggaaatgaggtggccaggggatcctgagcggggagccggggccggctcttgtgttactacccccatcgctcactggcgggctgaggccacgcagtctcacctgatcccgtttggtatcctatccaaccaaaagccgcagtggccccaggggagggggatcgcccctgggaaactggaggctcttgggttttgcccagccactcttagcttcccagtcagccactagcgcgagcccaggatcccccggggctgcgaagggtaaccgagaagttgatggtccttgagggtgccgaaatgcagagcctcctcttccctcctttccagtgtatggcagactcctgacatgttagtggagattgagacggcgtggtcactttctggctatttgctcgtttgcttctctgcgggtaggtcttgcccaggaagcgggaggcaaattggggacagggagaaggaagctgcttgttcagttcatgatctcttgccccatccctccactagggtatttcatccacgatacggtggacatcgtggctagcggacagacgcgagcctcttgggaataccttgtccatcacgtcatggtaagagagaagcagactatgtggtataggcctggtgtcagtaatctagtctcagctccgtctttctgaatctgggagaaggccgtgttttcttaccacccacccccgacctgtgtgctacttcttatgctaggatgctggaggttggcagtctgtacttgttcactgaggccagcaacccatggtttcactgcctctttagactgaacatcacccacagccagctgtgagcagcaatcaaaatctagtaatgttgaactaacaaaacaaagcatcttacccactataaactattattccagg

SEQ ID NO: 30793 - DNA, 1778 bp, Artificial sequence
  DNA replication origin
ggacgggacccgacacgcccacgccccctaagtcctggtcctggggtgggctccggagccccgcgtccgacagtggtctccgtgcagacccagtgcccctaccgcaccactcgcagtcttctggccggagtcccgtgtttacctgtccctcccgcgcccgcgaggtgggcacttgggaactgctgagtaacccatcgccacctcttcccgccggctcttaaactcctggggccgggcggctgtcacagtcctccctcagacagtcccggccctcggcccggctccccggaggctgggcaagcaagacctccgatttgccgggacagctggagtgacccgcgctctccaagccggtagcttgcagcagttgcggctcctagccactaggtgtcagcctgccctcactgtggcgcgggctccccctcccgcctccgagcgaggcagctgctttcggggagagtttaggtataaactctgggcgaaaggaggagcagctgagagccagcgagggaagttaagcggagatgagagcggggagggagaagagggtagtaatagaggaggggcgggaagaagcgggggaggggaaaggtgctgcgggcgggaggaagaagccgagaaaacctgaggcgcaaggacccagggaccaagccgtttgagtgttttcctcccctatggctccaaggttacacattaacccctgtgggactcttaagtcaaccaaagcccagtcggtttctaggtgagaacacgggtgtcctgggtgagcggctttcccgcccctccccttggctcacagagctgctctgtccgccggccgacaccggcctgagccagcgcccttccagcagtcattccacgtgggtgggtttggatacccttgcgagagccaggacaggggcagaagataaaacgcccctttcctcacaccccttgcccactctgatacagggacgctaaccttcagctagtgaccatcctcctcctgaatactgatgttttctttctttctttttttttttttgagatggaggctcactctatcgcccaggctggagtgcaatggcacgatctcggctcactgcaacctccgcctcccagattcaagcgattctcctgcctcagcctcccgagtagctgggattacaagcgcgcgccaccgtgcccaactaatttttgtatttttagtagagacgaggttttaccatgttggccaggttggtctcaaactcctgacctcaggtgatccgcccgcctcggcctccccaaagtgctggaattacaggcgtgagccaccgcgcctggccgaatactgagtttttctagagctcccgcagagcaggagcccgggagaacctggaattaacctcacttccggtaaagagcctagctggtcacactaaccagccccctgcctctaggcttttgccttgagctcatttcggcgaaaccgcggtctttccttctccccttgatgctttcaggtactgacccactaccgcccccatcttcccccatgggaagatgagcactgagggcagattaccctcctgcagcgcgtgtgtgaaaggggagttgagagtgctgacgagcgcggcgctcactagtcgggacggcccgagaccgtgtcatgtcctcttcaggtgaatcaacttgcacgacttgggatttcccccgtccctccccaggcaaacacgaaaccaaccctgctgccttctcccaggagcgctggtctcggtcgttttgggtgtgtttatcgtttgcgtgccaaggagaac

SEQ ID NO: 30794 - DNA, 1511 bp, Artificial sequence
  DNA replication origin
ccagggggagggggtccacttggctgcttcaggaatgtgctgactgagtggttttggagaaagggaggggacagaggcaagtccctaggcttcaggcagaagcttagcctgcagcttggggcccagccagggctgtggacaccctcacttgtgcttgtaccgtggcgggtgaggagcagggaccacccaaccacctctctccccttcagaagcctcagcagcacagctcaggcactgggggatgggggacaggcagggcagaggctgctccaggctgtgcagtggaggccaaggcccagggaagaagacaggatggggggagggggtgtgggagtgggagaggaagaggggatttccgggagggggagtggcagagaggggggccaagaaggtggtggaaggaatccggcctgacggccccctcccccgctcctttcccgaggcagtcagggtgggtcagctgtgggggggtcggggggctcagctggcctcatctggaacccagagggccggggaagagcagtggcggagacaatggggctgtgtctgtaggagagtaaatgtgtacactgccgagggggagggggcagtcctgcagcttgtgccggagcatatgtgagggcaggagccggcccaggctgtggggaacagaaaacaaagggcctgctgagatttccgccagtaggagctacggaggaccgagcgagggagggaggcacggcgggagggagcaccggaggcaggcgtctcagaggtactatccctgccaggccctcgatcccctcgtcccagcaaacagccaggcagtggccgactcggccttcccctgcgctctgggggcatgacctccgaagagtcggggctccttcaccctgcttcccacacccgggcctgaggggttccctgcgtgagcaggagattcaagacatacagggcgcccagaaacttgatggatgcccaagagccaagggctaacctgcgtcctgagagggcagcgggagttcagtaacaacacgagtgcgacccccttcttcatgacttatggaccacccgccttactccagcccccgggagagaggggagccgcctagaggggtccttcttcgggggaggattcagtccttcctccattgtgtgatcataagcagtccgggtttaaatcctagttaagcctttaagtaactatgtgaccctgggcaagtcgcagcctttctttgaatctcgtttcatgatctgtgaaatgggagaacaatagctaccgttctctgaacgttcgaagaatcagaagaggttagatgggggaaagctccggaggctcaaactgccacgcgggagcgggttttgtcctcttcccccaggattcaaagttcaaggctgaggccgcgccggctctcaggtgacggggaagggcctcttcccctcctgaccccacgagaaggcgccgaggtcttccgccccgggccgggcagttgggacccgcccggacccctcggattcctgcggggggggcc

SEQ ID NO: 30795 - DNA, 1905 bp, Artificial sequence
  DNA replication origin
tcaagtttctgggcgccctgtatgtcttgaatctcctgctcacgcagggaacccctcaggcccgggtgtgggaagcagggtgaaggagccccgactcttcggaggtcatgcccccagagcgcaggggaaggccgagtcggccactgcctggctgtttgctgggacgaggggatcgagggcctggcagggatagtacctctgagacgcctgcctccggtgctccctcccgccgtgcctccctccctcgctcggtcctccgtagctcctactggcggaaatctcagcaggccctttgttttctgttccccacagcctgggccggctcctgccctcacatatgctccggcacaagctgcaggactgccccctccccctcggcagtgtacacatttactctcctacagacacagccccattgtctccgccactgctcttccccggccctctgggttccagatgaggccagctgagccccccgacccccccacagctgacccaccctgactgcctcgggaaaggagcgggggagggggccgtcaggccggattccttccaccaccttcttggcccccctctctgccactccccctcccggaaatcccctcttcctctcccactcccacaccccctccccccatcctgtcttcttccctgggccttggcctccactgcacagcctggagcagcctctgccctgcctgtcccccatcccccagtgcctgagctgtgctgctgaggcttctgaaggggagagaggtggttgggtggtccctgctcctcacccgccacggtacaagcacaagtgagggtgtccacagccctggctgggccccaagctgcaggctaagcttctgcctgaagcctagggacttgcctctgtcccctccctttctccaaaaccactcagtcagcacattcctgaagcagccaagtggaccccctccccctgggcccacccctctttccccactcctgcctgagctgttaggttggcccaggaaggctggttgccctgtgggcagacacaccccttcagtgcctgtggttgtattgtccttggcattgaagcatggccagtggtagtgggatcaaggggaggaggtgggtgctagaaatccttggggcagttggggcatggactgcctgggtcctggagagtgcctctagaactgggctcccatgtgggctctggttccgcctggatccctgcctgccttccacctacctgactcagacctgccaggaatgccctgccccagggccctgagtcctgctgggtgagccattgctctgcctgagccatgccaggcatgtgtgactggccctggctggggtcagcaagggcatgtcgacagaaagaagcatgccaacaggctccttgggtgctgacggccaggtagggtttggtgcaggagaaggcgggcagctagcaggaggggacggtcaccaggcttcagaagcccactgagcagtgcccagagtcttagctgtgcttgctggacatttttccttgccccagcttctcttccttgtgtgtgtggtgtagtagagcctgtctgagctgtggagtcagacacacatagccaggtgctgcttcacctgtaagcctcttcgtttcatctgtaaaatgggggcattccaccccttctcagaggcaggtggcaagggccgggtgggaatgtaaacaggtgccaaggagcatgcctttcctccccttttctgtgggagacacaccctcaaaggagcagggcagggtaaggtggccgcaagctgacctttgccctggttcttggcagaggaccttcctggggactgggcagccttcgcacttaatctcagcccatccctgttccccctcccagtcagctttcagcgcagccaatgaaaactaacctagggggaggg

SEQ ID NO: 30796 - DNA, 764 bp, Artificial sequence
  DNA replication origin
aacggcatggcaaggtcctgagaccccgagctgtcgctattgggagtgggcagaatgttgttccacaggggttggaagtagtgaccattggggtaggccaatggggctgccatgccgttgactggtggggatggggtcggcttttccaggggtggcttcagatggaaggactgcgccaggcagagttcctgcgggtaggcaggggccttgcccacaaagccaggccctgccaactcgcgtcctgccgcatgcttgcctgtcaggccaggggctggcgtcccactagcctcgctgcacatctgctgtaggtgggccagctggtgctggttccaggtgactggcttgaggtcgctagggtagccagtggggacgcgagagatgcctgtgggcaggttgacaggacctgcagcaggcaacgcggcggtggccgcgtgggtgtgctccatgggattgaccacacatgaaggcattggtgtggggacgctgtgggtcgacacccgggtgcttgcattgatgagcagactgcgactaatggggctggggttggcgatctggccctcacacactgaggtagtgctgatgcctgccctcgtctggcaaaactggttgatctggtgcacgatgctactcaggtccggaggctggctgtgctgcagagtggccgccattgaaagggggatagttgaggtagacacggtcacattcgggggggcatctgagtctggcatcttccggcctccatgcagcaagggattgtgggggtg

SEQ ID NO: 30797 - DNA, 1233 bp, Artificial sequence
  DNA replication origin
taatggggctggggttggcgatctggccctcacacactgaggtagtgctgatgcctgccctcgtctggcaaaactggttgatctggtgcacgatgctactcaggtccggaggctggctgtgctgcagagtggccgccattgaaagggggatagttgaggtagacacggtcacattcgggggggcatctgagtctggcatcttccggcctccatgcagcaagggattgtgggggtgctggagaccctggtgagccagggcctgagggtggaccaagccctgggtttgggccatgggctgagggtggcccaggccctgaggctgctggaggctctgagggtgggacagtgcctggggtggcgggataccctgagggtgctgcagcgtctggggaggggcatgggccagggtctgtgcatgctgcagggcctgctggcgggccagagcctgggcctgggggtgggctaaagtgctgggtgccacagtagcatagggtgccactggggggttcatgatggcctcagggagcaaccgggctcgggtgccgtcaaagtccttgagtatgcttttggctggcactttgacaatggcaagcaggcctgccttggtggcagcctgtgtcgggtaggggctgtagcgctgggctgatgtgtcgaggccgttcacagtacgacgaacgtgtttccgctggggaaccttcacactgttggggaagatttttatagtcagtgggttgtttgcgaccttcttagcatacgcatccaattcggctggggtaggatagtgagcagttctcattttctgtgtagtgtcccctagagagagagaatgggaaggagagcaaagagggagagggagctcatcagtgccaaggcaaacagcccttccagattccccttttgagggcctggggtggggtggggaaatgactagattgtcatctgtagccttcattcgagacccagcttcagtcttcacattaacaagcactgctaatgttcagtaagtgcttatagtgggccaggccttctgccagatgacaggccatctcaatgaatcctcactattgctgtagaagcaggcactatcatcatttacattttataaatgaggtaagtagagatcagaacagcaaagcatctttcaaagtctcatatcttgcagaaccagaatttggccaattctcagagaggtaaccgagagttctccccctacacagaaattcagggtcgctg

SEQ ID NO: 30798 - DNA, 842 bp, Artificial sequence
  DNA replication origin
agaggcgtaccctgaggcagccgccaaattctctaagcctcagaattcttcaaggccagctcccatgtccactagagacccaggggtccagaccatcaggcactgaggaagacgcccccggcaggggctgcgcaggcgcgtgcggcccgaaagggcccaggcgctacacgctgcgcaggcgcaggagcggctccgggtagtccccacagctgcgccggtgactgaggggccgggcagtggagaagtggtggcggcgggcggcgggcggcaaaggagcagccatgagggccgggcccagtcaccgaccgtgagtagtggtggagggggagtggacaacgcgtgggaagagggtaacttagcggaaggatacatgactttgtggggtgggctctgactgtgggagacggaagggcgtgggggaggtacagtttgaggtgatgatgggagaatttggggcacgggtggcccggtcgccggccgcagagctggacagcttggtggagggggacggggttgcgtgctgtggagtgaagcagcccatttgtatcatcccttcctccaggagcttttggtcgcctctcctttccgcttctttcagagaatgattgcggggggagggtggtggaggatgaaagctctgctggagcttaagaagccacctctgaaccaggcaggggaagggtcggtctcccggagtaataggctgctctgggtagaggatgggagtcgggaaccctcttttgaaagccgggaggggtctagggaaaagagctaggggcttagagtcaggcaggttcgaaaggaagtccaccattgataaagctgttaggtaaccttgggca

SEQ ID NO: 30799 - DNA, 962 bp, Artificial sequence
  DNA replication origin
gataaacatactgaacttagcggtgtccccagtgcattctaggcgaggtcacctccttgacaaggtccccaggacttcattgcacctcctagctagtagcgtattctaggatggcaaagctgcctttacataattacccccgatacattctagacacgatcatcttgaaagagacccaaattttaccaggcatggtgactcaggcctgtaatcccagcactttgggaggccggggcgggcgaatcatctgaggtcaggagttcgagaccagcctggccaacatggtgaaaccccgtctctactaaaaatacaaaagttagccaggcgtggtggtgcaagcctgtaatcccagctagtcaggaggctgaggcaggagaatcgtttgaacccgggaggcggaggttgcagtgagctgagatcgcgccactgcactccagcctgggcaacaagagcaaaactccgtctcaaaaaaaaaaaaaaaaaaaaaagacccaggctgggcgcggtggctcatgcttgtaatcccagcgctttagaaggctgaggtgggtggatcacctgaggtcgggagttcgagaccagcctgaccaacatgataaaaccccgtctctactaaaaatacaaaattagctgggcgtggtggtgcatgcctgtaatcccagctactcgggaggctgaggcaggagaatcgcttgaacccgggaggcggaggttgtttgagccgagatcacgccattgcactccaacctggacaacaagagcgaaacttcgactcagaaaaaaaaaaaaaaagacccaaatttatcatcagtggtcacctcagagcacctgaattcaggcctttaagtgcaagtaggatgcagaattctggaagagccagtaagtctgtggctccttggggaagcgcgatccaagggtttagtaacctaggcacggtactccagaggcgtaccctgaggcag

SEQ ID NO: 30800 - DNA, 1475 bp, Artificial sequence
  DNA replication origin
taaagcgcgttgaccgccgaagctgcgctcactcctgcctcaacgcgccggccccgccctccgccgccacacttccggcggggctgcgaccgcagaggggcgcgggcgagcgagcgggcggccggccgctgggggtggcgggataggctgggcgcggccggcgctgcagacccgctgctgttgtccgggtctgtgcggtcccgagggccctccgtgccgccggcgccatgggcaattgccacacggtggggcccaacgaggcgctggtggtttcaggtgagggggcggcgaggaaggtgggagctgtggagggtgctcggggtgggtgcagggctggggagtgcacggggaagagctgggcctgagtccaccgcgcggcgcagggcgctggcccccgggccgcacctgaggccccttccaagagagatctcgtgctcacgctttccttgctgcgcaccctcgggcacccaccaggggctccccctcccgctgtgggttttcctgtgtttatttgcttctcctccccctccctaggcgggcctccccgccgctctactgtgaggttgggggtcccgaactgaagccgcggggttccaggagggagggaactggtggttccgggaacgcagaggtttggctggattccagcgcccgggatggggggcgggtcgcgcagccctggagggcaggtgcctgtatggggaggggccctgaaacagaggtcgtttctcggcacagtcagacccgttaattccaagcaggctggggcttgttggggattaccggcactgcccgcccaggagacgcggatgcggcctctacaggttgggaaacccggttctgggcagtgcagtttgggattgcaaaatgctgcaagttccagaatttctatctaggtggggcatggggactgcggtactggggaaaaggaactgctattgagattttatatttggggcgctttgagaagcggctgacaccttgcaagccaccgggttgtgcagctccttgctctcaggagctgggggacgggggtcctggtgcctgacagcttggaggcctggagctggaggaatttctcttctctatcttcccactatcagtgctgattttttcagcctgcgtgcagatttggtagaactggttactgaagagatagaaggggatagaagccctgagccaggcctcacagctgccaacccttggagaggggtgataaatccactgggaattttcattccaaaacatggcttcaggctcactttggatctcaaaatcaatctctccactgggacatccccagtgtgtgggagataagtaccctacccccctgaagaccagaaatagccttgaggacagaagggagactcccagagaacactaaatgcagacttgctcctccataagacctaaacctgtctcccagtccccacccttagagaaggcttttagagaccagaatctgcactgcactt

SEQ ID NO: 30801 - DNA, 1948 bp, Artificial sequence
  DNA replication origin
ggggaggcccgcctagggagggggaggagaagcaaataaacacaggaaaacccacagcgggagggggagcccctggtgggtgcccgagggtgcgcagcaaggaaagcgtgagcacgagatctctcttggaaggggcctcaggtgcggcccgggggccagcgccctgcgccgcgcggtggactcaggcccagctcttccccgtgcactccccagccctgcacccaccccgagcaccctccacagctcccaccttcctcgccgccccctcacctgaaaccaccagcgcctcgttgggccccaccgtgtggcaattgcccatggcgccggcggcacggagggccctcgggaccgcacagacccggacaacagcagcgggtctgcagcgccggccgcgcccagcctatcccgccacccccagcggccggccgcccgctcgctcgcccgcgcccctctgcggtcgcagccccgccggaagtgtggcggcggagggcggggccggcgcgttgaggcaggagtgagcgcagcttcggcggtcaacgcgctttattccgaggggcttcagatacagatgaccccagccctgcatccgcccggaaggcgtccccttactcccatggggcacctcgataccagctgccctgccctgactcacttctcagcacccatcttacggcagtcggccctggcctcagacccttgggttcagatcccaggccctcctcctactcactgtgagaccctaggcgagtcccttagctcgggagcctaattccgcttcattaacatgggggtaatttaactacctagctagacggttgcaaagggatcagttcactaattctcaatgttggcagtgcatcacattgcaaactccctgcctctgctccagagctgatcagaatcaataagggtggggcctgaaaatactacatccaaatttccgagaagcacagtgtctagcatacccctatctctccatctggggttactgtcactctcaggaagaaataatcacccattattccttcaaccaggaaaagagatgtccagggcacagcttggggccccagaaagtaaccacggaggtcaagatcacaaacccgtcagtgtccagggcatggcctcgcacacatccgaggttttcaaggaccatgaagtgccatggcaagcatcctggcctgagggttaggagagctggatctcaggctcaactttagcctgaattcggtgcgtcatcttagacaaatctggtgagctctgagggctggggtaaggttgagaaactgtgggctcctcagggtggggggtgcttagagaagatggggcctctgagtcctcagactgggggtcttcatcgggttcagcatcctccccaggcccaagccctgccagcctcttgctggcctcccatagccgatgggctgcccggtcgtctcgggcagctggaggcacctcttccacatggcagttggcaaaatatctcccactgaggggctcgatgccctcttgtagagcacaatacaggggtgtctgggcaccccctcttggtgcccggagcaccagccaagccaatgggcgcaaaagtgggcgcagccatccaggaacatggcgcaggaacagctccgagttcacaggccctgtaggcaggaagaaagaaaggagtcgggctaggcacagtggtgtgtatttacagtcacagctactcgggaggcggagcaggaggatcacttgagcccaggagtttgagaccagactgggcaacatagtcaagctctgtctctttaaaaaaaaaaacaacaacaaaaaaaatagaacagagctagaagaacagggacagaatctggtttcaagggaaccaggatagtatttaccaggcattcggggcttctgcgaggtgacttcactcatttcctgcatgaagcctcttcgcttccatccagactgcttg

SEQ ID NO: 30802 - DNA, 1382 bp, Artificial sequence
  DNA replication origin
ctgctgctgggcgcggggttgctgctgggcgcttacgtgcttgtctactacaacctggtgaaggccccgccgtgcggcggcatgggcaacctgcggggccgcacggccgtggtcacgggtgagtgcggaggcgggtgagtgcgagctggcggggcgcgcggagaggaggccgggccggcggtagcagcggcccgccgggctcagctcagctcggctcccgcccgcggtccgcaggcgccaacagcggcatcggaaagatgacggcgctggagctggcgcgccggggagcgcgcgtggtgctggcctgccgcagccaggagcgcggggaggcggctgccttcgacctccgccaggtgagaggcagcgggggcgcgtgggacggtgagccgagaacccgccgggacacagagaagccagcaaaggggctgcggaggatccgggtccagggaggagagcgcggcgcgggcggctgagcgcgaagagggagtgcacggagcgctggggtcacccgaggaaggcgcaccagagccgagtgggggaggggcttcctgaaggccgtaattgcagttctgagacgtttaagcatcagtagaagttgggttaatgatcagtaggaaagggaacagcagagggcacagcataagcaaaggctctgaggcaaagagagctggactgatctgaaaaactgagaaaaagatttaatgaggctggagcacaaagtatgaggaagatgggcaaatgagggggctggagaacattctagagcctattgagaagcttggattttatagattgggcagcagagaccagtggagaccatgaacagccctcagtaggctccggactgtcagaatagcctttggaaggaactcctttgtggctgcgtggtgcctggagtgggggggcaagagcgggagagaggagaccagtgagaagttacagattttagggtaaatggtaatggggaaaggaggtgataataataatagcaagtacctacccagtgctgctagagtgtattttacacgttaactcctttcatcctcacaaaagctcagtgagattgggactgttgttattattattccctttacgcagtgagagaactgagacccagagagattaagtatcttgcccaaggtcacactttagtaaaaggcaaagtcaggatttgaatccacacacttatctagtacactctaagacacaggggcagattttagtaaacagtaggagatggactctcagaatttggtgcctggggagagggaagaggagagagatgcctggtgacaagcccagcccttgcctctccacaggagagtgggaacaatgaggtcatcttcatggccttggacttggccagtctggcctcggtgcgg

SEQ ID NO: 30803 - DNA, 1580 bp, Artificial sequence
  DNA replication origin
cgcctgcgcgggtggctttgcgggcgctcgcggtaagtttgcgccaagtgcgcggcagccgggacgcagacggcggcggcggcgagaggcggagcccggggaccaccccccatcaccctccccccagtcacctcacgtaccacaacctcacgtaacctctcaccccccctccgatacccccagccccgggatggcagcgcccgccagccttcccggccggaccggctgtcgccagtgccggctttagcctgtgggactaggccccgccgaggcctgacccccggagccgggacccactgtgcagccagcagccgggccgggactgaggggccgctcccccctcgcggcccgtcgggaggacgctgtcgtcccggggactgggggccggggggtgggggggagccagggcgaggaagtcgggacccgtattgggaaaaaagcggggccggggtcaggagcgccccctcccctcacctcccccctccccccggggttgggggggccggagcagagagcacccagcccgggaggtggatgaatgtgggagaaaatggagaccaagacgatcgtgtacgacttggacacatcaggggggctgatggaggtaagagtggccctcctcatctccttcctccagcgccgggagggaacctccgccctccgccccacaaagccagtcctaaactcgaagcgcctagatggccgagggagggggattcttcctcacctagcctctccctcccctctttgcaatttagggggctgagctcagcctccgaggacgtttgcagcagtttcacctacccgccgccctcgattcgctctcccgaggcgccagcccactccatctcgttgcaccggcaggcctccccacccccttcttgttggcccctttgtgcttcccccagcacgtccgggtaccgggctttgggcctctcccgagcgggtctttggagtcccccactgtccatacaaggaagtggcaagaagggaaccgcgcaccctcttcccatccccctacccttgatcctccccatttggaagaagctgttctcgttgttgtgctgcaggaacgcggttagggtgggctccccctggttccgggggctgagagattctgggagcagcctggatgggaggaagaaggacaaaaggggggagaggggtgggtgacggagaaaccgcgccgggggggcgacggaccgcccgggagctccgagtgtgcacacacgccgtttgtatgtgtgtgcagcaaatccaagctctgctggctccccccaagacggacgaggcagaaaagcgcagtcggaagcctgagaaggagccccggagaagcggcagggccaccaaccacgacagctgcgatagctgcaaggaaggtggagatctcctgtgctgcgaccactgcccggctgccttccacctccagtgctggtaaggtctggggacccttttggagcttcttggcggacccttctctgcgcattccttcacccggcctgcccctgactgccgaaataacgggcgcttgcagccgctagctgactttctgcagctgccggggcgagcacctccccgcc

SEQ ID NO: 30804 - DNA, 1693 bp, Artificial sequence
  DNA replication origin
cccctcagtcccggcccggctgctggctgcacagtgggtcccggctccgggggtcaggcctcggcggggcctagtcccacaggctaaagccggcactggcgacagccggtccggccgggaaggctggcgggcgctgccatcccggggctgggggtatcggagggggggtgagaggttacgtgaggttgtggtacgtgaggtgactggggggagggtgatggggggtggtccccgggctccgcctctcgccgccgccgccgtctgcgtcccggctgccgcgcacttggcgcaaacttaccgcgagcgcccgcaaagccacccgcgcaggcgccccgggatcggcgctcgccgcgcgcaaccgcagtgacagccggcggcctggctcccgcgcagccgcggtgagggagtaccccccagcgcgcagccgcgctggcattcgtctggaggaccgaagccccacctttctgccctgcgccagcgcactgagacaaaagggcgggacctgaggtctcgcgcaggcgcttgagaaagcttgtaggggtcaaggcgcagccgcaggaagctagggactgttcatccattggtgtttgtgtgcaaactaagacgactctgttctgcgcaggcgtgttgggggtgctcccccttcctctccataacacagacgcctcccgcgcaggcgtattgccttccgcaggccctcacaagaaagctgctcctttcgccattttggtaatgggatatgggctatcatgcccttggagtcctcaggcatgaacagaaaggagcaaggtgtggtgttggatggagctggtcgcctgtcggtgacagcagtattcctagggatgttgtacttgaccgtttggttctaccatcgggtgtggctggaccaggccaccatattggtaaagagaaaagccatttgagacagaaaatgacgcttttggaggcgtgtgggatgactgtggttcctaattctctcccgctcctgacagataattttatcagttaattgtatcctcagcatccctgccttgcgtggtggtggcactggagagttccgcctgcccgttaccaccctctcttcaccactgtccctgagatctgctcttcaagaggaagcctaaagtggagagtttgtaatcctgacaacgcccagctacctgcgtaccccggactccaactcccagtttgcaacgccaaagggtctaaagggcgaacgggggcgcattgcatcctgggagcaagaatcgcgataggtctgatggattgtgggaactgtagttccatgtgcgtgcgatgcactctatggtaggatagacccggggaagagtcatttgccggccaggaagggatacttttgagagcgtcagtgctgcatgccgggatttgtagtctgagggcccgcctcgcattctgggcggggattcatgctccttttcagggcgcccgctcctccccttggtattgccgtcagagatgggcggttggttattgctgcctgatggtggatgaagcagtggaaaagagaattgtatcgttgtgcttgacactaggggtttagttggaattgttgcttcgtagctgtgctcggcccacttttaatgttaagggacacagcattctcagagtcgtcaaactagcaagggtttagagaccatctgatttaatcccctcttttccagatgcacaggga

SEQ ID NO: 30805 - DNA, 961 bp, Artificial sequence
  DNA replication origin
ttctggctgttggaggggctcctctcaaggggtcttgtggtttcttcccagtcaccatcccccccaccccgatttcctttgatcttcatgctgttctacaaaagaggtggggcagggacaggcatcatgaattctcaaggaaactgaggcttggggtgtgacacaacttgcccaaggtcacacagccagcaaaacccatcactgggtgtcctgactccctgaccagccttcttcctcttatgttcttcctttaggactcccccctcctccttgagcacaacttggctccccacactgcctgatgcctccctgcccccacccccaggctctgggactccttaggcacctgctggctggtgggacccaggccagacactcagcaggtggctgcctgggggacaaaggagttggcactcagctgctgagctgggagggagggagggaaggagagaggaagggagggaaggagaagctatggggagggaggagggatggggctggaagttgaggggagaagggtccgctttggtgtctttaacaaggagccatgagcaaaaaggggtaaaccagcatgcacatgagcatggggggcgctcagtggtttaggcacttttcacagtaaccccaagttctgtcctcccagactcatgaccagttagagggaggggcttgagggtagagagaagagcctgttgagaggggggatggagagactgagagagatgccaaggttgatgccacagtatcaaggttctggctgggccctggggacccaggggtagggagggatggcatgagaaggagggcattgtgaggagagattctgcagcacatgcgatttggtgctgcagaatccaagcagcgggtctcccccttctttccccaccacaaattcatgatgcctgtcctttttccagctctttaatggaacagcatcaggatcaaaggaaatcagtggggt

SEQ ID NO: 30806 - DNA, 1249 bp, Artificial sequence
  DNA replication origin
ggacctgccgtcctggctcaaacaagctctcatggaagctactggcacccacgtccttctcccgctgcagtaggctggtagggtcggcagaaccgcacttggagttgagacctgccatcccttgccatatggtttgaagggcctgatgtgaagtgtgagggtgggagtttctaacctccctgctcgatctttccaggccgctgccgaggtcaaggcagcgcggccagggacaggctgggcccccggacggcagttttcttcatccaggaagaaaaactgtggccccggagacgcagaagcctttttctgagcctctagctccacttgcacacagcccagtgtcctcaccccgctaccgggctgcccatgctggatcctccggcagcgcccagaacttgaaaccgtgtgctcacgttctggggagaggggaagagtcctgcaagacccaccccagggatgaagaccgggaaggagaagtgtgaatccctgcctagctgcctggggatgtccctaggaattccgaacctatcttgggtcctgatgggtcctggcgctggacagctcccctggggcgcagggcctgtgtctgtcccctggcagttagtcaaggccttgtgtgtgagtttgtgggtctgaatgtgagagtaatcagggccctgcatgactagaggagccagtcccagtgtgtctgcacttcaagtggtccgaatcttgggtgaggggtcagcagtgaatgggtgtgaggactgtgtgaggccactagtgtgtgggtgcagcctcagccagagagctccctgcagggctagagtgagactgtgggaatccaggaggaaggctggtgtggccaggagtcccaccagccctgatggggatgtgggtgtgagtgttaggaggaatctgctcactctgtggcctcaagtctgtgtgtccctgggcagtgtcccttcctgactatcaggatctccagtgcccatggaggcacctgccagtgggatatgtggggtaggagtctggctgttgggaaagacctctattttcactccccaagggagacgaagaggcagccccgaagtgccaagcctgaggatgagagggctgggatgtcagagctgggtagccagaggctcctctctcctcggctggactggaggtcccaaccattgggatagtgagtcatctcagtggggagcagcgcatttggccatcccggggttcctgggcactttagctttgtgaaggcgagcctaaa

SEQ ID NO: 30807 - DNA, 1133 bp, Artificial sequence
  DNA replication origin
gattcggaccacttgaagtgcagacacactgggactggctcctctagtcatgcagggccctgattactctcacattcagacccacaaactcacacacaaggccttgactaactgccaggggacagacacaggccctgcgccccaggggagctgtccagcgccaggacccatcaggacccaagataggttcggaattcctagggacatccccaggcagctaggcagggattcacacttctccttcccggtcttcatccctggggtgggtcttgcaggactcttcccctctccccagaacgtgagcacacggtttcaagttctgggcgctgccggaggatccagcatgggcagcccggtagcggggtgaggacactgggctgtgtgcaagtggagctagaggctcagaaaaaggcttctgcgtctccggggccacagtttttcttcctggatgaagaaaactgccgtccgggggcccagcctgtccctggccgcgctgccttgacctcggcagcggcctggaaagatcgagcagggaggttagaaactcccaccctcacacttcacatcaggcccttcaaaccatatggcaagggatggcaggtctcaactccaagtgcggttctgccgaccctaccagcctactgcagcgggagaaggacgtgggtgccagtagcttccatgagagcttgtttgagccaggacggcaggtccagacaagactcttccccgaggcacggaacccctatcctctccccaacactcccttgccgctcacaccatggccaagcttccctctacccaagaccgacgaagttggggaccagactcctagagggggcgcggggattctcagggtgtggggaacaggtcctccagagacaaatctgccttgcaggtggggagtggaccagggccgggcaggaaggcaggccgggagggaggcagagctcggggcagtggtgtgtgtgtgtgtgtgtgtgtgtgtgtgtgtgtgtgtgtacaaggaaaggactttggggaggacagagtctctatcccaggatctccgctgctgcagccgagggcagagccaggagccagatagggggtccaggcccttggagtttctctctagaattgtgctctaggtcccg

SEQ ID NO: 30808 - DNA, 1491 bp, Artificial sequence
  DNA replication origin
gggagatgattaaagacgaggtctcggccgggcgcgaatggcgggagccgcggcagcttcccgcccgcgaagcccgcgccccgcccggcttggccggcgccgggggcagcgcagccggcggggcgcggtgcttggactgggcagccagatgcccgaagctgggcaccgggtctcccttcccacccctggggccccgctcccgcccccgtcctgccgccggatgccggggtcccttaccgtgagccaggagcgccagcagcgagggcaggagcagcagggctaccgggcgcatggtgctggttgcggccgcgccctgggctgggaccgcggcgggagggcggggggcttggtggggcttgggcgcgggggcagagccgggtccggccgggtagagggagcggggccgcagccgtcaccgccgctgccgccgccagcgcctgacagaatcagcaccacggccagcgcctggcgacggcgccggggatcgccgagcggggctgggggcgggggcgcgggaggagcggcttaccgtaaagtctcatgcaaaggcgcagagacccaggggcaggagcccaggctcccgctccaccgcgactgccctactcatgtgggcacacggcccctgcccttctgcgctgcccacccccagccaagcatgccaccctctttcccgttaacggcctgctaaggaacctcaattaatagctcactgtagccttctgattctccatgagaaagagcaacactttccccacccctctccacccaatcctggtacctgagggcgtcaagggtgacctgggaagacatccgagagtgaggcagctggtgaggcccgcgtgcccttgtggcagttccgtcttgggacgataatgaagatggcttttgagcgtacaaaggataataaattattactttgcgctcaataaatgccagggctccaggcagctgcatcagcagcaaactgtgctcacagaaaagcttaattatcctgatattatagttaaaagccagtggcactcgcatcctggggagacattcttcacttggcaggaggcaacctgggccaagctgtgggcagctgaaggtagtatcctgggtccccacgtagccctgggtctccaggactctgccttggcccctctgcaggaccagagaagccacagtgacagtcgatacagacccttcatgccatctctgcccaggtttctggaattggtggagaaaatggcataggcatgagagagggtttcctagagctgttattttattttattttattattgtttttagagacagggtctctgttgcttaggctggaaatgcagtggcacaattatattaatagctcacccaaactcctgggctcaagagatcctcccacttcagcctctcaagtagctagaactacaggcatgcacccccaagcctggctaatttttaaattttttgcagagataaggtctcattatgttgcccaaactggtcttg

SEQ ID NO: 30809 - DNA, 1554 bp, Artificial sequence
  DNA replication origin
gagccctgattctcgcctgtccctgggccggagctgcctagaggagtgggatgatggagccagtatggccctgagcgaggcctgctcgcagtacagccacccgtcgctggcccgcagtctgtcggtgccaccccggccacgcagctctgcctcggcagtggatgagcctcccagctccagcgtccgctccgtcagccgtcactcctacctggacccagacctggaggctgccgtcaacgaggtcttgagctacaagcctgttccattccagcggagcagcctggagcccgactccgaggaggatgacaggaagagcatccaaagtgcccggagcgcccaactggaccccccggagcgagctgccagcatccgccgctccgcctctgctgctgatgtgtcccggtcccgcagcggccggaagagccggagccggcgaaggagcggaaggagcagctccagctccagctccagctccggctccgaagcttcctcagagcacaagaggcggaagaaggggcgctctcggaagagcaagaagtccaagtcgagaagaaagagaacggagacggagtctgagtcctcctcgtcgtcatccagcggctcgaccgtctccagccacagctgctccagtgtgaagaagggcccagctgcagaaagtgaagaaactgggcagacgcaccggccgtcgaggaaggaggaaaagaagcgcaagaaagaggtggacagcctgatgatgcggtacctgtaccggcccgagagcgactagtgcagtaggtggcacctggcctgggttcagcatggtgtgtcccacccggtgtgaactaacgtcctccctgcccctcaggccgccaccttagggcccacccgcactcctctcgggcatgcctggcctcggagagcctcctggctgccttgatgagcaggggccacccaagctggtcagtcatcctgagccctgagccctgtcagctgaactcgctggtgatgtcatagctcccacttacaagtcctgaccctgaaccagggactgtccttcataccttccacactttagtcacttatccctcacagtaactccgtaacaaagtctgattagctctgtttcatagaagatgaagctgaggcttggagaggttaagtcacttgccatgtggtcacgcacagctgggaagggttgttgccagggtctgaatggggtctgcccaactccagcactcttgcccttacccactcctccaggcagccagtgcagagcacatgggcaacatgtttactgtgtgtgcccagcagcacccattcaggagctttcattcatggccccaacaggctggggccaggaaaggtcccaagctataccccagctgtggttggtgcacatcagtggccctaagctattattgggccttttgcttagctctccctcccctaccctgcccccacaaagctaccttcctctctggcatagatctcaagcctaggagtacaaggctcccagggctacagcccacacagcgccacaccctacagcagacccaggagatgcctgactccctc

SEQ ID NO: 30810 - DNA, 1685 bp, Artificial sequence
  DNA replication origin
tctaggcagctccggcccagggacaggcgagaatcagggctctcccggcctaggccagaggcccggctcagggaagggctgagtgtcctggagaggctgtcgagccgggaggtgctgcggcgggaaccgggcgagcccgacagcgagaaactcagggaagagccagccctgtcttcgccagagccccgccgcgtggccgaggaggcccggctgaccggtgcagagacggtggaggccgggctgaagtcggagccccaccgcttctgcggcccccggccagcgcgccccccggtccccgagcggacggagccgcactcctccggctcctcggacttcctgcctgggcatggctcctccctggggcccacatgggccttcctagggggcctctcaggggaggccgcccgctcgctcagggaggtgaagagcgaatccgcgtccccggtgcccccgatggagtcctttagggtgagccgcttccgatagctcagggagctcaccaccgaggacggcctctcctccacccccggggcctccttagagaggctgttgagggccgttccgagggaggatgcgagaaccagacgtggatgagggcagcagggagagagggaggttgagagagagagaggaacaagtattaaactcagagaataaagacacagggggagggaggcgaaaggaggagaaaacggcagcagccctggcaaagtggtggtgagagcatcggaggaaatgaagcaaaataatttgcgtcagtgaaaatagcttcatggagaatgtcatgtaaattagactattgttctatttcatcacttttccccctctaaacgtttagttcaatttatttcattgtcaactacctggagcctcgtgccatgccgtggtgaaccacggcagtggggcggggaagccggcattatctgcaataacaaaatgttgtttggccgaataaattaaaccaattagagggggctgctgggtgcttctggtgaggggccaggcttggggaaggggccttgggggagctggagaagggagggagagatgttactttttctacccagtctacctgctgtctctgggagaggatgaggaagggtgtgtcctggaggatcaggatgggcttgatcagggggttgggattctatgttgtgggggcagcagggatatggctttgtggggggtgaggggggagcgagggctcttctttctccctgctgccacactggccagtaggaaagagatgggcaaggggaagctctggattccaggggtagctgtctgtatgatcagaggactatgactggctagaaaacaggggagtacattcccccagtggatgggtattaggaggaaagaagtgggggcagtgaagagattagaggaaggagagaatgggcagaaaaagacagaaatgtgcctgtaactgggtcaagaatcagtggaactggtgcctcttctgctgctattcacggtaagacgtcagagatccagagctggccagggctgtgggattaagagtcccctgtgccccatcccagttttgattccaagggtctgaactatcaggaagcttgatcaacatttgttgaatgaataagtggaggtgacatttaacttacatcaaaccaaagcctggagcctaatgggaaaacattccctggaaaaaataagggcgacgc

SEQ ID NO: 30811 - DNA, 1306 bp, Artificial sequence
  DNA replication origin
tgagtgtctagtttgtttactctctcctggcctggcccaggtgccagagtgtgtgcctgagggcttcctcctgcgccccagactttcctcatgtgggttatgcccttcctgactcccacctggtctctcagcctcactcctgggctgtctgggtagccagccagttccctggaggccccctcactggccctggtagtggctattcattgaggactgcatgtgtcttcagaaactgggcctgaaaactctgggtcccccagaggcaggtacctaaaggtggactgggtggggcagaactggggctcatgtgaaagggagaatccaccctgctgaggtggagctgggagttgttggaactcaggaagccttcatctggacttgctgtgtcacaggtcttcagggcagcagggctgttcttaatccttcaaaccagaggtctctcctcagccagatcctctcacctggggtggacgccacaggcaggagccagagcatccacgtgagctgggttttgttggtggcctggggtcccaggcctgagtgtggtgggaaaactgaggggctctggctggttgtagtttaaaggtttggggcagtaggagggcccagcccactgtctgctgtaattgacaggttcccacaggacttgggattggtagggcagcttgatggagtttaagttctgctttgggtcagacccccgggtgctttaagatctgcacaccccaccccatcaccatttcttccccctagcattttccaaggtggcctgaattagaggagttggggaggtgccgaggtaggagctggattgggaggggtggtgagcagacctggtgagcctccacttcccaccttcacttccctgcccttcttttgaggtaggaattgcagggcttgtaaaatgtcaatttcccttgacattttaaacagtttagagtcaggcagcagttttggttgttagactgatgattttacaggacccagggccctttctgtctgccaagtagtttatcatcacttacaagagattattgtgattattctctaatattcagagaggttggatgatgggctgaaggtcacacagcaagtcagaggcagagcgggattacaacctgcagtgtgtggttgagcagaatagctctccagcagaggctgagggccaaatctgagctgtcaggcccttgaagataactgtagctgaaatagtggaggcttagagaggggaggggacttgctcaaggtcacacggaaggggatgttagcggaactgagcgccaggcggtgcacctggaagagcagc

SEQ ID NO: 30812 - DNA, 718 bp, Artificial sequence
  DNA replication origin
gggaggggaggccacctgggtgattaagagcaagatcacctgagcaggacggtgagtacagagcccattgaatcagccgcctttcccttgtgctttggagcccttttcttgagcaggttggtgccctgttgttgtggcaacaggcctggcctaatgttccccaccctttttagttcaggggctactttctatctggagatattgaaagttgctctcctgaggtctctggcttcctgacaagcctcactggctctttgtccatggcttcccacctcctcagcttcctctctgtttttttgtgatgaagtctttccaggaaacatcctcctggtttctggatttgacatgacgggttatatatagcctcgggtggaggtgtgcttgtccattttgggttgaggacatgggggttgtggcctcaattccaggaaaaccatggctttgggggcagctattgtgttgagggattaggggaatgagaagggttgtaggtgggggtggagggtgggcatgggaggggccacaggctggcggtcacttcctttgggagctttgaactttgaacagttgatgacctggtgcctggtagctctgagtgtctagtttgtttactctctcctggcctggcccaggtgccagagtgtgtgcctgagggcttcctcctgcgccccagactttcctcatgtgggttatgcccttcctgactcccacctggtct

SEQ ID NO: 30813 - DNA, 1773 bp, Artificial sequence
  DNA replication origin
ccaggcaggccgggcgtttatccccacagccgccagcagggagctccctttcggctcggcctgcgcggtcgctgggggcggcgctgagctgcgccgcgctgcgctctgctccatccctgaccgggccgaggctgctggatgccgcgtctccgcttctgctgcctgccgggcgggctccggtggccggtgagtgccggtcggcggcggcggccgctcggtggcgggcccggcttggtggggcggcggggcgggctccggccgggagggagggcgggcgggcggcggggcccgccggctcctcctcctcctcccccgtcccctggaagcagcggcccggactcccggctcccgtccctggcggcgccgtggagctcgacgcccgggggtgggggccgatcgggagcggcggggaagggggaaccaccggcccttccagccaacctggggggcgcagggaggcaggacagggtggccttcagtgtggggggatttggggcttggaggcgcccaggtggcccggagctgcggggtgggggctgcagcctcgagggtggggggacttctcctgcccccgtccaggccccacgatggagcgagcgagagagcggggcgctgaggaaggcagcggggaaggggagcacctctaccgacccttttatccctcccagcggccttcactctttcactgccgggcagactgcgggctcctctcaaaggagcagctgctagacagctggcaaaacaatggagaccccgcttccctgggccccctcctcttgggacagaagatgagagggtgaatggtggcaggctttggggattagggagtgcaggctgtgccctgagactgaatgctcacctcacctttccctgcagaggggtggggtgcgtgtgggaaggtcggacaagctgccccaggcctctggagagaccgccccgacgccccgccctgctaacctgtcatgccagttgtttcgccaatgggaaggggaggtggtaggggtggctgccccctcaccctgccccttgttagtgggggtgcgctccttggtcccaaacccggccaggagtgtgggtcatgttcctgggtgcgataaggcccgcagggacaggccaggcattggggctttgttttgggggtggagatgggggagttgccctactgcaaggcacatgtgtcttgctgattagttggaaaggttgcggccagaatgagctagaggtggggggtgggggagatggggaggaagacagccagtttgtttttgagcgggtattcattttgcctgaccactttgccaatggggcatgtgtttggcgctggcctcatagtttgtatttgtgtggggagggctgggggaatgcttcctgagagggactgtcctggctagggctttcattccctcagatggccaccccgaattaaagaattggattccctccctgcttcaccctgccaatgacttgggctagttagtgtgggttcgtcttgtcttttggagcccctggcgtgtctgtggccgagaaggcctcatcagtgcccctgtggcaagtgagctctgggaagtgtgtatgcactggggtgtgctggaagggaggggaggccacctgggtgattaagagcaagatcacctgagcaggacggtgagtacagagcccattgaatcagccgcctttcccttgtgctttggagcccttttcttgagcaggttggtgccctgttgttgtggcaacaggcctggcctaatgttccccaccctttttagttcaggg

SEQ ID NO: 30814 - DNA, 1886 bp, Artificial sequence
  DNA replication origin
cccccacccccgggcgtcgagctccacggcgccgccagggacgggagccgggagtccgggccgctgcttccaggggacgggggaggaggaggaggagccggcgggccccgccgcccgcccgccctccctcccggccggagcccgccccgccgccccaccaagccgggcccgccaccgagcggccgccgccgccgaccggcactcaccggccaccggagcccgcccggcaggcagcagaagcggagacgcggcatccagcagcctcggcccggtcagggatggagcagagcgcagcgcggcgcagctcagcgccgcccccagcgaccgcgcaggccgagccgaaagggagctccctgctggcggctgtggggataaacgcccggcctgcctggcagcgccagtgcgcgccgccagacgtgggccaggcgggccgggcgctgccctggcagcctccgtccgctgtggactccgaagcccctctcgctgtgtctgagagaggccctgcctggagtttctgtctgcactgggcactggaggctgtccgaaaagggtccgaaaggggctgagtggcactgcctaggacaggcaccagggtcatgatgaacgtatagaagaggggctgtccaaggcaggcaccgaactctgcaggctgtgttcaaggtagtgctgtctaaaggaagcaattaagtcttactggccgcctcctcccaaggtggctctgcagaggcacacacagggccctgctggatggtgccccaggctcagtccagaccaggtactgcctgccatgtccgagatggcactgccagaatgcactccccaaggtaaaaacagactcccaatagcttggtctgatacagccctgcctcaaaatggagtggatcaagaggcgtaccagggcccgggagccatggctgtaagtgccactcactccctaaaggagttcaccaatgccaagattaacactttcagaagctctttggaatgcagtctgtccctgggtccactgtgtgctgtaaatatcaagtgagctgctgtacccaccaagaagacagtttatacttcctgggagaggccaagggacatccagataccaggcctccaagataggtgctatgtctagagtttggagaaagaaagaaatggggacacttccctgggcagtgtccatgctggagtggggtgtgccagaatgtggaagaaactgagtggggtggtgcaggaagaagggtgtagcagacaaatgctgctacctccctagacagcccaaacaggaacttctccaggcaagggcagcccaacctgacagaccagggaaggctggagcaaggaggctcagaaagcagagagttgagtaagagttagggagttcctgaggaatagacccaggcgggatacacattttggaataacatgcaactcaaattcaatttaacaaactgcctgctaagtgccaagtgcagccccaggcacttggggtgacacagaaggagatcagacatggcatatctccagggaaatcacatggggaacaggtagacctgagctgtgacagtagtagggttcaccatgctggcattacttggatgatgagataggtgctatgatgggaggcttatttggcttgaggagtgagaagagcagcttcaaaaacatgacatttgaggccaggcatggtggcttatgcctgtaatcccagcactttgggaggctgaggtgggcagatcacttgaggccagcgttcaagaccagcctggccaacatggcgaaaccccatcactactacaaatacaaaaaattaaccaggcgtggtagtgcatgtctataatcccagctacttgggaggctgaggcaggagaatctcttgaacctggggagcagaggtt

SEQ ID NO: 30815 - DNA, 1257 bp, Artificial sequence
  DNA replication origin
agccggcgcggctggaatgttctctcctcctcgcggggccgcttcctgtccgccatgttggaagccgattcctgtcaccgactccggcccactgaggagcggagggggaagggtgtcgagggccacacggggcggcggagccgggtgacccgggatcaccaccggccgcagcctcgccccctgcactgcgggggcgccggcgccccccgcaccgcggccgcccccccccccgtcgccggccggggttgtgtaacccggtggcggcgcgcggccccgggcgggtccctggggtgaggggcgggggcggttggggtgggggagggaagcggccacgaggggagcggcctgcgcagggccccgcgcgccagcggccgcgtttcccgctcccgggtgcggcgggaggcgcgggcagtcggggcggggagccggcctcgaagcggagctgagagggaaggaggccgcgggcggcggccgcggcgctcctagaggcaggaggcctgggggggcggcggggggattcatttcgggtagaggcggtgcctgaggccgggtggggtacccagcgggaacccagctccccggtcacgagtttctctgccacaggaacctcgtctcctgccaggttcgctcacgactccgcctctgaggctttcacttgggccttttccttctagcagctcattttctacaaaaaaaaaaaaaaaatccaaaaaccttgttccattcccctcccgacccagcacttaccttctgagcttgggtagtgtctttgaggtgagggattttaaaaaatgttaggatggggaagagtgcgagctttttgacccctctttcttgtccttaagggtgaacccaagtggctcatccatgaggttagactactaccatcttgcctcggatgaggcttctctccgtgttaaaaagaaaggtgtttttcgtattttaaaatcgatattgatccccaaactaatcttaataaacgagaaattgagggtaaaagtcatgtaagaaagtatttcacgagaagtgagtttaatagtttataacccacgcagattttaaaaaataagggctctttataaatcgaagagaaatgaagcgtaagaaagcgtatgttaaacccagcgtatcaaatttgatagaaggaattgttgagagctggagaaatactaagtgcttttttattgcagattgtaacttgaagactgaaattagaatgtcagattttccattttgggacttcgtagggacccgata

SEQ ID NO: 30816 - DNA, 1361 bp, Artificial sequence
  DNA replication origin
ttgacctcacctgcagagtttaattaaaaaaaaaaaaaccttcagtgtaaattttcattcctcctgctctcccttgcctccaactacaaagaaacaatgatttaaaccctttgtgcccttttagaaaattacacagataccccattgtggaaccctataatcccttcgtggaaaggaagagattagcatatgaatacaaagcaaaatgaatccagaatacaaaatgatctactggattgtgaagctcttgtatgcttaaaaatgtatttatttcctctttttgtattgcccctttagtggtctcggggttaagggaattgagcttccctttctggttacccggaaaaggattaaaaacaaaacaaaacaaaaaacaaaaaaacaccagattctaagaggtgcaaagccagcagatggctcacagcaccagtggaatcgccagtggaatctgctaccctcgacacgagcctgcttgccggcgaggagtgtagaaagtgctgttcacagactgcgtggtgaaggagagaaagcgacagaagagagagccatagtgctgacgttgaaggcccggccctgtgaggttgcacagggtaagtggcgttggccaggcggcagcggcgaaggggaaggaaagaggatttgagctgggggcggggcttgcggcacagcgtggctcctgattgttggagtgcggctgccaatctcgcagaatcgctcggttaaccagtgcgctggcgagacgcgctcagatatactgagtgagccctgagaagcagtctcagatcctgacggtgcagcagcccgcagcctcagccagggagtcccagccgctttcaatggaggagaagcccggccagccacagcctcagcaccatcacagccaccaccatccgcaccatcaccctcagcagcagcagcagcagccgcaccaccaccaccattattatttctacaaccacagccacaaccaccaccaccaccatcatcaccagcagcctcaccaatacctgcagcatggagccgagggcagccccaaggcccagccaaagccgctgaaacatgagcagaaacacaccctccagcagcaccaggaaacgccgaagaagaaaacaggtctgggagggaggacgggtgggggaagggggttgggggtggaggacaggagagatgggggtggggctggatccgaaaagcgcggacggggtcggggtgtgtgtgtgtgtgtcccctccggctctggggatgcccctttcattctagagctcgggctgagcaatggggtttgcagcgccctctccttccctccagcatgggagaggcccagccaggccagcgtgaccttcctggccccggccccggct

SEQ ID NO: 30817 - DNA, 990 bp, Artificial sequence
  DNA replication origin
ccggcccgggcctcggccgcctctagtcctcacacagccgaggccctctcggtcccccgccgcggcccctcggcgggcgggcccacgcgcagccctccgccaccaacaccacccctggtaaggaggcgctcacaaagggaagagaggccgcgggccggccggcggacggcggggcggggtcccccggggccgggaggcctcagatgttcgcgagtgcctagtgctttcggcccgcgaagggcgcagggcgagcgggacccctcctctctcctcaggcaggcggcggcaccgactcagtctctttgccaccctccctctctctccccgagccctgaagccacagagcccggccgctgcccagcttccccccctttacccgacaccactcccctcctccagaccgtcatcccccgtctccgatctcgcgagattttccgcctgacaggccggaccctgcgcgagacacgactacatgcgcgcgcgcgcgccctcacaggagcgcgcaaggcttgctacgggcagagttgtcccggtggcccggagttccagcctctgtccagcatggcctcactgagttcgcggagcttctaatgccacgcgggcgtcaggtgcattcatttcaccccggagatctgaagaagaagagtttatctgcattccccttccttcctgcttcccacctccaaagcccgccactgatcctgcgaataagtttgccctgaagtgtggaatatcccattcctgcacaactcggttctacaccccctcccccgtgggattcagaggtacactgggcagcgcaatcagtatgcagttgagtttttgagattctaatagttgatactaattcttggaacgacagtaagacttggaaatacagatctaagccaccctatatattggtgatgtagaaaagagataacttcttgaaaagtgtctgtgggtttagtaggttgagtaatgagaagttttggaacaagagcagcaaac

SEQ ID NO: 30818 - DNA, 1000 bp, Artificial sequence
  DNA replication origin
cggccggcccgcggcctctcttccctttgtgagcgcctccttaccaggggtggtgttggtggcggagggctgcgcgtgggcccgcccgccgaggggccgcggcgggggaccgagagggcctcggctgtgtgaggactagaggcggccgaggcccgggccggttcccccgaggcggcgacggagacggctcccggcacttccccgcgccatcttaactgagcccaagcgctgagggcgcctcctcgaccccggtcgtcccctcgcccccccccccaccccccgccgccgccgccccttgttgcagagcttgggctgggcggcttgctggggctcgggggtggggggcggcgatctgtcgccgggccccctcctcctcctcactcctcaccctccagggtagcggctaccggagcgctgcagggggctgcgcctgcctgctccgccccagacctgtcggcgaaagggtaagggcacctctgctttgggaaagggggatatagaggggggcggggaaattcggcccactcgggcctgtgtgtggaagaagggatgtgggagtggggtgggggagggagaaaaggagggtctgtgattctgtgggtggggtgaagaagctggtgagctgggcgccctccggttttaaggggcgagagcaattccattcctttttcctgagggtcaccggaaggggtggtggaagggggatgtttcgaggaaggtgtggccctcacagggagactgggttgatgtgcaccccggtttaaaggcgcgaggtccccttcccctctggtgcctttgctcctcttctcctttgtagtgtctgtgtattcttgggaagggagactgctctgggtggcttgctgggtggattccaccccctagcacaggaaatctatacccctcttctgtaggggcgatggaagcgtttctctccccgtacccttcccccttccccatcctctagtctactgcaatgctgcagaagtccaaggcagtttct

SEQ ID NO: 30819 - DNA, 952 bp, Artificial sequence
  DNA replication origin
tctctgcccggccgccatcccatctaggaagtgaggagcgcctcttcccggccgccatcccatctaggaagtgaggagcgtctctgcccggccgcccatcgtctgagatgtggggagcgcctctgccccgccaccccatctgggatgtgaggagcgcctctgcccggccgcgaccccatctgggaggtgaggagcgtctctgcccggcaaccgccccgtctgagaagtgagaagcccctccgcccggcagccaccccgtctgggaagtgaggagcatctccgcccggcagccaccccatccgggagggaggtgggggtcagccccccgcccggttggaggtgggggggtcagccccctgcccggccacccgccccgtccgggagggaggtgggggggtcagccccccacccggccagccgccccgtctaggaggtgaggggcgcctctgcccggccaccaccccgtctgggaggtgtacccaacagctcattgagaacgggccatgatgacaatggcggttttgtggaatagaaaggggggaaaggtagggaaaagattgagaaatcggatggttgccgtgtctgtgtagaaagaagtagacatgggagacttttcattttgttctgtactaagaaaaattcttttgcctggggatcctgttgatctgtgaccttacccccaacccggtactctccgaaacatgtgttgtgtccactcagggttaaatggattaagggcggtgcaagatgtgctttgttaaacagatgcttgaaggcagcatgctcgttaagagtcatcaccactccctaatctcaagtacccagggacacaaacactgggaaggccgaagggtcctctgcctaggaaaaccagagacctttgttcacttgtttatctgctgaccttccctccactattgtcctatgaccctgccaaatccccctctgcgag

SEQ ID NO: 30820 - DNA, 1199 bp, Artificial sequence
  DNA replication origin
ctgagtggacacaacacatgtttcggagagtaccgggttgggggtaaggtcacagatcaacaggatccccaggcaaaagaatttttcttagtacagaacaaaatgaaaagtctcccatgtctacttctttctacacagacacggcaaccatccgatttctcaatcttttccctacctttcccccctttctattccacaaaaccgccattgtcatcatggcccgttctcaatgagctgttgggtacacctcccagacggggtggtggccgggcagaggcgcccctcacctcctagacggggcggctggccgggtggggggctgacccccccacctccctcccggacggggcgggtggccgggcagggggctgacccccccacctccaaccgggcggggggctgacccccacctccctcccggatggggtggctgccgggcggagatgctcctcacttcccagacggggtggctgccgggcggaggggcttctcacttctcagacggggcggttgccgggcagagacgctcctcacctcccagatggggtcgcggccgggcagaggcgctcctcacatcccagatggggtggcggggcagaggcgctccccacatctcagacgatgggcggccgggcagagacgctcctcacttcctagatgggatggcggccgggaagaggcgctcctcacttcctagatgggatggcggccgggcagagatgttcctcactttccacactgggcagccaggcagaggggctcctcacatcccagacgatgggcagccgggcagagacgctcctcacttcccagatggggtggcggccgggcagaggctgcaatctcggcactttgggaggccaaggcaggcggctgggaggtggaggttgtagcgagccgagatcaccccactgcactccagcctgggcaccattgagcactgagtgaacgagactccgtctgcaatcctggcacctcgggaggcggaggctggcggatcacttgcggttaggagctggagaccagcccggccaacacagcgaaaccccgtctccaccaaaaaaatacgaaaaccagtcaggcgtggcggcgcgcgcctgcaatcgcaggcactcggcaggctgaggcaggagaatcaggcaaggaggttgcagtgagccgagatggcagcagtacagtccagcttcggctcggcatca

SEQ ID NO: 30821 - DNA, 972 bp, Artificial sequence
  DNA replication origin
gcagaccctctgccacttcgtcctgcccgtagcgcctgggcctgagctggcccgggagtacctgcagttggcggacgatgggctagtggccctggactgggtggtaggaccttgtgttcggggccgccggatcaccagcgccgggggccttcctgcggtgcttctggtgatccccaatgcgtggggtcgcctcacccgcaacgtgctcggcctttgcttgctcgccctggagcgcggctactacccggtcatcttccatcgccgcggccaccacggttgcccactggtcagcccccggctgcagcctttcggggacccgtccgacctcaaggaggcggtcacatacatccgcttccgacacccggcggcgccgctgttcgcggtgagcgaaggctcgggctcggcgctgctcctgtcctacctgggcgagtgcggctcctccagctacgtgacaggcgccgcctgcatctcgcccgtgctgcgctgccgagagtggttcgaggccggcctgccctggccctacgagcggggctttctgctccaccagaagatcgccctcagcaggtgggtaacggaggccgcagaccagcatggaaagaatagagggcctgagctggctaagaatcagaaacagctatgcatagcattggaacaggcgtgggccagtttgggcaaagttctctgaacacatcttccaaagccttccaaaccctgtaatctagacagaaccggggaagcgggtttaaaggtcatcgatggactcagctagtatcgctgtgctagagcagggactcctaacccggccccttgcctcatctcggcaccccctgctgtatcctagcaatctgagcacctggcccacgacagcagagatacctgacatttaccacttagcccacagcttaacagctcagcaaagagcactctggaagcaattgcaaacgattatctgcccagaatgtttactcacag

SEQ ID NO: 30822 - DNA, 726 bp, Artificial sequence
  DNA replication origin
ccgacggcttgcaaacaaggctgcaccctcccggcagtggctcgcgcccgtcgctgaactggtccgccgggcctccgccgtccgcctcctccccgtcgtctcggtcttgggcccccggcagggtcctctctccgacggcgcgcccccagggtccccggagccgcgggccgagcaggccgagaagggcgagcacggccaagatgagcgcgagggcggcgccccacggcggcatggcgaagctggagagccccggcgggcagcgggcggcggggccgtctactcggcgagctccgcgctttgcccgcggctccgcccgccggcggcggctgcccagggccctcccgcgcgggcgcgctctggattggccgtggccgggcagaggcagccagttcgggcccggctgccctcgcccgccccccacccccgccccggccctttgtacagcaattgcaacaagtgggagcagagggtgagaggagccggggccaccagggagggagggcgcgccggcagccggaagggagtggggagggcacgagccggggagagcggtgttggccatggagacgtggggagactggaggccgaggcttggggacccgactgtcatcagggtcttccgccagaccctgggcgctgcgccctcagaggccgatgaaaagaagcagaagggagaggtgagtaagtcgcagctccgggcgccggctcccgggaccccgtggggcg

SEQ ID NO: 30823 - DNA, 909 bp, Artificial sequence
  DNA replication origin
ggggattcgtctcagcaggtccctgcagtctgtagagcagctgcacagctgcagcgcctggatgagatcgtggagcggagtgtaaggccggaaatggaatccctgtggaccgggtggcccaggctggggagacgggtacactcccctggcaaacccgcttcagatttgtcggtgtgacctgcaatgagaagaggggcagaatcatgaagtcaggaagagctgctgaagggagagggtcccacctctggagcttcgccgtcggcccaccccgctcccgccctcgcaaatagggtccaacgcggaggagcctcgggaggtgtctccgctccccaaactctccaaacccagaagccccgggaggccggagctagccgagaggctgctgtcttccccacctccgccgtcgcccagcggtggcaggcgcgcgtctagaaagagattggtcgccgcgagatggggacgccacaggcctcacccccaggaggtgcgctggccggcccgccccgcagcggggcgctggttctggttccctctccaggatttgggggggaaacgtgggtagagagcgagggtcgagatgcctatcccaaagcttggaaacagcgagaacgtgttatttccgtggtctcccatgcaccccggtttacgaggcgttccttgtaggtcggacgggcatccctgtcgcagggcgcctgagtgtgtccttttctccgactgactctcggaggcttggggctgctgtttctggggaagccactcccgggctgaggatttccttgatgtggagccccgagctcgcggggacgggggcgaggagtccacgggacccgcactgatgcaggcggggaagcagcagcctcccgccagcggctcaagacgccgcgctcgacctctctagcccagtgccgg

SEQ ID NO: 30824 - DNA, 998 bp, Artificial sequence
  DNA replication origin
gggctcccgcctcctccgccggtccagccatcacctgtgggtccaaagcgaagagttggggcgctggacgcggcgaggccctgccctctctctccccaggcccagcccgccagcggaagaactccgcgtccccctcggcgcgccactccttccaggacgaacttttggcaaagcgctttgagctcgcgggccgaggccttcccaggagcgggtcaccttacctcgctgggacccaggagcctcgcgagggctgccaggagaagcagttggggcgaaggcggaggaggcgccattccaagcggccccgggcccggcccgccgcccagccgctccgccagcgagggagcgcgcgcgccccgcccctccagccccagcgcccccgcgccgcccgcgccgcccgcgcgtccgttggccctgggctcgcgcgcgcccctccccagacagtgggcccccggtatcgccccgccccaatgcccgcccacagcagcggagtgtgcgcgcacgcgtcttaaacccgaagccggaaaagttaagtgtaggaaccgggtcagcgcgcaaggctcagtagggcaggcggggggcccctttcctcgtccggggattcgtctcagcaggtccctgcagtctgtagagcagctgcacagctgcagcgcctggatgagatcgtggagcggagtgtaaggccggaaatggaatccctgtggaccgggtggcccaggctggggagacgggtacactcccctggcaaacccgcttcagatttgtcggtgtgacctgcaatgagaagaggggcagaatcatgaagtcaggaagagctgctgaagggagagggtcccacctctggagcttcgccgtcggcccaccccgctcccgccctcgcaaatagggtccaacgcggaggagcctcgggaggtgtctccgctccccaaactctccaaacccagaagccccgggaggccggagctagccgagaggctgctgtcttccccacctccgcc

SEQ ID NO: 30825 - DNA, 1504 bp, Artificial sequence
  DNA replication origin
caggcgctgcagctgtgcagctgctctacagactgcagggacctgctgagacgaatccccggacgaggaaaggggccccccgcctgccctactgagccttgcgcgctgacccggttcctacacttaacttttccggcttcgggtttaagacgcgtgcgcgcacactccgctgctgtgggcgggcattggggcggggcgataccgggggcccactgtctggggaggggcgcgcgcgagcccagggccaacggacgcgcgggcggcgcgggcggcgcgggggcgctggggctggaggggcggggcgcgcgcgctccctcgctggcggagcggctgggcggcgggccgggcccggggccgcttggaatggcgcctcctccgccttcgccccaactgcttctcctggcagccctcgcgaggctcctgggtcccagcgaggtaaggtgacccgctcctgggaaggcctcggcccgcgagctcaaagcgctttgccaaaagttcgtcctggaaggagtggcgcgccgagggggacgcggagttcttccgctggcgggctgggcctggggagagagagggcagggcctcgccgcgtccagcgccccaactcttcgctttggacccacaggtgatggctggaccggcggaggaggcgggagcccattgtcccgagagcctgtggcctctgcctccgcaggtaggagccctggagggcccagggagagagggatgtgaaaggctagcccagtcccgctctgttctcgccgcaccctccacagtcaccatctgaggacctctgccggttcctcagtcctcagtagccaacttctccatcccagcctggcgcttggggcctgccgtcccctccccaccacacacacacggagtcccccaactgccctaagctctgttctttccccatgtataggtgtcaccaagagtgacctacacacgagtgagcccagggcaggtgagtacaagcaggggcccaccacccttggtgtccacgcctggagacaggcgctcctagcaggcttcgctgcctgttctgctgatcggccccattccttaccacttccctcaggcagaggcagggttctagttctctgccccacctccaagcccaggacagatcagccccaggacagatggctcaaagacagtgagccataggcctgtcatctgcaatgctgtgtcaggatgctgttgggtagctggctctgtggacaagtggctgtgagtggaactctctctgagagtagctggaaaaaacccaggctccagctccctgaggagacagcgggaagtctcctgactttgtgggccccagctttctgtaggagagggtattaattctgtctctacctgtgagcagcgagggagggtatgtgccagcaccgtgtacagtacagagctgcatcgtgcaaggagtgtgcctccagttgccaggctccacactgcgggctcagcttgcgtggtagcatctccatcttcatcgccagctcctctg

SEQ ID NO: 30826 - DNA, 2130 bp, Artificial sequence
  DNA replication origin
acaggttggccagcgggggcgggctgcctcaaacaccacctccatggcctaggacgagggtccgggtgggagtctctgtgcggcagatgcacaagctcaactccagagtctactaaaaataatttaattagaaacggagttttggcaagggaggcagaagcggctccttttctccccttggccgcccactcagcaaccaacaaggaggaaagcccccgcagtgctcggccagtgccgcgccatcgccaccagggagcgccccgcgcgcggtccacgtggcagaggtcgcggcctcgcggcgcggggaggagccgcacgccacagtggcaggtcccaggccgtcactccgagctctcgccttccgggccgctgtccggcgtgggcgggaggaggggtctccggcgcgagcgcttgacccggcgcgagggctgcagcagcctccgcttcagcacagctgtgggccgggcgccgagcagtcaagggcgggagggcagggaagctacggggggcggcgggcgacgcgaggtggggcgggggcctcgggtagggtagggagggaactcctcaccagccactgtgtcctggctgtccgctgtgggcccccagtagatgctctccccgcgtcggaagtttctgtgcagccgtgtgcagagcgtggccagggtgagcagcaccagcaggaaggtcagggccatggcagcccaggcggcctcttcagtgcgtggggtggggccccgggctgcccgtggaggcgctgctgcgcgaggggccggggaagcctgacttgaacagacacagccccctgggctgccttgcccgttgggcacctgagcctctgtcctggagctggcattgcctccaggcgcccccggcagcagggagacagtgggcacagatggggcattactctccctaccagggattcccgccatggactgcttggccttcaagctccctggggaagcagagggaaacctcagggctgagcgagtgggctggggaccaagggcagcccgcagcctccgcctcttggcaccactagaagagggctgcctgggcccttgagatgtcacctctgtgccagggggccgccagctccgcagagcaaaggccagagccagggcctaaggagaggagagagagcaatcaccctgctgcccctctcagagaacccgagggccaacaagcctgggcccagcgtctctcacctgcacacaccctcttcggcacagcctccctctaccgggagttggctcggagggagcaggccctgaaaggctttcacagtagatccatgccttcttcttcctctgcttcctcctccgcctcctcatcagccagtgggcagcccaggctggctctacccaggccatctccagcgccagcccccatgcagtcagcaccaggggctacgagaggaggtaactgttagagctacgaggaaggtggggacaaacaagaggaaacccttgaattttccattccctgcacacggggccatagccttctgccagggccaggcaagcgcctttcatcagctacatacccgatcctgcgtgaggctgaagtcaggggtgagggaagggttagccatacaagcataggccaggagggcaagctggagcttcagccagggatgggcacaggggtggtagaggaaggtgacatcctcagcctggaggaaaggcacagagacatcaaagcaggcccagagccctcccagagaatctcaagttctcccatccaggggaccagtttaaaggtactcccaggatagctggatggctcttctaccttcagggcccaggaaaggacaaagggccctgggtattggcatgtacccactcttgcctctgagtgttcctttcacccttcctctccatcaagtgccacccttcaaagctcacagcatgcctggataatcctgccagactcagaccacactctagccatatttccctgcaggtgtaacgatggctctacaggtccacaatccaagccataagcaacccccaaatgaagaccatcgatccaatctatacagtctcccaagagcatccaaatacagggcaggcaggcagcaggtgcacaatctcaggatggaaatactccatcaatcattcattattc

SEQ ID NO: 30827 - DNA, 1489 bp, Artificial sequence
  DNA replication origin
cctgctggtgctgctcaccctggccacgctctgcacacggctgcacagaaacttccgacgcggggagagcatctactgggggcccacagcggacagccaggacacagtggctggtgaggagttccctccctaccctacccgaggcccccgccccacctcgcgtcgcccgccgccccccgtagcttccctgccctcccgcccttgactgctcggcgcccggcccacagctgtgctgaagcggaggctgctgcagccctcgcgccgggtcaagcgctcgcgccggagacccctcctcccgcccacgccggacagcggcccggaaggcgagagctcggagtgacggcctgggacctgccactgtggcgtgcggctcctccccgcgccgcgaggccgcgacctctgccacgtggaccgcgcgcggggcgctccctggtggcgatggcgcggcactggccgagcactgcgggggctttcctccttgttggttgctgagtgggcggccaaggggagaaaaggagccgcttctgcctcccttgccaaaactccgtttctaattaaattatttttagtagactctggagttgagcttgtgcatctgccgcacagagactcccacccggaccctcgtcctaggccatggaggtggtgtttgaggcagcccgcccccgctggccaacctgtccctggacatggggctttaggaatgtgctcgtgggagggtggcgttatcgtcatacatgttagctttgttattcgcaaactaactcttccactagacagacgttcccagcacaggggcttccctagggcgggggtcctggggcacttgcagtcacccttcatgtctgccacctccctccagcccccattctctaagcatcagaaacagctcatggtcacttctttatttttgatacaaatgtacatgacacgtcttgacagcccacccaccaccacacaggtagggcctggcccccagggaagaagcgggatggggagagagctggtgggtcccaccgtctgcctctccagccttcccaggctgcagccaggttcccaggcctccagagggtgggaccacagcaggtgcaggtagtgatggtgggtgctggccttgcagaggttacggggaggggactcagctccacagccaccagctgagtcggggaccccggggagccagccccaggctcaggtgctcagtcctccaccctagccagcacacattccccctccacgcaggagcaggaggagatggagggaagtggtttttgatttaagttcatagagaaggggcgagagtggggagggatcagggaggcagctggcaggaccaaaactggctacccggacagtccctggctccaggtggggaagggaagctgatccccatgctggtcccactgctctggtcccctcacccctcaaaactccagatggaccaggcctccggaacggcactgccgcccacacactcaacacgcaggca

SEQ ID NO: 30828 - DNA, 1664 bp, Artificial sequence
  DNA replication origin
tttaaattgcttttgtatctctgtgttgcccaggctggtctccacctcctggcctcaagcgaacctcccaccttggcctcccaaagtgctaggattacaggtgtgagccactgtgcccgtccctagggtattctgatgaagtatgtttggagtgtgccatatgcacctgttatcactgcagtgccttaaggcaaggggtagtgcagccaggtgtatccaaaaaatcaccctggctgctgggtggaacaggattgtagggacaaaactagaaggagggagattaagaaacttacaaagcccaggcaacaggtgattgaggaacctggggagcttcactaggactggagggtgagggaggcttcaggtgactgccaggtggctgacactggtggtggacaaacaggtcactgagaggaagagcaagccagaggaggaggggtgggggacgcggtgagatgaattcagctttgtcccttctgggccgggtgtgcgtggagatgggtctgggcctgatgtgaaaaggcgtgtgctgccctgctcctgggtaactgccgcctctgtcctgttcttccctctgctgccttcctctggacttagatctcggcaaaagtgcatgtctcagaggtatatggtgcctgccggggcagcaggcctgaaggtggggtagggcggggaggcatttggtgtgcagcatctggggtgccatctccccgggatccctgcatgttggggaggttgctggcatgggcctggccacctctcaggtctctcctctcctcccaattcccatctccctctgccctcagccttgacttatccgaattggccaaagctgctaagaagaagctgcaggcggtaagtctgctccaacagtgccctgacacttgaagctggcccctctctgatcccccaccctctgctcttgcttcctctgcctctgactcgatgaccttttccaagtctttgacctgtcccctcactggcctcagcagtcccctctccctgacctccctacaaggggatggactggtcccttctctcccaccttggagtttggaacatgatccctttccactttcccattctgagactgtaggggctgggcagcacaaggaaggccaccggttccccaaggctcacaacatgctggggagctggccttggcactgggagccgatgcatctgacaacatctgggcccctctcttcctccagctcagcaaccggctttttgaggaactcgccatggacgtgtatgacgaggtggatcgaagagaaaatgatgcaggtgagtcagggagcaggagtgtctggcgtggaggacccgagcggcccaggcatgggtctctggtcctttactgggctaagaaggggtgcctggggttggggctgctcagaggcctgcagatgagcccctgctggctgtgagcctgcctgggcagcatcccaggctgggtagagtgctgagggggaggcggctagcgtgctcctcccccagcctcagactggggctcctcttgctctggcagcctcccactttggctgtctccctggtaccgctccacccccctgcatcactccttcctggccacagccggattccagcccaaactctgggtttggatgagtggcactggccttgttccatttgtctgtccccagccg

SEQ ID NO: 30829 - DNA, 2133 bp, Artificial sequence
  DNA replication origin
gggcggagggcgcccgagggcgagcgggcaggcgggcacggcgggttccgggccagccccggggcggacggttggccgggcgcgcggagcctcgccggggcctcgccggagccgggccgggcagcaggggccgccgccgccgcccgggcccgccgcccgcgccccccacgctggcccagagggctgcggccgcgtcgccgctgaggatgtcccgaaaggggccgcgagcggaggtgtgtgcggactgcagcgccccgggtaagcgcggcggggccgggggcgggaccgcacagccaggccgccgccgggcgggcgccggggcctggcaagagcgctgtgcggggccggagggctgggcggggcggggggctgcggcctccaggctgggcccccgcctcggccactgcggagctgcgcccttggcgggagggccggcctggggtgcccatgctccctggaggccgtggactagcgaggaaggacgttcccggcgccgcctcccgctcctcggtctgagggaggcgggcagctggctgctcctccacctccatctctgtatccgacggaagcgccagcctggggtggcaggagggccgtggcggaggccgtcagggcttgggaggtgggggcgagtgtggttttatgtcatctcagtgccacccccgcgtcttgcacctgctgctcgcgtggtcggtacgcctgccggggtggtggagggcaaggagcagagggccgggcagatgcgccagtggggcctgaataccgtctcctcaggagcagatgagcggtggctactcccaggactccctgcctcgggttcctaaggctagcgctccttgccgggcctggcgttcagggccagtctagacccgggtgtcttctcgggaggcatccccaggcctgctggtggtgactgggaacagctcggctggaccctgctgttcctgttcaccggtaaggcctgcttgggaaagtgagcttggcatcaagctatcctgggtgcgggcccctccctgtcccctagcccagtctggccagaaatgggtgggaggccgtgccgagattccccgtatcctgctggcttcctggcctgtctcctggctgtatttacatggtggttcccttccttttcctaacagagttaggactgggctggagtgaaaccccccaggcctgctgaggaagtcaggggtaatgatccaagaggctgctcccttctgatgagggaggacagccagtgacggggctctgcagctggcctgggaaggaagctctagcccacatccattctttctttagcaaaggagctatctccctggtaggcccctgggcaggctgcggaggtccgtgaactctagcggggctgtgggcatgattaagagtgagagtatggggtgctggtttgtgggcccataactttcagccaccccttgagcaggcccaggaccccaccggttgagcctcacagatgctctggtggttctgggggtgccaagctagagtatttgggaactatgacttagcagggcttgggcacaaaatactccataggtggttatgaccaaggcctcctaggggcttatcatggtttagagggccctggggttgagggtccatacccctaagaaactgtgactccgttccccgagctgcaggcaggtctggggatggcagggctgaggatgcaccttgccttataaatgtctccccactgttccacaactccgtggggtaagcatggcatggaatgtggaggagagtcttagcaggcgcccaatcgggggagtctggggcttagtgttgcctttgttcccagcttactctgtaatcccaacaagactttcctcactgtggggtcctcagcttcctcaattcagaggcaaagaagttggagtagaaatggtttttggggggctgccatctccgaatctgtggtctgattctggggtggaggggtgaagggcagcaccagcaaggcagttgtcctttgtatgttgcgttgaatgtccgaccacagcctctggatgcccagtgggctcagggaggaatggtgggcatcagatgtgttggattgcccagctcctcctcccaggtcctcatctgtcagaggaatttgtgccccagatgcctcct

SEQ ID NO: 30830 - DNA, 981 bp, Artificial sequence
  DNA replication origin
ctgggccagcgtggggggcgcgggcggcgggcccgggcggcggcggcggcccctgctgcccggcccggctccggcgaggccccggcgaggctccgcgcgcccggccaaccgtccgccccggggctggcccggaacccgccgtgcccgcctgcccgctcgccctcgggcgccctccgccccgcgccgccccgccgccgctcgcggctcctctctccgccccctgcgcggctcccggccgcttctgcaggaagcggcgcaggccctgcccacagggggaggggccgcacccccgccccgccgcgcgctgccggccgcgccccctagagaaaggaagcccgggcgcgggcaggagggggcgggggcgcttaaaggggccgcggcagatgcccggccccggcgggcagcgtggcctgcggccctggcctccgctgcagcgctcgcctggcccggaggcaatgtgagtcaccctcacagccccctccccttcactttccgcgtggggtggaccgggggacgctgggcccacggacggcgagggtggggattagggaagaaggacttggaggcccaagtcccgctccaggtcaaaggggctgtgccttggggtacccgtctatctctggttggggtgaggtgtgcgtccctgtcccgtaggtgtccacatctgtgtgtccaggggtgtgtgtgtatgtgtcacactcttgctgaatacgcccactgctaacaatatggacgcccaggtgccagaaaggtcaggcagtgtattcccctgcctccggactaaaaatatatctatctctccatgcatccttccatccagagaggagagaatctgggcggtttttaaagacctcccgaggagtgaccactgtgcctgtgtgcactcacatccacttgtcatccgccttacacacacccacggtgtttctgggccaccagaggtgtgtgtgtccagaaagggtgcatataacatagaggggc

SEQ ID NO: 30831 - DNA, 1036 bp, Artificial sequence
  DNA replication origin
cggcgagggtggggattagggaagaaggacttggaggcccaagtcccgctccaggtcaaaggggctgtgccttggggtacccgtctatctctggttggggtgaggtgtgcgtccctgtcccgtaggtgtccacatctgtgtgtccaggggtgtgtgtgtatgtgtcacactcttgctgaatacgcccactgctaacaatatggacgcccaggtgccagaaaggtcaggcagtgtattcccctgcctccggactaaaaatatatctatctctccatgcatccttccatccagagaggagagaatctgggcggtttttaaagacctcccgaggagtgaccactgtgcctgtgtgcactcacatccacttgtcatccgccttacacacacccacggtgtttctgggccaccagaggtgtgtgtgtccagaaagggtgcatataacatagaggggccgtttcaggtgacggcctttcttcctggacttcacacgacgaggcaggcaaaggcaaggcaggtgagggacgtgggtgggctggggggcagggagcctaggtagaggccgcacatgagcgcagcccccgcactgagcatgcgcccccatacgcgtgtgccgcgcgtgtacccaacccccaatccctgcagcagcaaaaggcccgggcactctgcttgtggggagagggtagaggtccccagggccagacctgggggccaggtcagtggtgacaattgaggaggggttctccaagagtcagagactcctgcttgttaagatgggggcagtcctttggcaggggtgctcaagttggtcgattatcccaacggtgccagagcggcagtgatttgtgggtgggcaggctccttccctaggggagacaagtaatgctcatgagtcacaccacccgaaatacatgcaaagctgcctccatcgccttttgctgcggcccagattgacaagtttgtttgaaatcgcgatccatgggctttatttataattgcaccttaaaaaaatcttgcaggcctcccctccctcgacagc

SEQ ID NO: 30832 - DNA, 911 bp, Artificial sequence
  DNA replication origin
gaaacagcgcctccctcccccaaccaggcgggccgagacaggtggcgggaccaggcacggtgccttcttgagcccacctcagaacaaggcaggaataagggattccacaccggccctacttaaaacaacaatccaagaagtgtttgtgtgggaggtgccagcaaaagcttgcaaactctctcaggtttctttgtgtggtcttccctccttcctcctccacaccctgtggtgccaggccccagcgggaagagatgagggaggagcgggctgcctcgcccctttctcccgcctgggaggagccagctggcgtctccgggggcccgggaccgctgcccgcctgcaccaccaggggtcagcagagtgtcgtggctgcagccagtgcaggggagggggctggcgcggttgaggggcatctaggagtggccgggagcatgcctgtgcatttccttattaaattgtttttcgaaccttgtgtgtgattccactgtagcagtcctgcttcctggggtggtgacatctccacgggggaatccagaaacccttttatctccagtcccaggcccagaagtttggctgtgacggggctgggggaaacaaagtttggacgatgtgtccgcgccagggccactcccaggtagtctctgagccaaccaggagatggggagtggggtggaggggtaagcagagtgaatcatccttcttccccagcaaagcccaggagtccgaggacagggggagttcaggatggattgtggggagttgtcgattgtggggaactgtcccctgggcggccgtgttctttttttgccaggcggcggtagacactgaacccaggtcgcttgcgcttcggcccgcgctctcagctgccacgtgctcgagacgcgcccacacagcggagaaacaaagacagc

SEQ ID NO: 30833 - DNA, 1718 bp, Artificial sequence
  DNA replication origin
gatacttgccctcgggccccttcctggcggaggcgttggcggggatcatcgcccgctcctcatgccggggccgcggcgcccggccggggaggagggacggcgccggagccggggcccggggccgcggggcggggggccggcgctgcctgctcgcggggctgcggctcgggcatgtgcgagcggcggcgggcgggggcggcgcgcccggcgcggtgcgggcggcgcgggcgacgggcgtcctcgcgaggcggcggcggcgggcggcgcggagaggcccccacccgccctgggagggagcgggcactcggcggcgctgcgcggactcgcgctcgcctcccacacccccgcacacaaagacgccgctcggcggagggagcaggcgcccgcagcgggcgcgggggcgcacgggacgcgggccccggggacgccgccgcagggacgcgcgcccgcagcccccgggtccccacagctgcatagcccggccctcagcccgagcggccggcgcgggatacggggatgtggggatgatggggagagaggaaggggaccaggcgccccgggtagagcttgtcagctcagccccgcggcatcatggggtttgtagtccgcctcgtgaaactgggggtggcaggtggccgaagagggtctgcactgtccccggatctcgtgggagagtgggcggggagtcaggcctggcccagacgcgggcggggccctgacgccaggtgggctgggacgcacctcccccgctggcattttgccttttgctggggaagtgggggggcacgggcctaggtcgagcgtttgggagacggggtggaggtgtggtcttcagaattgagcttgggtcccaggggccatgaagaaggatccggattcccagaagagagcgtctgattgggaactcctgagaaaggtgtggggcatcagtaccaagggtcattggagcagccaggggtctggcccctggaacatttctgaggagtcttccctgccctgttagaaaattaaactccatcttccacacatgtcattggaaacagaatgtccagtaacgcgggaaagatggtccctttccccccgcacactgtccccagcaagaaccagagtgaggttggacagaaaaagcagcaggtggcagctccgttcctccacccagctggcccttcaggaagggaagtgactgattccagagactgtctccttcctgaatgaccccagggtgaagaggtacttccagaatggtccctgcagagggtgtggtaaaagttgaattggcctctcaagcgccaattgcaaggcctggaaggaccaagaggcttggaccagtccctggagggaggggactgtgatgtcagagagaccagagttcgaatagctccaactgcctgaccttaaaagagcaaactgcttaatttttccgactttctcggtccactccccttcaaaatgagaatctagatactacctcctggggtgagctaaggataatgactgccctggaaacagcgcctccctcccccaaccaggcgggccgagacaggtggcgggaccaggcacggtgccttcttgagcccacctcagaacaaggcaggaataagggattccacaccggccctacttaaaacaacaatccaagaagtgtttgtgtgggaggtgccagcaaaagcttgcaaactctctcaggtttctttgtgtggtcttccctccttcctcct

SEQ ID NO: 30834 - DNA, 1271 bp, Artificial sequence
  DNA replication origin
ccgagtgcccgctccctcccagggcgggtgggggcctctccgcgccgcccgccgccgccgcctcgcgaggacgcccgtcgcccgcgccgcccgcaccgcgccgggcgcgccgcccccgcccgccgccgctcgcacatgcccgagccgcagccccgcgagcaggcagcgccggccccccgccccgcggccccgggccccggctccggcgccgtccctcctccccggccgggcgccgcggccccggcatgaggagcgggcgatgatccccgccaacgcctccgccaggaaggggcccgagggcaagtatccgctgcactacctcgtgtggcacaaccgccaccgcgagctggagaaggaggtccgcgcgggccaggtaggagcgccttcggggcgccgcggggaccccgcggccgggcacgcccgtccggcctggggagggggtgcggcgcgggctgtcccgcctccctggcgagtttgcggcgcgtctttgtttgcggccgcggcttttgtgcttgttgaccgggaaagggtgatcccctccggccgggacgggcgggaccacacgtgtttcggactcacctagatgagagtagaggcctctgtgcccctcctccgccggggcagtgagggctgcagggaggggctgcgggctgtgtcggtgttccatgtggtgggagagtccgccccagccagttgagcggcgacacctcccgagtgagggtgcggaggtgggaaaggcttgcgtggggagggggccataggtcaagaatggggaagaggctgtgtcacactcccaggcaccccagccccacccagcgccctctccccaacggtgagcgctttctcttttagctctcaaactgggcagatccttggatctctcagagcccagccccagctcaggaacagggagtggagaaagaccctcttgggaggccccaagggccttgtccaggtgctgaaaagcgctctcctgccctctggtgctggggcctggtttctaggcgcagaggaagctgaggggccctggctgctggaaggacttgaggttctgcgcaccaggtgggctccctggtttctgctggtcagtaaggccacgtgggtcaccagctttgggctgggcagtggtctccagaaaacaggggaaggggggatgtcttctggccatgcttcaggatgtcttctggccatgcttcagaacaaaggcaggcacaggtcacagattgccacttctgcccttggcacccaggccacaggtaggcactcatggc

SEQ ID NO: 30835 - DNA, 1659 bp, Artificial sequence
  DNA replication origin
tcaaactgggcagatccttggatctctcagagcccagccccagctcaggaacagggagtggagaaagaccctcttgggaggccccaagggccttgtccaggtgctgaaaagcgctctcctgccctctggtgctggggcctggtttctaggcgcagaggaagctgaggggccctggctgctggaaggacttgaggttctgcgcaccaggtgggctccctggtttctgctggtcagtaaggccacgtgggtcaccagctttgggctgggcagtggtctccagaaaacaggggaaggggggatgtcttctggccatgcttcaggatgtcttctggccatgcttcagaacaaaggcaggcacaggtcacagattgccacttctgcccttggcacccaggccacaggtaggcactcatggcagagatgaccccccgcctccagggtgggctgcaagagccagagctgggcccgggtcccatggcttgctgcaggctgagaaccccagttttggactgggtctgagaccttggggccatgggctgggggtggttagcgcagttgcccgctgtgggaatttaccttctgagggctgcttattgagtcatgagaagttcagtctgaggagctgtgcaatcgccaagggaagcatggaggtggagggcaggccatcggactgagcaggctgggggtcaggatgtgtctctgaagtcccacgctgagccagcccccaggcctgcatggcatccagctctgcatggcagtccctgtaaatatgcgagtgacctgtgcccgcaggcctctgggccggtctgggtggccacttcctgttacctgtgcctatgccagcactctccgagtttctcctcagactgaactcctcagaccctgtctttgtttatctatcataaaggcagtgctctgcagccacgagaagcctgttaaagagagtgggtcacagtgcccccaggaaacagatgaacaaacagggcatcaacccctgccctcaaggagtctctgttctggtgaagcaagtgtgaacaggaaattccagggtgatgtgcaaagcgctaagacatggccagccagcctctgctggctcttctctgctttccttccctgaaagcaaaagaagacaagcctcatgtgggaagaacttcccaggggtccaaggatcactaggcagaaggctgaatctccagaatgcctcagtcccactcccttgcctgagggtgggtggtccttttactgcagagactggagagaggcagaatgccctgggagaaaagacttctccagcaggcctctctgctgataatcctgaagtgggtggccatcttgctggggtaaggttggggtggggggcaccggagccgctgcaggtagaggtgttgggggctgctcatgtgtttctctctcccacccctctggctgcctcagaaacaaggtcccagattcacccctacccctgccccagtgagttaatgtctccttgaaatggacactgcctgtcctggatccaggccagggggaatatagggcactggtggaggttaacccttgttcaaccacagaggagccaggccagtcctctccttccctcaggcgtgccaaaaagaggaatgccactccgtgtaggtgggagagttccctagctgtctcccc

SEQ ID NO: 30836 - DNA, 1295 bp, Artificial sequence
  DNA replication origin
gagccaggccagtcctctccttccctcaggcgtgccaaaaagaggaatgccactccgtgtaggtgggagagttccctagctgtctcccctctcgaggactggcccagagtgaggcttgtatccagatgtacactgcctactccccagggcaccaggctctgttttctgcaagggggacctggggacagccacctaacatcatgagaaaagcactgtggaaccctggcatcccagccaggggtccctggcctctagtccccctggtaccagccgccacagaaacagctcggctttcctcaagcactcaggagccaggtttccctggtcttggcttggcatagctgcctcttcttcactccaagaaagccccgcagaggccctccgtgggcaggcttggcagtgcagctggctgaggagggggccagcatggccaccttcagagcaggttaatgggctttgctcagccccaaattgctctgctggaggctggaagcagggagtgatgggcagataggaggtgcctggtgaagggaaggggcacccagcagtgctgtgatgccagcccggtgccctgcttgccgctatgcatgttctctgccaggtcgggggggacagggttgtaagccagggaatatgccagttcccccttgcctggcatggccagctgggcatggtcctggttctggagtcgtgagttcctggtgttccctggggtgggaacagggggaagggttagcctgtgcagctcccgtgggagggacatgtgtgggctgggcctggggagcaggactctgcccctggcaaccagaaccctgaagtgggcagattgtggtcccagagaatcattttccttctccctggggcgttctccaccgtgggcttgcttcctgctttccctgttcacccttctgacctagaggcaggggagatgggttgtggggcccaggatgtgcgaggagcacctcagacccctccctttgcctacactgggcagtcctggatgtggggcatcaccacagctggtaagctaggaagctcgggagagggagccacaaaccccagaaaccaaaaatcaatgtgttctgggatgagggggaggggctgcaagggcaggatgggaggggtgacatggagggagaagtccagggtgcggtccccacagcccgtggcctcctacgcagcttgaggatgcatcctgcctccctccccttgaatgagctcaggcagacctgcccctgcaccccacgctgggcaggagaggtcaagcaacgactacaccagactcctgccttcct

SEQ ID NO: 30837 - DNA, 1650 bp, Artificial sequence
  DNA replication origin
ccaggagggtccctgccgagggccccgcgggttctccggctgtgtcctggcttaggggagacaggatcctctccggaggattctctccggcccagcgggcactgacctgtcctgtcggcgaccctcgtaggacatggggtgggtgcctggcttgctgttggttagcgcctcccagatggtgacctgcggggaggcgtgggcgttagccgtggcggcgcggagtcccgtggccccgcgcgcccgcggagacgcacctggtcatactcactgcccgcctcaagcaggctctgctggatggcgaattgcagcaggtcgtcgtcgtcgtcccgggtcgccgcctcccgctggccgcccatcatgctgtagccgcgcggggcctcgaacaacgctggggagatctcgcagccgcggcaggaggctgggggcgcgggggctgggtcaggcacggccgggcgcgcccctcccacccaccccggggagagccgaggggcaggcgttctcgcggggggcctcactcgtggagctggagctgctgacgctggaggagtcgctgcctggggaaggcgtctcgctgctggggctgcctcgcaccgatggcaccggttcgtcgcagccgttgaggttcccgaaggtgatgcgggcgttgaggatgtggaagatcgggatttctgaggatgaggaaacctttaggcgccaccactcagcccctcacacctcagcctcagccccaccccgacctcatctaaaccccggtcggcccgccacgggctcaggagaaatggccgtgcggtctcaccaatcttaactgggaagccaggaggcagacgcagggtgatgaagtcccggagcttggcaaaaagcgcattgctgacggccatgaggtcaatgatgggggccacctgctcacacagggacaggggatgctcctcacacagccacagcttggccttgaacctgcccccaccagatcccaaggggtaagggacactgcaggaagccatggcctcccagcatctcctggagccccggccccccaccttcccagcaccggcaggggcctcacttctgtgtcttggtggtcagttccatggggcggcccatatcacggttgcccagctcaaagttggggttgaagtattcttctgcagtgatggcagtggggttggcttggctcagagtctgagtgatcagggtctgtaccacatggggaggggcccaggagctcccctcagttcctaatgccaggccaactcatttgttgtcacaaggcccccaagctgtcccctctgccagtgtggcgctgacatggccttgggcattgtggaaaggaggtccacataggccatgctaagcaggacgcttcccaagcctcctcctgagccacatccacatccctccacttacgggtacccctgcacacactcaccccattttgggggcccccgtgctgctcagcgattcccaggaaggactgcaaaggtgtcttacagcctacaagaaatgtggcatctcagaggacaccgcaactccacacacacctgggcacctcatcagaggtgacagcacccaagacctagggaggaggccggttcctggggtggggcctgctcacccaaccacatactcaggcaccttcacctgaaggggact

SEQ ID NO: 30838 - DNA, 1345 bp, Artificial sequence
  DNA replication origin
tacacacacactgcccccaaccctctgccgttgcctctctcagaaaaacaagacgtactgaatgaaatattttactaagcgttcagtctgtgcctcctgcatgggtgggagtgaggggaacgagacccccagcctctgcaaatgctacccccaggctcctgggagacctggcgatgcactcctgggctcagggtccatcaggcagcctcttaccctagagctctctccactctgaggttcagaaggaccccaacccacaccgtaggcgttccccccaagtaaagttaggtagcaaaagcctccggtatgaagcctcttttatttgtgcctcagaatcagtctggtgcccctggcatcagggaagggggtgggaggaacagtttctctttgttcttttcttccatccctctttgtgtcccttctgagcctcactggctgagccgggaaggccagtcccagacaggcccgggacaagggtgtgcggtgggcccctgcccctggcggggtctgtgcttctctgggtgggtgaggtggggcaggggagagccgggggttagcaccattggatgaagggttttagagtcagtctccgtgtgggggcaagtgggatgtacaaccacagaggctagcagcagctggtgggaaggggtgggggtggcgccagggccctgggcgagccctttgtgtccagtctacttgggtctagtgcttaccccagcccaatatgctccccactctccgaggcaccatgagggagtcagggcttgcacaggccagggggctacgttggacacactccctgatcacaaaaaaaaaaaaaaaaaaatgtgccttgggggatgggactccaacttctggctgcccaaggagaagctggaaccaccctgagacccaggacgggtgtgggggctgggggagccgggtaccccgctaagtgcacttgacgctgaaatgccggggtgggggaggggctgggccctagacgtgctggtttgtgtctggaacaaagcagtgacacagcacgcggggagctcagctgccccccaggagtgaagagcagagatgcaaaggcttcaggggcagtgtcctggagtggggttagtgaacagaaatgcggaccggccagaaggagcaagggatagggacagcgctcctctaaggattcatctccccctcaggaccgcctggctccgccctaggacaggacagatctgagcccaggggagcgggttggggaatcagaatacagcaaagcagggggaccaggccgtgccagttgcctccagggccctggcctgggaaggtaccccgcggccatgccgaatccctccccgaaccgtgcctg

SEQ ID NO: 30839 - DNA, 1408 bp, Artificial sequence
  DNA replication origin
aagcaccgcgagctccgggtcacgaagcgcaacatcctggacgtgcgcccgccctccggcccccgccgcagccagtcggccagcgacgcccccttgtcggtaagatcggccctgctgcactctggcccaatctacatctcccccaaccgcccctatacgacacggcctctctgtcctccgccccagcagcagcacaccctggagacgctgctggaagagatcaaggccctccgcgagcgggtgcaggcccaggagcagcgcatcacggctctggagaacatgctgtgcgagctggtggacggcacggactagccccgcgcgccaggcaggcggagcggggcggggcgcacaagctcggccccgccccggcttttagtcccgaactccggaccccgccttcttgggctgggcccgggggcgggactggggagggaactccgcccctcgcgggagaccagaactcttggagcttaggggagacccacgtcgctccagcggaggctggactgcgagcctcgtctgggactcggctggagctggcctagggaggcctggggtaacctggggggctcagcaatggtgctgcacggcgaggtggtgtccccctttgtcctccgcccagggcagggaaagtgcttagtattagcgtgatgcttggggttattggagcctgagcttgacctcaaacgggtggcgatttgatgggtacccccaggctggggaaaatgacagcgcttctcctaatcagctcactggattccatcaccctgagcggtaaaccagatgggcgtcaccccagttctgcagacacatacacaacccgtttgctgcagagccggacccagtggctacacccacagcggtctgtggtagagaactctcttccttctttccaccgacaggggcgagggctgcttcctcgcggcagcccccgcgaagaaatctcgagagaactggcatgaggagttaggttcatcacaaatacacacacactgcccccaaccctctgccgttgcctctctcagaaaaacaagacgtactgaatgaaatattttactaagcgttcagtctgtgcctcctgcatgggtgggagtgaggggaacgagacccccagcctctgcaaatgctacccccaggctcctgggagacctggcgatgcactcctgggctcagggtccatcaggcagcctcttaccctagagctctctccactctgaggttcagaaggaccccaacccacaccgtaggcgttccccccaagtaaagttaggtagcaaaagcctccggtatgaagcctcttttatttgtgcctcagaatcagtctggtgcccctggcatcagggaagggggtgggaggaacagtttctctttgttcttttcttccatccctctttgtgtcccttctgag

SEQ ID NO: 30840 - DNA, 2575 bp, Artificial sequence
  DNA replication origin
gctggccctttctccttgtggacccgctgggcgggggatggggcaaccctcgcgcgttgcttatcccagccggatgccctgggagggcggcggccctggcctcgccagcctcaagtctaacctggggtgcgggtgcgtgggccgcgtgcatgtctgcgtggagcaagcgcgccgagagcggtcggggctggcgccggggcgctctaacccactaacccggcgagcaggagcaagcccggcctcacgagggcgcccgcccgctgcgggctgtcttcaccgcagacgggaagctgctcagcaccggcttcagcaggatgagtgagcggcaactcgcgctctgggacccggtaggccaggccgcgccgggcgcgctagctcgctccttctctgggtctgccgggagcgccttcccgggctgtggctggcgcccaagaggccagagcggagcggggagctcccattcgggaaaagcctcgctgcgactccggggagccagcagacacccctgctctagggatcggcctttgagcgcgcttaagggttcgggatcggctgagagccgcgtgcctcctgctctctccaggcccggatgctctccaggtcaggggccagacgtggccccgcaggaagctgagtgcttaggccccatttgtctcttccccgcatccgctcctccaccccggacacccaagtcagcaagctggttgctcatccctccatgctcctcagggcaggcagctgggtgatgtccctccctgtctccccctccccccaggagaggtttgcggcccacgaggggatgaggcccatgcgggccgtcttcacgcgccagggccatatcttcaccacgggcttcacccgcatgagccagcgagagctgggcctgtgggacccggtaacgcagctggaggcttggggtgtgtgcctcggggactggcatcacgggagagtggccaggcgccccccacccgcagggcatgcccacctggacaggactgaaggctgctgccacctctgcagcgcctgccattctcacacccacccctctgcccagttttgctgcgtcgcgtgaaggatcctgcgctggcgcccccacctggtgatgccgagtccctgggggtggtttgctgtgactgcatgcggcgcgcagcgggtatatgtgcaggggaggaggagctatgtgcgcaggggaggaggagagatgtgcccaggggaggggcctgcaactctggtcactagaggtttggggcatagggtttgggaaggccaggaagcgtaaaggggcttctgggggtcccgaagtagcacgggagggtggggcagggctggtcacgcctcctgtgctcgggcagaacaacttcgaggagccagtggcactgcaggagatggacacaagcaacggggtcctattgcccttttacgatcccgactccagcatcgtctacctgtgtggcaaggtgctcacggccgggcagggagaacagggcactggatggagatgtggagggccttgtccgggcgcgcccctgaaccgactgattttgcagggcgacagcagcattcggtactttgagattaccgacgagccgcctttcgtgcactacctgaacacgttcagcagcaaagagccgcagcggggcatgggtttcatgcccaaaaggggactggatgtcagcaagtgtgagatcgcccggtcagcagccttggcccctcctgaacacctacccgcctctgtcccccactcatgtcgggtcctagccacggggcttccccagtaatgcagtgctttggaaaagcggggcggggggataagacagctctgtttcagtgccagacccaccgctcactagccttacattctcaacttcagtttcctcatctataagatgatggtgaacacaccatcagggtgttttattgcagaaccaataatgtgtgtaatgtgcaatatgcatggtaggcgctgagcaagtgttggcctccaacccccttggtcttagacaggagaagttaaggacgtggaagtctgcgagggtgctgaaccctgctcccttataggttctacaagctacacgaaagaaagtgtgaacctatcatcatgactgtgccccgcaaggtgaggggccgggagaagggttgggcagggctacgaggcggaagggagcggagcaagccccgcaccctctcacgcaagtcctcctgtccacccacccccgcagtcagacctcttccaggacgatctgtacccggatacgccaggcccggagccggccctagaagcggacgaatggctatccggccaggacgccgaacccgtgctcatttcgctgagggacggctatgtgccccccaagcaccgcgagctccgggtcacgaagcgcaacatcctggacgtgcgcccgccctccggcccccgccgcagccagtcggccagcgacgcccccttgtcggtaagatcggccctgctgcactctggcccaatctacatctcccccaaccgcccctatacgacacggcctctctgtcctccgccccagcagcagcacaccctggagacgctgctggaagagatcaa

SEQ ID NO: 30841 - DNA, 1991 bp, Artificial sequence
  DNA replication origin
gctccgctctggcctcttgggcgccagccacagcccgggaaggcgctcccggcagacccagagaaggagcgagctagcgcgcccggcgcggcctggcctaccgggtcccagagcgcgagttgccgctcactcatcctgctgaagccggtgctgagcagcttcccgtctgcggtgaagacagcccgcagcgggcgggcgccctcgtgaggccgggcttgctcctgctcgccgggttagtgggttagagcgccccggcgccagccccgaccgctctcggcgcgcttgctccacgcagacatgcacgcggcccacgcacccgcaccccaggttagacttgaggctggcgaggccagggccgccgccctcccagggcatccggctgggataagcaacgcgcgagggttgccccatcccccgcccagcgggtccacaaggagaaagggccagccctcgagccagtgtcaggccccagaccctggaagatgcgtctgggtgccggctgagaggagaggggtccaggagctcaggtttcatgcaggttctggtgggaggatggagtttccagcttctcccctcctcaatcccaaagcgaggagcccttctctgagcttctgagatgcaagggaggggagggaacaggagccgggcagagaattgcaggctgggggcttacttagggcagagacctgtggttgcagagacgggggaagggggctagtctctggagcagggatgcgacaggtgaaagccgggaccaggggctctgataatggtgggtacaagggtgctgacagctggccactggtcaaggggttctggggagtggccaggccaggcactcaccgccaccacttggccttttctggggtcaatgatgcgcaaggtcttgtccttgcaggtggtggctagcaggctaccgttgctgttccagcacacactgtggatgacgtctgggtgcatatcatccaggctcagcagcacctccccggtgcccacattccagatgatgatcacattgtcaccacctgcccagagtggccaggcatggtcacctgggtcccacctttgccaccacccacccatctatgggggacccctccttagcccccagacctgcactgagcaggacattcctggcagtagggtgccaggagaggatgcccacacgcttggagtggccctcaagtgtgatgataggttccgtaatgttgcgcatgggggtatagtctggaatctgccacacctgggtaggaagaaaaggtatatggtgggtggaatgaggagccaccctgtccctccactccttccctacctttttttttaaccctactggctctcttgagtggtaagggtcaaatacagggcaagatgtggtggtgcatgcctagaacagaagcagctgggagccaggagggggcactgccagctctccagagacctcccattcactccagcagggagacttcagagcactgccctgctgctctccaggcaccaagttggccatggctataattagtcctaagcagtgcatcctgggagggggtgggcatgtagctaaaaatagtccaggagctgggcagggcagggccctgggacccagcacctcccttattaccacccttagcaccttccccagcacaggtgaggcagccttccctgctcccctgctcaactgcccagcagtagccacctggctcctaccatgatggtggtgtcgtctgaggcactggcgataacgttgtcattgtgtggacaccagtcaatatccagcacaggggcagtgtgcccagtgaccagtgggtagttcttatccactcgccctgtctgaggggttggagaagaagatgtggggctactctcctgtgtgttttttggggagtgggtagcagatctgcttacatctcgattccttattacctattttctctttgcagatccctctctgcacttctaaccccatccagtccacttcctgcactttactgaag

SEQ ID NO: 30842 - DNA, 1069 bp, Artificial sequence
  DNA replication origin
aaaacatgaggggatgcggcattaggagaggcagtgatggaatctggccaggcttggctgtgctgtgtcccaaccatctccatcacccggctcccctcctggtccctgctgggaatggggtggtgcatggagaggtgggagggctagggagtgggagtaagccaccctgatgttagggtggggtggggtggcctcccctctggtccttgagggcttggggaatagggaggagccaatccacacagatgcttctcctgactatggaatggaactaggtgagaacaaaggctcaggagttcccaggggccccagctagtgtcctcccacttgcttcctttccctgatccctcaccttggccagaggcaggacgatgaaggcacccccgcctccagcctccacaataatggccaggaatttggggttgacggcacagaaggagctgtcccatgtgaccttggacacacggatgtcctcgtaggcctggtcggcctttgctgcctgcccaaacacatggcggaacttgctttgccgaaccacacgtctgctcatagctgcaggcagagaggtaggatctcagtgcccagaaatgcctttggtccttagtcctgtgagctgcgggagggaggaggagtggaggggtggctgatgagaagggttatgtggtcaggagtcaggtataaatccatatagtgtctggtcctagaagcagggagctttcttcaaggtggtcaaagtatgggaaagttattttgctgtgtaaaatgctgtttaatgtaagtggctaggatttggggcctgaattctccacagagacccaggctgaggggattgtggagcctaacagactgaaagctttctggacgttggaatgtttttgggaggagcctcaatgccacactgcctgcaccccccgcccccaccaccgccagccttgatgagcatctcttcacggacgtggttgtagctcccagaggcaccctgtccagaagcagaagacttgaccattggatcttggcttaaagccaggtatggggccaagactgcagccaccacaggataccgaactcg

SEQ ID NO: 30843 - DNA, 860 bp, Artificial sequence
  DNA replication origin
gcgccgggctctagagagccgcaggatcggccagagtgcggagctggacacccgggtcccagatactacagacacccggagaggtggctccttcgccctgaagccttcctcggccccctacgcactcgggccccttccgcagaggattcgcagcgtgagcgccccgcagcccgctcaggaccaggtacccagccccccacacccggccgtcaccgcagccagcggagcgggcggggtccctgaggggcagaggtctgcgcctcctccccccgcgccgccaaattcggtttcgggcggggaggacgtggtgtctatatttggccggacagcagccagcgctcccggagggcgcagacacctcgtctcgcaagaacgcagtgtcagggcagcaggctgaagaagggtgcagggaggccgggcctcaggctcggggccgcagacgcgccttgaagggcacacggatgctggggctggggtggggcaggagccactggctggggctttgggagtgctcagtgtgtcctctagggagaccctagctggagaaaaggcacctcaccctccccacccctgcaaatctggcttggccgtggcgggggcaggggtggaggatggggttgaagaccccacccctagaagagttcactaggaagaaggcccaaccagggcagaggacccagaggagaaaccggacaagcctatggtaggcaaaagccagaagaccatgatcagggcttcctggagaagccagtgcagaaaggagtgggagaagagggatccacctcactctgtgctgccacccgtccccccacaaggcatgggatgaaaacagtagcagaaaggactcagattggtggaca

SEQ ID NO: 30844 - DNA, 1643 bp, Artificial sequence
  DNA replication origin
gtagaagaccgaaaggaaatagcagtgacaagtttgcagctccagagaagccaccgccccttgtacttggaggaactgacccctgaaaactgtgcggccggttgggctgagcgtctagagggactgagctggacaaccacgggcaagcgagggcagctcccagcgggtggagtccgcgcgggattctggtgccacctagacgccagggcggggaccgcaaggtgggcgggaggcttggaggccgggatgcgggggaatactggtagggtgcaaggagaatgctggaggggtgcaggggggatgccgggggtgcatggggggatgctggggggtgcaggggggatactgcgaggggtgcaggggggataatgggggttgcaggggagatcctgggagaggtgcagggggatgctggaagggctgcaggggggatgctgggggtgcaggggagatgctgggggggctgcaggggggatgctgggggtgcaggggggatgccgcgaggggtgaagggggggataatgggggatgcaggagcgatcctaggaggggtacagggagttgctgggaggttgcaggggggatgctgggagggctgcagtagggacattaggggttaggtgctggcattcagagcggcaacgccaggcgggagaatccccaacaagcttgggaatttcacccccaggggcagcgcctgcacgggagtggggcctcctcctttcagatgaacacagttgtctgctgcctcccacgttccacttcttaaatgagcatgtttgtgctgtataggcaagggcaacagaaaacgcaaagtgtcctttccaggagggccaaaggaggggggcagggacgctgggaagaggcgccaaagcggaggacggctgcaggggtgacttcagcgcttggctaccaagaccaggtctgtccagtgtgacttcttagcacttcttaattgtgcagtctcgccacttctgatcttccttctagactctttctagccgaagatgcattcctgcccagcgcgcagcccctccctatggcactgccctgttctgtgcaggtgctgcctagagagtgggcaccctgtggacctgggtcaaatcccggcccccaccctgtactgtggtgtgggcttgaccgagctccttaacctcaagctgtctggcctttgtgtctctgtttgtgaagtagggaggatgatctcagtgggcactgcccagctgtgggtggggaaggggccaactccttgcaggccctgtgcgctgggcccttcctccaagggggccttcgacccctcctctctctggccgggtggtcccatctcctcccctcttgctccccagctgcgggcaaccaccattagcaaatgacattagaattacacagacggccccgccctggttccccctgcctccatggcagagtccgcacacaactggcccagaccctccccctctctctaaacaggtgtttctcttcctcctgccctgggtaccatcccacagagaggccaggcccacctgcaggtcctcacctccacagagccagcctctcttgagcagctccgctctgccttctgatactcatcgccacaagcaccttgtccttcctcggcctcccactccctccctctgagcccg

SEQ ID NO: 30845 - DNA, 1227 bp, Artificial sequence
  DNA replication origin
ttcgaccgctactaccacgaagaggagttggagtcggcgctgagggaggcggcggccgcgggcctccccggcctggcccgcctctttagcatcggccgctcggtggaaggccggccgctgtgggtgcttcgcctcaccgccggcctggggtcgctaatccctgagggcgacgcggggcctgacgctgccgggcccgacgctgcggggccgctgctgcccggccggccccaggtgaagctggtgggcaacatgcatggcgacgagaccgtgtcgcgccaggtgttgatctacttggcccgcgagctggcggccggctaccgccgcggggacccgcgcctggtccgcctgctcaacaccaccgacgtgtacctgctgcccagcctcaaccccgatggcttcgagcgtgcccgcgagggcgactgtggcttcggcgacggcggcccgtccggggccagcggccgcgacaatagtcgcggccgcgacctcaaccgaagctttcccgaccagtttagcaccggcgaaccccccgccctggacgaggtgcccgaggtgcgcgccctcatcgagtggatccgcaggaacaagtgagtgttgcctgccccctccccgtccgtgtgagcctccaagggccgaggctggttccggcacccagtaggcgctcagacaatgctggcataaggggtggcggtggtgaaggtgaagggagacaccctgtaacggggacagggcccaggccgcgtagcctcccgtcctgctaatcatcaaagaattgcctcctagaggctgtcatttgttcaagggatggctggaggggacactcctttctgacatttctggtccctattcttacaggggcatagaatatgagcgagaagagatcttaaggataacctaggtcagctcacacattttatagataagctgtcaatgttgttatcttatatcaaaagtgcctaatgttataggcgctgtgctaattttttctgtgactgcagtatctcactttattttggccacaacctgatgtcatagacaccatcagttttgcatacggggaaattgagggtcagattggttaactgatttacataggagtgtggctgggacttagaattaggcaatctgattcccgatagtcctcttagccacggagggacactggagcccaaaaatggcagatgatattcccaggatcttccccttgcctatttgacagaagctgatttt

SEQ ID NO: 30846 - DNA, 898 bp, Artificial sequence
  DNA replication origin
cgatcccccaagaatgaagggaaatcaagacattctcagatgaagaaaaactaatagaatttgtcaccagctgatctactctttaaaaaaaaaatggctgagggaaattcttgaaacagaaaggaaacgattagaaaaaggaatcttgggacactaggaacgaagaagagtaaaatatgcataaatcaagtaagctttcctcttctcttgaattctctaacttatgcctgacccttgaagcaaatattgtaacactgatgtggttctcctcaatgaatgcagaggaaatacttaaaaacaactatattataaatgagtgggggaaagaactttacaggaattaaggtttctacacttcactagaattaagtcagcaccggtagactgtgataatttatgtatctataaagtgtgggtttggacagcagattttatcaggttgagggctcaggccgagagcatgtagaagcagttagctcactctttctagatgtggcggctgacaaggacaaagagggctgggactagaactgctgtagacaaggaaagcagccagtggagaagagcgcatacgccaaagaacgtggatgatggagcacaggcggggaggtaggatgaaggaaatggctctgggaagaaagggtctctatgtctgagaaaggaagaaattggctgaagatacaaattagagacaaggtgagggaaattgagggagttgcctgaggatgattctcctcccagtcaagtaggcacctgctgagagaaaggataagccgagatgagggagatgatgatggtttggggcgcagaaagcgggaatgaaagacaggagctaaagccgaagttttttctctctcgctacttaaaagctgtaagataacgaattgatcagcaggtg

SEQ ID NO: 30847 - DNA, 1231 bp, Artificial sequence
  DNA replication origin
ggggtaaggtcatagatcaacaggatcccaaggcagaagaatttttcttagtacagaacaaaatgaaaagtctcccatgtctacttctttctacacagacacggcaaccatccaatttctcaatcttttccccacctttccgccttttctattccacaaaaccgccattgtcatcatggcccgttctcaatgagctgctgggcacacctcccagatggggtggtggccaggcagaggggctcctcacttcccagtaggggcggccgggcaggggcggccgggcagaggcgccccccacctccctcccggacggggcggctggccgggcggggggctgatcccccccacctccctcccggacggggcggctggccgggcggggggctgacccccccacctccctcccggacggggcagctgcccgggcgtagacgctcctcacttcccagatggggtggctgccgggcggaggggctcctcacttctcagacagggcggctgccgggcggaggtctcctcacttctcagacggggtggccagacagagacgctcctcacctcccagacggggtcgcggccgggcagaggagctcctcacatcccagacggggcggcggggcagaggcgctccccacatctcagacgatgggcggccgggcagagacgctcctcacttcctagatgggatggcggctgggaagaggcgctcctcacttcctagatgggatggcggccgggcagaggcgctcctcactttccagacggggtggcggccgggcagaggctgcaatctcggcactttgggaggccaaggcaggtggctgggaggtggaggttgtagtgagccgagatcacgccactgcactccagcctgggcaccattgagcactgagtgaacgagactccgtctgcaatcccggcacctcgggaggccgaggcagtcaggcgtggcggcgctcgcctgcaattgcaggcactcggcaggctgaggcaggagaatcaggcagggaggttgcagtgagccgagatggcagcagtacagtccagcttcggctcggcatcagagggagaccgtggaaagagggagaccgtggggagagggagagggagagggaagaattatttttattcacaatccaatctggcagctaaaagaaaagcagtctttggatgtagaaacctggttttctgaagagcccagctgtaagacctggcttgtcattaggcttca

SEQ ID NO: 30848 - DNA, 911 bp, Artificial sequence
  DNA replication origin
tcttcccagccgccatcccatctaggaagtgaggagcgtctctgcccggccgcccatcgtctgagatgtggggagcgcctctgccccgccgccccgtctgggatgtgaggagctcctctgcccggccgcgaccccgtctgggaggtgaggagcgtctctgtctggccaccccgtctgagaagtgaggagacctccgcccggcagccgccctgtctgagaagtgaggagcccctccgcccggcagccaccccatctgggaagtgaggagcgtctacgcccgggcagctgccccgtccgggagggaggtgggggggtcagccccccgcccggccagccgccccgtccgggagggaggtgggggggatcagccccccgcccggccagccgccccgtccgggagggaggtggggggcgcctctgcccggccgcccctgcccggccgcccctactgggaagtgaggagcccctctgcctggccaccaccccatctgggaggtgtgcccagcagctcattgagaacgggccatgatgacaatggcggttttgtggaatagaaaaggcggaaaggtggggaaaagattgagaaattggatggttgccgtgtctgtgtagaaagaagtagacatgggagacttttcattttgttctgtactaagaaaaattcttctgccttgggatcctgttgatctatgaccttacccccaacctggtgctctctgaaacatgtgctgtgtccactcagggttaaatggattaagggtggtgcaagatgtgctttgttaaacagatgcttgaaggcagcatgctccttaagagtcatcaccactccctaatctcaagtacccagggacacaaacactgcggaaggcggcagggtcctctgcctaggaaaaccagagacctttgttcac

SEQ ID NO: 30849 - DNA, 761 bp, Artificial sequence
  DNA replication origin
gatgacctgaaacaatcctggctggcccatgtgtgcgagagagaggaaaatgaacctgggaagggcccaagaaaggctatgtcttctccataaataaaaatgcagtgggcggggacaaaaggtagcagctagatcctagggaagggactgacccaagcgtcagggcattgagttcaggttggagccaaagcatatacagtattgagatggcctctagagctggccttgcactgctgcgagggtgcagcaggtctgtgcccttcgtgtgtgctggacagtagcaggcaggaggggaagggagggaaagccaaggtaggtcactctgagctttggaagggaaaatctccctgtttgcatccttaggtaaaaagcagacaaacgtgaagtgagaacatgagccccagcagggaccggcagaccccctcacagctgtggctctggcctggttgggccccaggatatggcagctcaggggcatctgtgactggggtggggtgggggtagggttgatggccagggtctccgaggaggacagtcctcaggtctctagaagtgtcctgagtctggggaggtgggaatgggatgcagatgctctcctgtgtggaggaagggaggtgtgaggagagggtggggtcctgtccccagaagggcagcactgggaagggtccctggcagagtctcccaggagctcctatctctgggacagatcttacctcggtcctgggcctggcacagccccacctccatgatctcctgatccc

SEQ ID NO: 30850 - DNA, 936 bp, Artificial sequence
  DNA replication origin
cgaaacatgtgctgtgtccactcagggttaaatggattaagggcggtgcaagatgtgctttgttaaacagatgcttgaaggcagcatgctccttaagagtcatcaccactccctaatctcaagtacccagggacacaaacactgcggaaggccgcagggtcctctgcctaggaaaatcagagacccttgttcacttgtttatctgctgaccttccctccgctattgtcctatgaccctgccaaatccccctctgcgagaaacacccaagaatgatcaattaaaaaaaaaatatatggagaaagtttggttcttgaagggcccaaagggtggggtgggatgggtaaggtggtgtagccccaggtcctccagggcaagactcccctttaaggcaggggttaatttattgatatgggcgtccccggggcctggccagtgggtgtttgcgttttcccacacaggcaaagggtgggactcaaggtgttgctctgaaggatgaagggagagaagctgaaggatgacctgaaacaatcctggctggcccatgtgtgcgagagagaggaaaatgaacctgggaagggcccaagaaaggctatgtcttctccataaataaaaatgcagtgggcggggacaaaaggtagcagctagatcctagggaagggactgacccaagcgtcagggcattgagttcaggttggagccaaagcatatacagtattgagatggcctctagagctggccttgcactgctgcgagggtgcagcaggtctgtgcccttcgtgtgtgctggacagtagcaggcaggaggggaagggagggaaagccaaggtaggtcactctgagctttggaagggaaaatctccctgtttgcatccttaggtaaaaagcagacaaacgtgaagtgagaacatgagccccagcagggaccggcagacccc

SEQ ID NO: 30851 - DNA, 1215 bp, Artificial sequence
  DNA replication origin
catgaggggctgcagcccccgctgttcctccagccccccaggatgcagggcctctggggaagagccgaggggaccataaactcaccagatgccccatggtcttgggttgtgatgtgggtaccacatgctcctgatggtcttggagcccctgaactgtcccgccatttgggctgtggaatcctgagaagcccccagcccgtcatgaaatcagagccttcccccaagatgtggagccatcagctggaagagctgggcagctgcagagccccccagaccccgaggcctcccaccctcccatctggtgaccccaccatgtggccttggccctggggaggaggggtgggaacatcccctggagcctggctggaggtgcccctggaggcctcctgggccagggtgccgggagggcaagcctgactttgaggccacgacagggggcggccagaacagggtgggtgctgggctttgtggtcgtctcctggaagtggggctgggccaagggacacgggatggggagatgctgccatctgggcttggtaccctttcgtgggtaccaagggcagctggagcctgagcaactgaagggcaggaggactctcaggttgcggagagccagctgcacagaatcagagccggagggcgtggctccaggacacagagggcagccacggggaggatgagatgccttctgctgatggggatgaaaggcgtctgacttgggctctggggggtcagttccgggttcctttgggaccgtcagcagagacgtcctaaaggctcccaacaagctggcgacacaaggaaggtgccttggctgaaagccgagatcacctggccagggtggccatccccgggtctggctgcgtgaagccccaggggcagctgttcacctaccctgcaggagtgcctctcactggccagcagctgcaccagtgcccagaatgtgtcctcctcaggcagataaaggaggaacaaggcagcgatgtggctcaggtccctgcagtagcccaccacctgcaacagccagagtcaccgtggaagtaagtcacttgggagggctgaggtcacctgggaggactcatgtcatcggagagggcagaggtgactgggaaggcttcctctgaagaagagacttcctcaggatgcaaattcatttcatgacaagagccatatccatcgggcacttcagcaccttgtccaaaatgtctcctgata

SEQ ID NO: 30852 - DNA, 752 bp, Artificial sequence
  DNA replication origin
gactccatgcctttggccagggcaggagttggggggaagaagtcatgccccccggagacccctcccaccagcagaccctaccttgttctgcagctcctcgattgtcctgtagtactggctgtagtcacgggcgggccccggggcctgcctctggtaccagtcacggatcttcacctccagctcagtgttggcctcctccagggcgcgcatcttgtccaggtaggaggccaggcggtcattgaggttctgcatggtggccttctcacctccggccagcagcccatcaacgcccccaaagctgctgccatagccaccgccagagccaaagcagtagcagctggaatagctgctaccccggagggcactgcccaggccaccagcagatcccagcctgcaggagccggcacccaggccgccagacagccggcaggaggtgcgggatgagccactcccaggccggaggagcccttgatggagctggaggaggtgaactggtggatggtggtggtcatggtggcggcggcaggaggcaggcacacaggagaagggctggggaggagaggggccccaagttgtgtagggctgtgggggttcacacgcttccctgggctttcatcaccatgggccacctgctagctcccaggtggctggggaccccctccccacccatcatcaggaatttgcctcatttctccaaatcctcatgctgggtgccgtgcgtgtgcatgtgcgtgccactgctctcaggcctg

SEQ ID NO: 30853 - DNA, 784 bp, Artificial sequence
  DNA replication origin
ctctcggctgctggtggggctatctgggcctgtctgggaagtggaagccatcggcagtctgaaacatgaccaccttccacccagcgggcctggtgggaccctgggacccagggccggccttggggtggtgggcagggcaggatggggctgtggggtggggcacatggcccacctgaggagccacatcttggggagcctggagtggggaggggactggctggggtctctgtaagagcttcttcttgggcaatgtcctttaggtttcctgtgggctgagacctgagataaatgcccctcacctgaccctgaggtctcttggggtacagaagggtgagaggagtggaagggggcatccttggtttagatcctctcttagcacagcccaccatttccccatcctatagctgagcccctctttgcccaccccagcctggagtgtaaacctggggaaaggtttacacgaggagactgggttagcaagggcttctagggatggggcagggacagaagctgactggatggaactgtagcccctagagtgcattcctgggtgtcaggctctgcagaaggggccagtgtggacactgcacccctctggagccccagtttctttatgtgcgatgtgggttggtctccaaggcttgatggcatttctgtgctgtgaggtgggcctggtgggtttgggctcagtttccaaggcaggataggctcttggtcccctctttctcttcagcacccagccccgggccagcaccataggtggagcagtgttgggtgaaagaca

SEQ ID NO: 30854 - DNA, 1021 bp, Artificial sequence
  DNA replication origin
tgctgtgtggaccccaagggaggggagaggctgagggcccttctgtgtgggagactggggggaccacagactcgggggcaggtagggggaagagctcctgcctgacgttccctgtgcctccctcctccatcgcctgcagccacagtgaccagccaccaggtgtgccatcacggaggaagtccaggttggagaggtggtctccttctgtgagcaggtccacctctccccccactgaggcccctttctgcctgtgacagccccacctcaagggccatggcacagccatcagctccagctgccagcatgctactgccatgccccgagtgtccatctgggccccggttcatgacctgttgtctttctgtatctactttctgcagcccctcactgaggaggcctcctgggtttgtccagtgcctgctattaaagctttgctccaagttcaatgcctcgtgtgatctggtctgttcattggtttggggcagtgtgggctgagggactgggggaggtggatagtttattgagtgtttgggtatcagcttgtcacctgccaatctattctgcccactccatccaggccgggggctcctggaaagacgtgaagggaggaggcgaaaggattaagggtggagggatgggacagccccttgtattgggaaaagtttctaagaatcagccccgagtccccgtcaccatgccttttggggagcactccctgcctcagcccagggcaggttcaagagcagaaggagaggggctccgtggggaggggcttctgaaggagtggtccagggcattgatgagtgagagggggtgagagcgacgcaggcagcctgggaaaccagaccggctctgcccagctcagggtgtgtgtgaggcggggtggccgctgtgcgtgtatgcatggggggtgtcctgtttgctttggtggcttggcagccactgggctgttgaggaatctctctcggctgctggtggggctatctgggcctgtctgggaagtggaagccatcggcagtct

SEQ ID NO: 30855 - DNA, 994 bp, Artificial sequence
  DNA replication origin
tcgaaaggtagttgtacttttagttctttgagatacctccctactttttccatagaagttgaactaattgacacctaccgccgcttgctgggggttgaggacgcccagtgagtgtgcacccgggtacctgctggggcggcctggggacccgcttcacccagggagaagttggtgtctgagcaccagcgaagttcaggaggtgtgaatgtgggaacctgtgggggtttgcaggaggtgaaactgaccatgcaggctggagtctgactgaggagccttgaatgccaagttaaagcgtctggactagatcacgtaggcaatggggagccatggagggatttggagctgaagaggggaatgaacatcaagatattttagaacattcactctggctgcagagggagaaatggatcagaggggtcagggtggggccagagagatgcgtcagggggctggagtagggagtctggccagagaagtcctgcggggtggagggggggtggggcagcaggggaaggaaggtggtgcacgcagaagagaggttatagctcaaaacagcaggactggatgcctggatctcagggtaagcgtggctcacagtcaggactcagtaagtgtcgggtgaacacatatgaaggagtgggcattgatggccctgggtttctggttccgacgactgtgtgagtggtgataccatcagccacagggtgaagagcaaggtgggtggtggtcgggtttgcaggtgggaagggtgatcaggccttcagctgacagtttcctggagtctccatgcttagtcacacgttgcagctttttgctccccgaaaatggtgaagtccatctatagtctaacgacagtctctcctgctttaattgggtctatttgttgggccctctgggatatggaaaaaccacttgctcagcttctccttgtaaattcctggtgagtgcctccaggcctactgctgtgctgtttctttttcttcttcctgctgcg

SEQ ID NO: 30856 - DNA, 1193 bp, Artificial sequence
  DNA replication origin
agtagccgagcccagagtcctgctccggcgccgccgagcaccgcccgcctcagccgaccagccccgtcggctactgggcctagcctagaggagaggagggaaaggccgcggaggccgcgaggagacggctggggcgccagcggccggctgccgcctagttgtgctgcccggaccaaggaaggagaagtgggaggagcggggagctcagcggctcaggacgacgacgctcgccacatccgggaccctccggccgtggcggtcgcagcgccggcagctcgggcctcagcccctgcctctgtggtgactccgccgcgcttcgacgtcgcccctgtccccgtcccgcccgccgcccccgccaaccccgccgccggggacatgtccaacccctgaagccggaggaacgggccagtcagactgcgcccgacaggtgatggggagcggcggccgggctgggcagccgccgggtgggcgagctggcgcggggtacctgttgacttgggaagggccaggatcgcgatcaatggtgagttgggggtcggaggagtaggaaggcctagttcagggagagtaattggaaagccactcgctctggtttggacattctttaaaaagccgaggatgactcggggaggcggggtagtcttttgtggaggggaggatacacccgttcgcatcgcagcggatttcgggctgaaaagtcttggtcaaggagcccgacgctgcctcccggggctcggggagcagcagcccctgggctacggcccaggtgggctcgtgaaggggattattgaatccggttgcagactgcgcgcagtaaacactccttaaagatggagcgcttaacgggagggtgtacgtgtgtgttcccgggttgttaccttgcacacccacttatgcccgcttgcaaaacctttactccccgcctctggccaccgttgccggggccgcacaccttaaactcaggtctctctgaggagaggagactgaggttgacttttcccatgtgcctgtctgatccgacggctcgggctcattgtacactgtgttttggaagtgtctgattgtagggtggcatgtttggggttgtaccttgtaggccgcagaacttgtgtcacttctaactccagacctgctttaaaaacacacttttggaggcgggtagggggtacttttctaactatgtgctcatacaa

SEQ ID NO: 30857 - DNA, 1201 bp, Artificial sequence
  DNA replication origin
cattttctgttcatgatttttttttttttttttttttgtagaaagacctttaatacttctgtttacaaaattcgggcatacatttcagtttgccctgaaccgtgcccaaggctgtgtgctcatctctgccagggtgtctgtgcccttcatgtactgccgaccacgagggtgcagagcagagcctggggtccggaggcttcgctgggcctcagggggaggggaatgtgaatgtggcccagcccagaggaccctccatttcgtcgattttggattgggcgacagaggaagcagatgtcggggctgcagacatgctggcctggacaggggtctggggaccccggggctgcctgccgtggtctagaggagatggctggggccacttcccacagggtgggttggcagcggctcggcaaggggaggcctggctaccaggggcttgaacatttgctcactggagcctttgtgcttggcccttagcagcacagctggggctgtggtcccgtgcgaggtgtgctgggggggtgtgtaggtggctggtggtggcagcttgtgccagagtgacacaggcttccgtgggcctggctgggggcagttaaaaagctgaaaaggtacttggtgtgtgagggtaaggcttgggaggcagggccctagaggaggccatgttctctgtcctggttgaggggagcagtatgggggggaaggtggggcagatcccagctggcctctgtctcctggttgcaagctgacagcaggccagggaaacagtgaggccctctgccctggccttggggagaaggagtgcatgtgtgaggctggggtactgtggccctggagtggggctagggttcatcgccaggagcaggcttgtggggggatttaaaaccagggtcctgtctctgagccaccccacagggacactcgatccaagcctgttaaggccgtggaactcgagggtaagctgtgggctgggcccccatggggtcaggatggaggtgggggctgccctggaggaatattagtgtttctgagagcaccttagtgttgccccgtctgggccagctgggtgaggagttggggagcgggaagaaggccggcgccatggagtgaggaagggagccgtcaccgttaggggtaagcgctagtgtaaacaagcgtccccacccaccccgataagcctcccacccaagtgtggctccctgct

SEQ ID NO: 30858 - DNA, 1307 bp, Artificial sequence
  DNA replication origin
gaatttgaggctgcagtgagctatgatcatgccattgtactccagcctgggccactgaaaaaggtcccatctcaaaaagaaaagaaggctgggcatggtgtttcatgcctgtaatcccagcactttgggtggccgaagtgggtggatcacttgaggccaggagttcgagaccaacctggccaacatggtgaaaccccgtctctaccaaaaatacaaaaattagccgggtgtggtggctcatgcctgtaatgccagctactcaggaggaggcaggagaattccttgaacctgggaggcgggggttggagtgagccaagattgtgccactgcatttcagcctgagggacagagtgagactctgtcagaagagaagggaaggaaaggggaggggaggggaggggagggaagaggaggggaggggaggggaaggaagaagagatcttggcataacccaagcccccttcagaagggtcaccctggctgctactttaaggataggcagacagagggagttgtgggagggaaggccaatcaggtagagagacttccttatcaaacttctggaggttgaaagagtgtgatgcgggctctgacctgggagaacagtcatggagccaaggatagtgggggcaggggatgctggggtcctggggaatggcgtggggagtggccagaaacttgaggacttttgttcctgagcacagtcttccattcctccggcattgagacttttttttttcttttttttttgagacagggtctcactctgttgcccaggctggattgcagtggcgtgatctcggctcactgcagcctctgcctccagggttcaagtgattctcccgcctcaacctccctagtagatgggattaaaggcatgcaccaccataccagttaatttttgtatttttagtagggacagggtttcactatgggtgaactggctggtctcaaactcctggcctcaggtaatctgcctgccttggcctcccaaagtgctgggattacgggcatgagccaccacgcccagccaggctctctttatagacaaagatgttagcgttctcgccctctaatctcacggggcatgaggtctctctccagcctcttgtgtaaaggcacaggtcccattcatgaggtctccaccctcctcacctcccataggccccaattcttaacaccacgacctcgggggttaagatttcaacacatattggccaggcatggtggtgcacacctgtaatctcagcactttaggaggccaaagtgagcagattgctttgagctcaggagtttaagaccagcct

SEQ ID NO: 30859 - DNA, 1166 bp, Artificial sequence
  DNA replication origin
ggatcacgaggtcagtagatcgagaccatcctggctaacacggtgaaaccccgaatctactaaaaatacaaaaaattagccgggcgtggtggcaggcgcctgtagtcccagttactagggaggctgaggcaggagaatggcgtgaacccgcgaggcagagcttgcagtgaaccgagatcgcgccactgcactccagcctgggcgacagagcgggactccatctcaaaaataaataaataaataaataaataaataaataaataaataaataagagctagcaagtcattacaaaatgtttttaaaccctgcatggaccaagccaattacatctgtgggctggattcagctctggggtggacacagagggaggggcggggcatttggtgaaggcgatgcaaagcatcatgggtgagttggggaccacatgggccagggggtttgactaggtggtgcctaggcgggtgccagcatgtttgtgggggcaggcgcggggcgggggtggggtggtttaaactgaacaggtgttttgggtctaggttggagccacgataacatttttcaattttgaagaagtcagtgatagcttttaaacagctgaatgactcagtcatgcctgtctgtccccatcccccaatcccaacacccagaaagctgtgaatcaggctttctttgggggtggagggacagtagatccatccatgaaggaaacaaactaaacagcccccgtcttccagcgcgctcacagcccgccggcgagtgggggaaggtgtccttagtaaggttaggataggatggcaggcgtgatggtgggaatgtggcagagggttagtggttgtctgcagatatgggagccactgctatgtgttcaatgcactaaggatgcaacgacgaacaggacagacatggccctgccttcaaggaaaaagactgtgaaggaggaaggaaataaggagagacggtaattccagggggtgatgagaaaatgtaaaaattaaaatagcaggatgggggatggggctcagatcggcagcctacaggcccaggagacagagccggtggggaggaggatggaggatgcggagcgggggtcctcagtggctcacaagccaccccttgctccctgggacccagcagcctggctgggcctctgtctccccagaatcac

SEQ ID NO: 30860 - DNA, 1178 bp, Artificial sequence
  DNA replication origin
tttcaccatgttggccaggctggtctcgaactcctgacctcaggtgatccacccacctcagtctcccaaagtgctgggattacaggcgtgagccacagtgccgggcgaaaattttttttaattagctgggcaacgtggagcctgcctgtaatcccagctacttgggaggctgaggtgggaggatcgcttgaccccaggagtttgaggttgccgtgagctatgattgcaccactgcactccagcccggggagacagagagagattctgtttctaaaaataatatacaataaaatgacgagtgttatgttaactgaattttattccaaaaaggaatttaaaatttttttttaatttttttttaaaaaggaattttttaaaaacaaggagttaaccatacaggccaaacaacacatctggggccagtttggccccagggctgccgtcatttgggaatggagggaaaggaaggggacggggtggaggggtgggagggtaatgcaccatccaggagttgtgggcgttcttggtgaagggtgggggatgaagcaacttggaggcaaaagaaagtaagtctcggctcaggggagcgctccctcttaacccaacctgccagccctggaaagaaatcagctacgggtcggaggccagccagcgaactgtcaaggaagtgcagagttctgacgggttagagagaaatgacaaccgctcagccccgcctgacaccctggcggtggcgtgatgaagtggtgcttgccgggtgggcggaggatgctctctgcgagcttgcgggaaagtgggggcgcccacccgagttcttctgcagtgtgaagagaggtgggttcggcctccctggtaacaaagggcggacggggtggcatttgcccctacccatccctcctggagggagagccattcccgtgggtgcaaggaagagagaagacagcgggcttctgggggcacagctgggggtgcagggtctgagtctccattggcttcaaaaaactgaatgatggccgggcgcagtggctaacgcctgtaatcctagcactttgggaggctgaagcaggcgaatcaccgggcgtcaggaatttgagaccagcctggccaacatagtgaaacactgtccctactaaaaatacaaaaattagctgggtgtggcggcaggtgcctgtaatccc

SEQ ID NO: 30861 - DNA, 936 bp, Artificial sequence
  DNA replication origin
ggacgattgaggggtgggattggcctgtggggttgaggatcccagggaagaagccctaagctttgctggacttggacttggccagtgtgttctggggaggaagagggatttctcagacccagatccctcggaccagcaacggggagggactccccctttgaggagtgcgatgtgcctggcaagttcaccagctagcttctgcagaacgtgtggccagtaagtggcttattcaacctggcactgactctgcctctctctccttcaagcctcagggccaggattcattgtgtaatgaattgagtggtaaaacagcaatgaatgagacagatccagtcccggcactggccagtcccggcacaaagaaggcttcccagccctggggaagtgacaggtaaactgaggcagggacctgctggctttaaatagcagtccccctcatggtgatctgggcagagacgaccactcatatggaggctctgaggctgttaccaagaaaaaagccggcagtatccaagctgcaatagtgtgatagggagtggtggggtctgcggcaacccagaaatgcctgccagctctaaagggatcctgtgtttgggattaaggtggatgtgggggcttgcaggctctgtggaatggagataggttgggaagggggttgggaataggagtgaggggttataggtgggtcccagagaggtagaggtgatggccatgggaaggtagaaggtgactcctaaccttgcatgagctcatttcaggggacacaaagccaaatgctgaccagggaatgaaaatgcagaatttgggcaggtgtgaggcagtggtgaaggacagggtagctgaagttgcaccaccccccccttttccatgggcacccgcttgctaccactcagctccagctgtgcgctaccacgtgggaactcaggctcaatgttg

SEQ ID NO: 30862 - DNA, 1034 bp, Artificial sequence
  DNA replication origin
ctctcccctttatctctctccagtcccagagactgggggggggggggtctcactatgttgtccaggctggtctcgaactcctagtccccacagcatatcctgacctagtttcgttttcattcatttatctatctccctcactagaataccaactccccagtccagggatgtttgtttcttgttcactgctgtctacccggagcctaggacagatcctggcacacagtaggcgctcaggagaaagcgggggagtggaggaaagcgagaatcccggaagccgccgggttccagcctgagcagcaggcgggcgtttaagtggaggcggattcctagttaggcaccagctggaaggggagcccggctgggctgcgcttccttccccggccgctaggggccgtttccccgctgctctgcggccgccaggtgagggggccccgcctcttcttcccaggtgctcaggaggggcagcccggggaagggaggggggtgaagagcgcagagctgggggagttggggtgtgaggggacaaagtgggggtgaagggagagagctgagcgtgtttgagatggggactgcttaaaggaagggaaaaatgcgtagggaggttgggaggtgtgagaaggtgaggagacagcccggtgttagggagagaggagcggagggttgagggaggtgcgggaagatgggtgataaactggggagtccgggaaagtctggcaggcggaaggccttgccctggtggctccactggaggaaatttggaccatgcatggaaaagaccgggacgattgaggggtgggattggcctgtggggttgaggatcccagggaagaagccctaagctttgctggacttggacttggccagtgtgttctggggaggaagagggatttctcagacccagatccctcggaccagcaacggggagggactccccctttgaggagtgcgatgtgcctggcaagttcaccagctagcttctgcagaacgtgtggccagtaagtggcttattcaacctggcactgactctgcct

SEQ ID NO: 30863 - DNA, 1103 bp, Artificial sequence
  DNA replication origin
cgagcccagctgtgtctgacgctgggatgctggaggtgctaggcgtacaaaatgtggggtcccagatacgcaggagaacacagggtgccctaggcatagggcaccctgggcgtgcgggttctatagcacagggtgcacagaagatggggcgtccaggtgcagggttcatagaacatggggtactcgaggcgcgtggcaccgtgggcgtggaggtcccgtgggacggaatacacagagcgtggggtgtctcaggcgcggggctcatgggaatcccaaggcgcaaggtgggaggctggaagcgaggagcgccctgggagcagggtgtccgaagcgcgggtaccgatctgggcagcgcggggcacgcggcgcgcgggcgagtctgcgtgcgcgcgcggacgccttggttcccggagcccagttgctggcgcggcctccactgcggctgcgaagccgaaggtctgaggtgcgccagggctctttacgcggcccccagcctctccgcaccctttgtctcctgagcacgccgctcacaagtccaggagacatggatcagatggaggctggagagccgatcccagctgggaccagtggggtttagagggtctagaaaggggtgaggggcgagggtgagggggttctggctggggttttccaaactgagctgagggtgccttaaagaatgtcgttgctttccctcatataagtaaaggccactccttctcgtagcctctggagagtgcaagttagaaccacctcctaggctagctctgtagggggaagtgggtgggctgctcagggctggagggtggggtggggacaaaggcctggagcaagagaacaaggaggtgacaagcttttcctgagcgtcaagttctgttcccttttcggtactgctaggtttatagaaagctggctgcctggagtgccctccatctcaaagccttcatgggtcttacttgctactgtcagtatctcaaactgggaaattgaggcgtagagagatgggatgccctcctccatacccagtgggtctgcagtcaaccacagatggatgggatctgttttgcactcaccaactcctactttatacccctttggtcccc

SEQ ID NO: 30864 - DNA, 2279 bp, Artificial sequence
  DNA replication origin
aggcggcacgtgtgtgcccaggcgacttcccagccccctccgacggcggcggtggacgaggggttaacggggcagcgggggcgcccctgcaggcccccgccgctcggcggcgccgctccggggcccgcgcggccccctcagccggggcctcctcggcagacggcggggcgggggcaccgcagcgccgacagctcccgcgccgacggctcgggctccccgcagtggccgcggggagctcgggttgggggcgggcggcgcggagctggcggagaggggcggcgcggccggaggggggggcgccaggccgggcccgtgggcaccgcaggacgcgcggaccgagccggagccgggaaccagcaatgacaagccgccagctctcccctctccccggcgcacccgctccgggaggggggcggtgggcgcgcgcaaaatccggcccggagtcgccgcccgggactggccgccgcaacccgcttgagcgccccaggagccggcccgaaaacccgtgctggagtttccttcctttcgcctcctctcgcctcctccctggaaaagcagagagagggaaagcgacgtgctggacccccgcgttggagcggggagtcggggaagggagacaggcgtaaggaagacccggagcggattttccagtgaagtaaaaggaaaggcgccgagcccggggaaggagggcgcaaatggggagatctggaagggttgtgcaaaacccgagttggattagataaagatgggagaaacggtgttggagcggggggttggggggtagatgcgacatggccaaacgcacccggggcacgcaaatttcgggccggattctttcttgggagacggagtaatgcgtcaggcctaacgcagtgaaaacaagcaagacccagcccggaactcccgggacctgggttcgcatggggggagttctggaagggggatgcttagtggctgaggcgacttgggctgccctcatcttcctggcagcgacgtgcaagggggaggggcaaaaggagggctggactcgggtacgacgggattcggcgtgctggctgcaccggagcggacaggtaaaagcggtttctggatccaggggcgctgcgaagggaatgcgatgaggccgctaccctgggagaccagacctacaataaaaggcgagggaggcacgccaagccaggactggagcgcgggacggaatgagacccttagcagaagatcctgggccaccgggacaggggcttggagctgaccgggtagcaggggcggagggaagcgttaggggaaggtttgtatctataaacgcctcaaagtcttgcttttggggagggggtgcgaggagaaaaattgaattttatgttctctgaaagagtaaaaacccggcatggattttcaacacctaacaactccattgcagctggtggactctaagaagtagggcaagaagcaggcttgggttcccaggcatcagaccaagtaaggcgaggggcaggtttcgggttgaggctgcagagggagcccccgcaccccctctctggggtggggaaggctgttggacccggcttggctgtctggagagcgaaagttgtgactgccaagacctatagctggggctataaaactgggccccaagccaaaaataggcacttcggcagaacaggcaactttgtgcagggtgggggctggagggaaatggaagtcgggggaagaatcctggcgtagagggaacagggggaggggggagtccctgaagcggggctgctggctccattttatgaaagatgggaagactgatggctggggagggcttggaatcctcagggaagggaatccattcaagtgaggcccaaatgttaaagcagacagctcaaagttcaaagttgggctgcatcttagcagcagggcagacaaaccctgatctgagttttagaggagggggacgggctgaggatggggatgggggaaacccccattccctacatgtccagggaagagagtgcattgctaaccaggcgctttgcagaatgaatgaggaaagggaaaagggttcctgagtaggagtggtaaatccacaaaacttgaggcatatctggatgggaaaaatgagtatctaagaaagcctgaattgataggctgcacgggaattaacttggcctctaagaatcccttcctagaagcacgtcgctgtggctaaactggaggaagggcagggacaccagacttccaggctgcccaggtgaccacgcaccacagctgtggcagcctgtcaccctccaccg

SEQ ID NO: 30865 - DNA, 1689 bp, Artificial sequence
  DNA replication origin
agccccggctccgggagatgtgccgggcggggggcccgggttcgccgagccgcaggagagacacgctgggccgaccccagagcggcgctggacaggtgagtgtctgcgggcccagggcgaggggcgaagccgcacctgggccaggtgtgcggggcgcgcggaagaggggaggcgggaaggatgggaggccggggcctgtcctggccgcgagggcggaggggacgctggagccgcgcggggcaccgcacctgagcgggaggggcgtcgggggcagcccgcacctcacccccactggcgaggggcccgggaggggcggcccccacggagctcccggggcgcgggggtgcggacgggcgaccgcagggtgcctggcggggggaggggacagcgagtgtgcccgcgcgcgcgccagcctttgtggggaagcggcgccgcggtgcctgcgtgtccccggtgcgtgtgcgcgcgggtccttggcgccctgtttgtgtaggtgtctgggtgtgagcggagggggtgcgtgtgcgtgtgcgcgccgcgcgccggccccgggccccagaggatccgtgtcggggattggcaccacaggatgctgggcgagggggttgtttttctctgggaggcagtggcgcgggggatggggaggggtccgtctgggtgtcaagccggccgcagtccggggggcgccgctgtcaggaagagggggtgcagccaggcagcaccttctctccgtggtgccgggttaaagcacgggaggccggcaggtttgatccacccggattattcgtgctttgaggacagctccccacccccaccccaggtgcgcattggattgagctacgagggttcagttgtcatcctcccatctgacggtcctgggacccgagtccaggcctgaagtggtggggtgggggggtgctgtgtttgctccagccgtgtccagaaaatgccctcccaggtatctctccagtgcacccccggcccccatctgaagacagccgctggctacacacacccctgtccctacacttccagtccaggtcctcacactgccccatccctggccagcacctcactgtacctgcctggaccctttcttcctgttccaacccccatccacccccagccatggcagctgcgtgggggtttctgtatcccagttccaggcagggcccccctcttccgcctggcttccactagactcagagctggggtctgtcttcccacatcccacatcccaacatgtgtgcctgggggcaggagggggaggggttcaaaatggctgccaagatggctgtctcgctgtctcgcgctctctctctcgctgtctctctctcgctctctgtctttctctatatctctctctctctcttcccctctctgcttgcccggctcccttatcctggtagggagtcactgcttagaggaggttggacccagtggggcacacctgagggtgaatgtatattcccggccgttgacctccatgctgtttggggacagaccattggtttctgcttctctctccaacaccccaagggctgccatgtgcctaacctgaccccagaccccactccttcaccctggctcacagcctgaaagctccctgccctccacctgctctccagggcctggccccctgaattgatcaaccccgcggagggtccacacccctcattctcttctccg

SEQ ID NO: 30866 - DNA, 1225 bp, Artificial sequence
  DNA replication origin
attcagttcaaagaggcggccgggcccgcgatcggcagcgcgcaccggccaaccaagccgcgcctccgcgagaagcgcctccgcgtgactgacgggggaatccgcgggccaacgggctgggcggcccggcggtgcgcgctcccgccggccaatcagagcgccgggcgggggaagtgggcggagcgaggcctgggtagggtgagcggcctccgaagcggagcggggctctgaggagacactttttcttcctccctccttccctcctctcctcctgccttcccttcccctttcctcccctctctcctccttctcccctcggtcagccggagcctgctggggcgagcggttggtattgcaggcgcttactctccggggccgcccggcgagtagctggccggggaaggaggcaggaaccgcgatggcgcctcagaagcacggcggtgggggagggggcggctcggggcccagcgcggggtccgggggaggcggcttcgggggttcggcggcgacggcttcgagcggcaaatccggcggcgggggctgtggaggcggtggcagttactcggcctcctcctcctccgcggcgttaccggtgaagaagtcgaaaatggagcacgtccaggctgaccacgagcttttcctccaggcctttgagagtgagtgcgtgcgaggctttgagggcaggaagacccactctgccaacaccggggatgggacactctgctgggcccccttcctcctcgggagtccacttgtgtggtagtggagggaggaattgaggggatgtccccctttcggagattacgtctccaggggatccggagtccagggccttgggagagctggaaaagagggtccgggcgggttcttgactcccccaagattgacgcaagaggctcgggactggggccccacgttcagagcaggcggcttttagatgaggaggtagcagttgaactgagccgcagtcacatcccgagactggttcttgttttctttcatgcctttcggactctagaaatacaggggtttcggttgtagcttttgaggggcaaaatgaagcctgtgaagggatgagtgcagtggaaccgaagaaagtgtccttagtctgaaatgccttcgcgctaacttggtgctgcaggttcctatggcacctttggatgcttaaaacccttcaaatctatccacccattttgtggatatgtaaactgagccagagagtggt

SEQ ID NO: 30867 - DNA, 1533 bp, Artificial sequence
  DNA replication origin
gtcaggcaagaatgcgatgagctgtgagaagcacttggcaaggtgcgggttatcaaccttgccaggcctcagcacgtttcccaaggaggcccaaccagcggcgctgtgccgcagcacggaagaggcggggtgagccgcggggcgggcggcgctgggacccggacgccacccgcgcgaggcgccgccgtgcgcccgtcaatcaaggtcgtcgtggggcatggggcggcggggctgggcggtgcttccgcctgcgcgaggccgcgccgggccgcttggaggcgcccggtgcagtcgggaacccgcgctaggtttcgccggccgcgcggccagatgaggggggcgatggagctggagcctgagctgctgttgcaggaggcccgcgagaacgtggaggcagcgcagagctaccggcgggagctgggtcaccggcttgaggggctgcgtgaggcgcggaggcaggtcggagggccacacccacaggggcgctgtgggcccgggggtggcgcggatgccgggcgaaggctgggagggctttgaggggtgggactgtccgaaaactctggagtagggaagaggcattcatttgaaaggagacctaatggagtctgggaacggggaaggtgggagttggggaggtcgtaaggggaagttttgggggtggagggagggtgtgaggagcgttcactaaactgtggggcagcgatgggagtagcggtggcctccgaagtttgggagagtgagggaccagagcagaatccgagggggtcatgcgggtagtgatgagtcgggggaggaggagactggtaaaaaacctgcggtgggtaggcggggaggcattgattttagagagcctgaggaagaggtgggacagtgacctgggagagctgaaagtggagacaaaatggatattggaaggggaggactaaggggcgagagtgagggagaggtagggattgagaagcagtagcatttgacaataaatgcggttaatgcctgaataatatgtcatacgatcttgaatgctttttaaaaaatcatttagagtaatcctgttctagaaggtttaaaatttaaggtgaaggtgaagctatgttggaagagcagaaggaaaatgatttccttttccttgagagagggaatacaaaggtatagagaaatggaaaaatagattttaagagaggagtgctgaaaggaaaagctaaatataatttcaagtggtgcagttatctgtttcacagggcaagagttatcaaagatacaggaaagccatatggtttctctataccctcgaatatatatagaaaaagatataacccgctgccaattggcgataggacggataatcttcagagtactattaacgcaactgcttaataagtgctttttgagtgagtgggattccatctgaatttctctgggtcatacttgatattaatctagttggtcgtcttagcacttccttgctgcatataacctgaaaatggtagaaaagtgctgtgctaacagtgtctttggatattctcatcattaacg

SEQ ID NO: 30868 - DNA, 913 bp, Artificial sequence
  DNA replication origin
gtgtggtggagacggccctcggggctcgggtgagaggttcacggtgtgggtgggaggggtcggggcccgcaggtgccacgtctgggtccagggggccgagggcgggacccggtggggccgaggggaggagtcgggtgggcctggggtccggccgggggtctcgcgctgcccgcgccgccgcgcccttacctgccgccccgcagtcggcgcagtgcgcgttgcctgtgtccggcgcccgcagcagctccagcagccgcttcttgttgcgctcgcgatcgcccatggccggcccggcgggctcagcggggctcagcccatggcccgtgcgctccgcccggcaggtggagagggacccggccgcggcgcctcagccaggcctgggcagccgccagccccgccccgcaccgtcaggactgtccgcccctccctcggcaggtccagtccggccccgagctccgccgacgcgcggggagggacaggagcacgcaaattggagtttaacacactggcctgagatcaaatcgtggcctgtcacttggtagctacgagactgtggacaacctattcaacctctgtgggtctcagtttccgcgtctatgaaagaggaacaagggcatatgtctgcatctcagcgcttcttggaaaattaaccagaatctaacttctgttaaagcgttctgttaatgtaagatcttacatctatttggagacgtatttatatgcaaatgccacctcctcaggaagccctctgtgataccctgcctggagtaatctttccagcctctgggtctccaagaatactcttgtagtatctgtctatttgttttggacctgagcactttctatctaccttgcatcacggttatttatatacttgtgttaattccactctctgaccgcagacacatacaca

SEQ ID NO: 30869 - DNA, 1338 bp, Artificial sequence
  DNA replication origin
ccgacccctcccacccacaccgtgaacctctcacccgagccccgagggccgtctccaccacaccctgccccggcccctacgagcccaggctctgctcccctcgcgggaccagatgcgcatcttcccacgtgcttggacccggacacgagagccggcagcctagagcccttccagtcccgctctcttccctggccaggcacccgaccgcccgagtccgggctctcgatgtctgcgcacccaggcgcgccccacgccctcggactcagacatcccagccagggctaaacgtcgggcccaggccgccgacagtcctgtgccccctgcccgctcccagacgccccccgaaggcctccccagcgccccacctcggggacgccgagggccccctaactcagcctccccacctgcagctccgcgccgagccccgcggtgcgccccccgcgccctcctctcggttccttctgagtcccttcacttccacgtcgcgcagcctcagactctctccccgggccctgaactgcctccaggatcttcaccccggtcgccgcgcagcggccggtgggctaaccagaaggtgccaggctggccgcttagttcgccttaggtgggagaaggggcgccccacctgccccagtgccccgagcccagccctggtttcttcaccgcgctttccgctcagctcctctcctgcctcatcccctgcagatcccgactgggcctcttacaagctggggatcttcatctgtctcaactgctgcggcgtccaccgtaacttccctgacatcagcagagttaaatctgtgcgacttgacttctgggacgacagtattgtggaggtagaaaggcatgcccgtggagagccatggaactgcgggactggagtagaggcagcgggcagggggctcccattctacagagggggaaactgagaaccagagaggggcaagtctagctagaggaaacacagcttataagatggcagcttagacagaggccgagagttcaaattctggctctatcatttgcttacttttttttttttttttttgagacggagtctcgctgtgttgtccaggctggagtgcagtggagcaatcttggctcactgcaaccgctgcctcccgggttcaagtaattctcctgcctcagcttctcaagcagctgggattacaggcgcctgccaccacacccggctaatttttttgtacttagtagagacggggtttcaccatgttggtcacgctggtctcgaactcctgacctcaggcgatccaccacctcagcctcccaaagtgctgggattacaggcctgaaccatcctgaaccgctcctggccat

SEQ ID NO: 30870 - DNA, 904 bp, Artificial sequence
  DNA replication origin
ccccccgcctggccagccgccccgtccgggaggtgaggggcgcctctgcccggccgcccctactgggaagtgaggagcccctctgccgggccagccgccccgtccgggagggaggcggggggggggggtcggccagctgccccgtccgggagggaggtggggggggtcagccccccttccggccggccgccccgtccgggaggtgaggggcgcctctgcccggccgcccctactgggaagtgaggacccctctgcccggccagccgccccgtccgggagggaggtgggggggacagccccccgcccggccagccgccctatccaggaggtgaggggcgcctctgcccggccgcccctactgggaagtgaggagcccctctgcctggccagccgccccgtccgggagggtgggggggggggtcagccccccgcccggccagccgccccatccgggaggtgaggggcgcttctgcccggccgcccctactgggaagtgaggagcccctctgcccggccacgaccccgtctgggaggtgtgcccagcagctcattggggatgggccatgatgacaatggcggttttgtggaatagaaaggcgggaagggtggggaaaaaattgagaaatcggatggttgccgggtctgtgtggatagaagtagacatgggagacttttcattttgttctgtactaagaaaaattcttctgccttgggatcctgtagatctgtgaccttatccccaaccctgtgctctctgaaacatgtgctgtgtccactcagggttaaatggattaagggcggtgcaagatgtgctttgttaaacagatgcttgaaggcagcatgctcgttaagagtcatcaccactccctaatcttaagtacccagggacacaaacactgcggaa

SEQ ID NO: 30871 - DNA, 2554 bp, Artificial sequence
  DNA replication origin
tctgacacatgctacaacataaataacccttgaagacattatgctaagtgaaataagccagtcacaaaaagacagatactgtatgattcaacttatatgaggtatttagagtagtcaaaatcagagacagaaattagaatgatggttgccagaggctgggggaagaggaaatggagaattttaatgtcctcctagaattccacttttgcgagttgaaaagagttatggtaccctgaagaaccagtcatgttaatttaaaattttttaaagttatggaaatgatggtagtgatggtttcaaaacattgtgaatgtatttcatatcaccaaactgtatacttaaaaatggtttagggccagagagaagtgggggaaagccagaagacttaagggtggagagggcagagcaagatagccaaatagaaggctccattgatcatccctcccacaagaacaccaaatttaacaactacacaaaaaagcaccttcataagaaccaaaaatcaggggtacttacagtacctggttttaactttatattactgaaacaggcactgaagagggtaggagaaacagtcttgaattgccaatgcaacccatatcccatgtgtcaggggccacatgcacagagaatctgtgcactcaggaaagggagagcatggtgataaagagaatagaaagactttgccttgtcgcttcacaaagcaaaactgggctgaattcagctgacgcctacccacagagggagcatttagatcagtcctagccagagaggaatcaaatcacccaccccagttattggaacctgagttctggcaagcctctccactgtgggctgaagtgctctggggctctaaataaacttgaaaggcagtctaggccacaaggactgcaactcctaggcaagtcctagtgctgagatgggtctctggaccggccccgagcctgggtgaatgtgccaccatgaagggaaggacacaagcctggctggctttgccatctgctgattatagagccctaggtccttgagtcaatataggtggtagccagatagtggttaacaaggggcttgggtaaggcacagtgctgtgttggctttaggtctgaccctgtgcagttctagtggtcatggccacaaggtgcttctgtcaccccacctccagctccaggcagctcagcacacagacagactgttttggagaacgtatgagaagagaacaagaatctctgcctggtaatccagataattcttctggatcttatacaagaccaccaaggtggtacctctagtagtctgcaagagtcacagctttactgggcttggggtgccccctaatgcagatacggcttagatcacaacgcccaagtcctttcaaattcctggaaagccttcccaagaaggacaggtacaaacaagcccagactgtgaagactacaataaataactaactcttcaatgcccaggcactgacaaacatccacgagcatcaagaccattcaggaaaacatgaccccaccaaactaactaaataagtcaccaagagccaattcaggagaaacagaaatatgtgacctttcagacagagaattcaaaatagctgatttaagaaaactcggagacattcaagataacagagaaggaattcagaattctatcaggtaaatttaacaaaatgattgaaataattaaaaatcggttaagagtcatcaccacgctctccctctccctctccctctccctccacggtctccctctgatgctgagccaaagctggacggtactgctgccatctcggctcactgcaacctccctgcctgattctcctgcctcagcctgtcgagtgcctgcgattgcaggcgcgcgccgccacgcctgactggttttcgtttttttttggtggagacggggtttcgctgtgttggccgggctggtctccagctcctaaccgcgagtgatccgccagcctcggcctcccgaggtgccgggattgcagatggagtctcgttcactcagtgctcaatggtgcccaggctggagtgcagtggcgtgatctcggctcgctacaaccacctcccagccgcctgccttggcctcccaaagagccgagattgcagcctctgcccggccgccaccccgtctgggaagtgaggagcttctctgcttggccacccatcgtctgggatatgaggagcccctctgcctggctgcccagtctggaaagtgaggagcgtctctgcccggccgccatcccatctaggaagcgaggagcgcctcttccccgccaccatcccatctaggaagtgaggagcgtctctgcccggccgcccatcgtctgagatgtggggagcacctctgccccaccgccctgtctgggatgtgaggagcgcctctgctgggccgcaaccctgtctgggaggtgaggagcgtctctgcccggccgctccgtctgagaagtgaggaaaccctctgcctggcaaccgccccgtctgagaagtgaggagcccctccgtccggcaaccaccccgtctgggaagtgaggagcgtctccgcccgg

SEQ ID NO: 30872 - DNA, 889 bp, Artificial sequence
  DNA replication origin
gccgaccagcgccgtcgactactgggcctagcccagacgagaggagggaaaggccgcagaggccgcgaggatgctgcggaggcgcgggcggccggctgccgcctagttgtgcagcccagaccaaggaaagagaagtgggaggagcggggagctcggcgtcccgcgtcctccgcggctcaggacgactacgctcggcacgtccgggaccctccggccgtggcggttgcagcgccaaaagctcgggcctcagcccctgacgctgtggtgactccgccgcgcctcgccgtcgcccctgtccccgtcctgcccgccgcctccgccgctggggacatgtccaaccccggaagccggaggaacgggcccgtcaagctgcacctgacaggtgagggggagcgccgggccgggctgggcagccgccgggtgggcgagctggcggggggtgcctgttgacttgggaagggccaggatcgcgatcaatggtgagttgggggttggaggaatgggaaggcctagttcagggagagtaattggaaaaccactcgctccggtttggacattctttaaaaagccgaggatgacttggggagggggggtggtcttttgtggaggggaggttacatcggttcgcatcgcaggcggatttcaggtccgaaagtcttggtcaaggagcccgatgctgcctctcggggctcggggaggagcccctgggctaccgcccaggtgggatcgtgaaggggatgaagagctctcgtggcgaggattattgaatccggttgctgactgcgcgcaactttaaggagtgtttactccttaaagatggagcgcttaacggaagtgtgtgcgtgtgtgttcccgggttgttaccttgcacacctacttatgcccgcgt

SEQ ID NO: 30873 - DNA, 2062 bp, Artificial sequence
  DNA replication origin
ttgaatttgtgatgatcctgtctttgacaagaactggctaatctggttgcgggattctgtcttggttcacttgggatttgttcatgctcaggtctgaggtccccgcctctgccagctgaagtgggtgagtcttccagctcccctgtccccagttagggggcattcaatgccaggctgagcgcggagagccatttctgcagcccccaccagggggcagccccagctcctggccatctcctttctgtgctgagccccttgggtgagagaaaatggcacgagctgaccttggacgaactaatatcggggtcccaggggcaggcagcagcccccagcttccactccctacctccttgccagggggctggctggatctccagcagccagtctctcccagccagctgcttgtccttattctccacttccacctccattttgcagggtaggtcgggggaaagcagcattgcttagattcgctctcatcttcagttgccctaaaaggaaggtactattatcctcacggtacaggcgaggaaaccggctaaaatatgctagtatcctgctgagcggcatccagctagcagagacgctcctactcagccgaatacccctactccactcccacggcctcccctttcccgctttctcacatttcggactcctcaatcctcagaaccacaggtctctcttcccaagaggtgttgcctttcgtggctctcagacgaactgaagggtcaaaggagagtagctaaaagccaggttcatcccaggagccggggctggaaagaagaggtccccgcccactgtcagaaggcaaatggcagtccctgcgcaggatatattcagggttgagcaggaagaccacagaggtacaaaccgaggcccagctaggggaggccatgcagttcaccccgtactccctgtctgcgccactacgttgctcccggctcctcacataatgggcgggcccatcccctctgggtggggcttcctctgggcccactcttgcctggagatcagggacttgaaggtaattaagacatatcttgccctggagggcttcccagcatggtaggggaaatgggcatcccactagagaattaagaattaactgggcacctggaagaagggcttagaactcagaatagaagataagatggcgtgccatcagagaagccttcccggaggaggaaacctctgtgctgagcatgacagcataggtgggagtagactcagccaaggcctttttttgggttggggccagtcgttgccacaaagacctgatgtgccgagcaagaaggtggagagaagagcccggccgggtcctgcagggccccgaggctgggctgggaagttagcacaagctggggtggaggctccgctgagcactaatgggaggaggccagggtcctgacctagagcctgcggccagcgggacagagattctgtcctggattctctgagcttggggcatgcgggctgccagggaggtgtgatggtgggaacccggcgaaagggaggaagcctcttccaggcgtggagcagccttgggccctgaacaggcaggcctctggaagcgcctcgcttttcctccctccggcctcatcctggttttctcctcatctccccgtcgcagggtcccgggtccaggctggggttcagttgcctgctcctcctctctgtgccctcccccgcccgatggccccacaagtgctgtcttgcaggagagcgccgggagaccgcagggcggaggtgaagaacggagtccagagccctccagagatggcagcgaatcccggccctgcctcttgccagctgtgtggcctagagtgagtccgacctctctgggcctcagcttcctccgggatgaatgcagtcacggaacgcgccaatgcaggaggcccccaggacatcctgagcgctcgggagacgccaggcgcggcagcgggcacggatagcggaaaggggcgcgaccccgcggaatcctccggcagggcagggcctttgggtggctccgggtgtccagaggaaggggtgggctcggggacgcggagggaaactgggg

SEQ ID NO: 30874 - DNA, 2147 bp, Artificial sequence
  DNA replication origin
acgggcggccccggagggcgcgcggcgatggcggcggcgggcaggcggcgggcgcggcgggcgaggggtccgggctgagctgcgggccggcccggatggcgggcggcgcgggctggtcgggcgcccccgcggctctgctgcgctccgtgcgccgcctgcgcgaggtgttcgaggtgtgcggccgcgaccccgacggcttcctgcgcgtggagcgcgtcgcggcgctcggactgcgcttcggccagggcgaggaggtaagctggcccgaccccagtcccggcccggggaccccagcccagccccgccgcccctcccccagctcccccgccgggtcacccgcgtggcccgaggcggtggcctccctcccaatcccctccctccgccggagcccaggacctcggccccccccgggtatccctggcccagccgggccctcgctttccgccccccggcgcccgtgccccgagcgtcacgcgtcacgcctagggtggcttctgcgcccaccttccttcctcggccatgcaggtccttctgagcggtctgcacatccacccttgtctgggggagagagctgccagaatccggccctaggctccccaccccacccggcgctgcggagaccaagatgcaagggtctgtgtacgtcctgctgggccgggccagggggtgaaagggaccggtaggggtgctctgcagccttggctcctcggctgcacacaccctgcccagacacggaaggaggtgtctgctggggccaccgtgtactcccgggccagtgtcgggtgacctctcattcaggctctgctgggcagccaggctggcagctggctgtgttggttgcagcaggccaggcaaagccaggctcggggagtggtggctgagcagagggctttcatgtggcggggccgcatctatttggggaaagcaggacttacgtagattgttaacagggctggaagcggagggtcggtgccgccagtagggtggacggagtcatatcactaaacgcacactacaccagtgtcctctggtgccaccggcatggggactggggactgtgtctcaaggggaggacaagacacccacctggctgaaatggtcaggggtttcccctggagccaaaagccctgagaagtgggtttccaaggccatctaaggcctcaggccctgcatggggggcctggggccatgggcctcaaatgggcactggctggcattgtgttcccagaacaggtcggaccaggcatttcagaacatgggagaagctgggtgatggccaggttgggcccgtgcctctgcgtcaccagagagtgggaggcgattgagaatcatctctccacccgcacctgggcatgggccgggacttgtgagtcgctgagagctgtgggcagaagagagtgaggcagcttcagggcttgagaactcaggtacccaccacaggaaagaccactgcagtgcctgtgagagcccagactgccctctgcggggctttgctgagggacactgcctgctgccaccatgacccttcttccccaaaggccagccaagcccttccgtttttccagtggctcccatctggggcaggctgagcagactcctggcatggggatagtcgcgctccttcctctcagaacacagactgcaggtcgggtaaagaagctaccagctctggctgaaacctggagtccccgaactcagagcctcagtagtgggaagggcctcccaacaacctctggcaggggccaccggcctcagccacgtgcccagcaagcctcacccacttctcccccagctggacagttcctgccattagaaccttctccctcatacactctagagacagacctgcttgtcacttagtcatcaccgttctgcacggggactcacataggtctctcttctttgggggagcctttaaatatttgaaaatagcactcctgccccttctctccttcccagctccatactcccattttcccttctccaggccaaataccccagttcctgaagccctaggccatttccatgtgacccagtagccagacctctggcttctggccttggagctgccatcgactaattctgtgattcagttttcctagcaataacatgaaagggctggacaagcagaccgccccccgccgccc

SEQ ID NO: 30875 - DNA, 1184 bp, Artificial sequence
  DNA replication origin
gaaggggaagccaggcaaaggccctgtgcagaactcgcttgggcagtttgaggaacagaaaacaggtcagggtggctgaacagtgagagtcaccgggaatctgggaggggcaaggtcaaagattcaggcaaaagtgaaaccttcgaggccacagtgggaagtcagggttttggattttgtcactggaggctcttatgcaagggagaggaggatgggacttacaatttttttttttttttttttttttgagatggagtctcgctctgttgcccaggctggagtgtagtggcgccatctcggctcactgcaacctccgcctcccgggtttaagtgattcttctgcctcagcctcctgagtagctgggattacaggcgcctgccaccatggccagctaatttttgtattcttagtagagacggggtttcaccatgttggccaagctggtctcgaactcctgacctcaggtgatccacctgcctcagcctccaaaagtgctgggattataggtgtgagccaccatgcccagccactaggagttacaagttttaaagaacactccggtgtcatatggaccacaaaaaacaagagagaatgcaggccatcggggcacaggtacagggtgcggctctgctgggactggggtgtaacctccaaggtggagggaagtggatggctcgggacatagtttggaggtaaaaccattaggctgtgatgatgggttggatgtggaaggaggaaagaaattaaggatgacttgatccttggtcagagtgaccaggtaggggaggtggtgccatttactgagatggggagcctggggaaacattcttggggctgaggggacggagctggatcagatcaaagggtgtagcctggaacatggtggaaatgcagagggtgcgccacaggtttgacagaagagactggagccgaaggcaatgtcggaggggaaaatactatcttgggagccctcagggtaatggtgcttttagagttctgggaccaaccagctcccctggggagtgggcaggcaggaagcataggggtgaggacgaggcctgagacccagcgccatttaaagggacccaggaggagggcgggcaaggctgaggtggacagatcacttgaggccaggagatcgagaccagcctgggcaacatggtgaaaccccatctctaccaaa

SEQ ID NO: 30876 - DNA, 1336 bp, Artificial sequence
  DNA replication origin
cgctggcttccgcgcctctgccggggagcggcccgcggatgcgcaccccgccagctctcgggagccaggtaagcggcggccccggggctggcgctcgcagggctccggcggcgcgcacctggctcggcccggcccgcggccccgggaagttggcggagagcggacttggcctgggaggtcgtgttacctgagccatctcgttcggccgcgagtagaagccgctgccaggtgcgcgggtggcggctccttccccagcgcagttccaggaagtgcttttagtggactaggaagggggctcgtctgctggggcgcctccctggggacccgacggcgggccccacctccggccgcagcgcccctgccctcctgcccttgcgggatcggcgtggtacccagcgccgtacccttgggccgggtccccgagggggctgagcgccgcgaagtttttctgtagctcttggcggctgcacagagcctgtttcctggcttcccccgtccctctgggatggtggaggtggggagtcctcggggccagcccaggtcgtggtgtggggccggggccctgcctctccccagccgagaagctgcagtggtgggaggtgtgttgtggcccttgaggcggccggtctggcccggtggtgggagctgttggcacagccgcttctctgtgcgggcgacaagtgtctccaaggtcctggcggcgcagtctctggagagcgtgtctgtgctgtggggaactgggttccgacacagccccgcaccctactcctcgcccatgcaaactctccagtgccttctctttcccttttccctcaccctgctctcccacagagggctggaaatgacacctcactcgccccgagggccatgccagttttccttgactgaccgattttctcaaagcaatgtgagaggtctgggtcctgtctctgcacttagcctccaccaggtcttggagtggcagcaccctgggctggttcctggtgatccaccaaacttctgccctgccctgccagagcaggaggcaggtggcattggcttgggcttctgggacgctgaaaagcaatggggcaggcacattccttagaacatccccaggtcctggcccagctgaaaggtggttacagtggttgctgggatgggaaaaaggagactcaaaggggtcggaggcagtactaattgtgtgccactagacctctgcaatgggagcgctctcactcccccccatatcctccccccaccaactagccttgcgttggtggagtgcctgagtcgctgcctttgactggggtctcccccaggtgctggcaccctggcactggcccaaaccttaccc

SEQ ID NO: 30877 - DNA, 1077 bp, Artificial sequence
  DNA replication origin
gtggtaccggctgggagctgcggcctcggccccgcccccggtcccgcccccgcaagccccacccgcaagcccgggcttgactctgcgagcaccgctcccgcccggtcaggggcaggtcccgcgcccgccgcctgcgggacccgaaccggcgtcttgagaagcccggccctcctccctcctctctcgccccgcgcccgccgcgagcgatgccccgagacccagcccacgcctagagcgggcagcggcctggcggtggggtcgaaagctacggcacagagccgtgcctgagtcggaaagaagcctcggcggaagcggaagcggaagcggagatggccgcagcggagcgggcaggggccgtgtgtgaccctggccgggtcatttccgtcgggccgggcagggtccgtgggggctcgggcggggttggtggggaccagggcgcaagccaagaagggcggcgcggccgggggcggggactgggacggggccagcgctccgaggaagacgcggggagcctggggcatggggccaggctcggggcgccgggaggtgaccttccctcgctggccctgcacgaagcacgaccttcctcgggttcagctcgctccccttgcagcccctggcaaggaggaccctgagcatctgtgtagcctggatgaccttgccccggaggagccgaggtgggcacgctaggagaggcccccagggatgacatggcgacccgaatggcagaatcatgtggtctctcataccgcggaacagtaggtcacgatgaaaaggaaccatgcggattcaaaggactgattgtcagcttaggcagagcccagaaacacacgtgaaaatttactggaaaaacagagagggagcctgggactggggatgggggacaaaggggactttaacttaattggcattgttttgtttctagtctatggaagaggcagaggtgggaacacgagtgcctattaggatactgtatacttttttggtaaatcttttattttctttaaattaaataaaggggggaattaggtccccctgttcttgtttggcctgtggccacagcatctgttccaggag

SEQ ID NO: 30878 - DNA, 951 bp, Artificial sequence
  DNA replication origin
ggaccgggggcggggccgaggccgcagctcccagccggtaccacctcccctccactgagagattccaccggtccctgggctgtcaggcgcggtggccaagtggtaaggcgtcggtctcgtaaaccgaagatcgcgggttcgaaccccgtccgtgcctgagacccgaggtagggctttggctgtggggaagtcgggttttctccacgtacgccgtcccttctacgtggcattttttccattttcggattctgctcagtcgccctccagttcgtctcctgccccgggctccgcggtcggcgggggccggtgcacctgggcttcgagactccagggtccaccttacaggtgagctcggcccccgccgcgccgcgtgcgccctcgccgccggtccccgcgtctcctttcccccagccgcatttcgcagagccggagtcgtcttcactgcttcgccaatggggacactaaggtccaggtggcccgcggggactcgggtcccgcccgatttgcgagtgttatggcggggcaactttccagagagggtgcctgagtttcccgaacggtggtttctggattgttctttggaaggtgaattatgcaggccatgcgcactgcctgtcttcctgtctacaaagcaaaccagattgttcaactggtgggtgcttcttttccagtcctggtgaactgatcctttgaatctgcccccagccagttatgacactccccacatcatctctaggataaacagtctgatttaacatattaataacatgacattgagcgcctcctcccattcctggaccctctttttgatacactgctctgtctgtcctcctcttcaattgtaacactccctaccgaacatactactccagacagagtcttatgaatggaacttcacctccctcattctataccccatacttctgttaatgtagccctgaaaaaccacat

SEQ ID NO: 30879 - DNA, 1113 bp, Artificial sequence
  DNA replication origin
cggcccgacctggctccacgtgctggtgacacatcaggaaggctgcgcgccccgcggctcccggcgggcggacgcggccagcgcccgcccgcaccgcctcccggagccgagcggacggcgccccgccccggcccgcccttcgcccgcccctaggcggcaccgcccccggccgcgacgcccgctccagcctgcggcaccggcgggagagaccctgacggcggtggggggtggcccgggttcccaggtcccgggtggcccgcactgccccggggatggggtcccgacgcgggcggccctactcgacagtctggagtgccttcctcccagtcacgcagtccttcccgccccggagcccagtaattttcccttttcctcctttgacccgtccgagcagctgccagcgcttcctcccgcggagaccggcgcggggagccccctgccggccgctccgctcccgggccgcgcccccgcccggtggagcgcgcctgccgccggcctcaacttccccatctagaacctggagccgccgggcacttctggcagggctttggtggcaaagattataaattaaagtgccaagcatagtaccgggcagcatactttcttgagatgttaaaatttcgtgctttcaactcccagttccagcggcctgcagacaacctctcttcctggctgtgctgtttgaaaagctgagttcctttagggagactgtggaaaaggagtgggacagaaaagctttgaggctgagtaagagctgtcccaagattagcgaggggtgggaggtcagtggaatccccttggtggagacctgctgccccactgtctctccggagacgccaggatgtgggagagtaactgcgtgtctcctctgggacctgaaccaggcctctaccaagatccccagcctcaagatggccaggattccaggcaccgtgggtgatggggaagcccaaataaccactgaggttgagtttcccaacctcttcaggtcgagatttggagccatttaaagaaaataacgtgacatatctgtttgtgtcccgacatagatattagctatgttcctgccttctctttcctggcctcaccaacccagatcatgcctttaaatct

SEQ ID NO: 30880 - DNA, 2181 bp, Artificial sequence
  DNA replication origin
caggtcccgggcaggtcgagcgaggccacggcccccggccaggagttcgaggggctcccggaacgtcggggcgcgggccccggctagcggctatggcccccgtgcccaggcagcggtgcgggctcggccttgcgggagggtgcggcctgctgcgagaggtcggccacggctcctgccccgcgccccgcgcccctcgcccgccgagctgagcgcaggtaaccgaggcagagcggagctgggcctcgcaggcgcggcgtgggagcgtggcgaagtttctcggcgcataactcttgcgccccactcgggagtggggctgcggtggggaggctttggtccccgcacctccccctcccccagcgctgtccctcggcctgagccgaggcggcccgggggtggcgtggaggccgccgagcgtcgtgtaacccttggagggctgggtttggagcccgcgacccgaggtcgggcggggcggtggactttcccggggaacgccgcctgagggacacccagagcttcggcggagcggagcgcggtgcacagagccggcgaccggacccagccccgggaagcccgtcggggacgcaccccgaactccgaggatgggagctgagggctgggtctttgcgggcgagatgagggtgtcggatcaactggcctacaaagtcccagttctcggcccccgggaccagcgtcttctccccggtcctcgccccaggccggcttcctcccgggctggcgtgcgctccggccaggctgcctctcaggtccacgctggagaaggagtggtgaggtgcgctcgccccggctgcgtgcggtgattcgggaaatccccgcacttcgctggagaaatagcgacgctctcggaagtgtgagtcggtcactgcttggggtccgtaccctttgggcagacgtggaccgcgccccggcgacctgggttgagtggacagacgggacccggcttacccatgggccaagccctgccacttaccgaggcctgccctgctgtgctttccagggcggcaaccttgagcttgggggtggggagaacggggcctgacttctagaattgcccctggggaggtgggaagcggaggtttggcccggtggcgcaggaagcccctgttcctctcccaaacaccatttcattaaagatggatctttgtggatgtgttcccaatggccggtcttttgttccctgaccgatgcaacataatgtggacccactctagtcctcttcaagttttttgctggaattccttaaactctcctttaaagtctcttatctattcctctagtgcgtttgcttctactccccgaaaacaaaaacccaccaacccctgaaacctcgggtttgcctggtgttggaactttggttatttgtcctttgtttgtgttgtgtttttggctcttggccgtggaaaaacatctggggacatgcagtgaggtgacttgaactgtgtgaagaactggttgacaaaatagggaacgtctggtccctgtcttacttggctttggaaaacaggagaggtttttaggagctgggaggagggagggtgagagggaggaaccatcacggccaggttggcccaccccttgccaggtcgtgtaaaaacccattcaagaggcattttcccacaggctccctgcctctgcaggccacgtgtagagtagtcctttgcaggcgtcctgcccatactgttgtccctgttttgggggcatgtgggagccaacacaggggagtcaggtgtgtggtaggcagtcaggtgtgttttggggtcagggaggcaggtttgggcctgggaggccaggaagggacataccccgtcctgcagttggcctgacttttgtccatgttagctttgtcctggaggcttacccagtggaacatgcagatgtcagaattatgggagaaaagagtttggccatggggtagatttctgaacatcttgacaaattcttagtttggagacaaaattgtctaggagtggaactgatgggagcttcaactggagacctcgcccctaattaagaaaaatgctctttggagcgctgaatcagcttgggaaaacaaagttctccctttgaaccaatgcctctcccagccctggggatcagtgtctaaaagtaaatgaagtggaaatctccagaatattgcgtggtcataaaacatcccagaagtgg

SEQ ID NO: 30881 - DNA, 1577 bp, Artificial sequence
  DNA replication origin
ctggacaaggtgtccctggaggtcaggaagggagtcttgctcctcctgtgaccctagaccccagcttggatggagcttggcaccaagcaagtgctcagtagactacctaccgcatgggcccgcagagtctccccatcctcagacgtggcctcttgcaggcagcagccctactggatgctctgctgcattgggtctgcacaaggggcaggtactcaaagaatgaggatggggggacacttcttcccgagaggctgcctgacggggaaccccaggccttcagtcctcatgtcaggtgagaaccaatttcttgaacaggaggcctttccgactgagtccgctggggccagttcagaggagaccagcctggggccacagtggatattgcagatctgccctcctgtgactgccggctggtctaccatgtgtgctgctaccaaggggcaggttacccctctcaccccacctggccgtgttcgcccatcctcactgaccctgaggaagctgggagcacctggtgagcctttactgaaaggcccaggccattgttccaaagccaggcagaatgggagggaagaaggaggtgggggaggcaattggggttgatacaagatgaggtctccctgcctggagctccagagggccccttctggcctcttctgcagtccttggctcatccccttcacctcctcctacaggaagccttccctacctccccaaccaaagttctcacccttccttcctaccccaccacatctcttcctaaggtaattggcaaaccccagggcccttcctgagtcttgcaaagtttgcaggtctggcagtctctacatgtcagtggctttccttttgtgggcaggaccccctgagggggagcacaggagggaacgtggtaggggaggggttggctctgaagggctcccctgaggaagggaggatgagtaggagtacagtcagtgtgagcagaaaaggggtcccaagggatgaagatctcaaggaggggaggtaaagcttcgagaatgtgcaaggagctccagagggtggaggggggtaaagcgtggagtcgcagggtgtggggggaagtattccaaggcaggagatcgggggcagatctcgagggcctcagggcaggccaagctttcttctgagcgcaaaattagagtcagtcaagggtctcaggcagggtgctgctttgcagggtgctgctttgcaggctggggtaaaggtggaggagatagggtggcagcaggagggccagctgaggatggggcggtcttcctgctgagagatgacagcagctgaacttggggaggtgggggcagtggagtaaatgggaggctgggagagaactgagaactctgatgtggccttgatgccccctccccaaggcccacccatactggtgaggattggggtgaccggtgtgaggagagggagagcccctgatgaggccagagtccaggcccagagagaccccgtccgctgtgccacacatgacatcatttttgtgtacttaacacaaggtaaacagggctggaaaaacccaagtactcattatctgacttagtggctgctgctgg

SEQ ID NO: 30882 - DNA, 1056 bp, Artificial sequence
  DNA replication origin
agggagaaatggggagggaagaggagagggagaaagggggagggagagggagagggagaaagggagagggagagaaagagagggagaaagggagaaagaaagagatccagcaagagatctttccctgttcttataaggctacagtcctaatggattagggccccacccttgcaagtttgtttaaccttaattccctcctaaagaccgtatttccaaatacagtcacattaagggttaggacttcaacacataatttcaggggacacaattcagtccatagcactgaccttcaaggagcttccttgagtgggatggagcatgagctggaaaccacagaccagagttctcacccagaccggcagcgtggcttggggcaagtcactggcattacctggaaaatgagaagcttcagtgaaacctcaaaattccttctgtcactaagattctttgaaagtcccagggctttttgcttgagctagggtagggagactcttcctcagtccacagcatccctgcaggaaaagtcgggtcaggaagagcttggctgttttcttttcagctcttgcatgaatatgcttggcacagggactgtgtgttcccgtggtaagagcttcttgtgatgctgggcccaggagatccacagcagggattccagtgtcctgtggggaggaggttgctgtcagaacagagggtaggaaagccaggtgatggggagtcagtggattctaactcagggagaggcccagaatgaacagattttctagcagcattggctgaaggtggaatctggggaaacaggcagggattttgcagttcgccaagccccaccgacttcactgctttctatttatgacttctgttctttgttacttgaccacaataagggatctttcctttcctgcaagagttggctctcataggctggaagtttatggaaactcatgctgggaggagggatgtgtggagaacagcatggtgtagaacctcacttctcagtgttgtcctgggccagtagcatcgcatcacctgggagcatgttagaaatgcagagtccca

SEQ ID NO: 30883 - DNA, 1421 bp, Artificial sequence
  DNA replication origin
cgcgccccgccctcttggccggtacccaccccctccccaggctgattggcgcttctgcggcggatcctcgggcgggcagccgggccggcgcgtcacgtggcccacggcgtccagggcgaccagccgcgggccgcagggcatggaccttcaggccgccggggcccaggcgcagggggccgcggagccgtctcggggcccgccgctgcctagcgcgcggggggcgccccccagcccggaggtgagcgccgcgtgggggccaggagcaacagccagccgcagcctggggcgggaagtcgcggggccgggctgggcgggggccgcggggccggggaagcgcctctggccggcctcgggccgccccgcgacacggagcgctgtttgggctcgcgctcgagctgaaaacggccaggccgcggggccgcggggctgcggggcggggaaagccgagggcgtgggtgggcgctctgggtcagcagagacggctgtccgcccgctgggcgccgctgcggatttggtaaatgggaggtgacgctggtgaccgagagccggggcccgctgccaggagcctgggcgagggccaggtgagggcggcgaggagagggacttgactttacagacctgtggacctctgtccgttggtggggatgccagctaaccctgagccccagatgtcacatgcgcgctcccccttctccttactgaaaccagaaaggccctgtttgacgcagggtttccagaaacttgttttcatgtaagctagacagctcctggttttcccgagaacgttacagaccgttattacagttcttacctgtccttgtttacagtctgtaccggctaggtgctgagcggcttgaaggtaggaaccctctgttagggctgtttgcacagcctagcatagtgcctggcacaggagatagacataccgactggatgaatgatgcctcaaagatggtacttagccaaagtaagatatgaaaaatgcagcgacacttacaaagaaaattactttggagtgcagaatagaatgggactaattttgtcagggcatagcaggaaaggatcaaggtgagaggctggtggtgtctgcagaggcgtggagatgagaaagtgcagggcacatggcctggagttgggtctcagagcatgcagagaactatgctcaacaggttgatgggagtgggagaagaggggacgtgcgaatgccatggctaattttgtgctctctcagtggagggctgttgaaggttttgagcagagtagtgattaattctgtaaggctgggccagatggctggatgggaaggtggttaggaggccgtggcagtggtttaggtgagaggtctgacttctccttgggcggcagtgaccagaggttgtcactaactacagggagtggaactgaattattaaacccagaca

SEQ ID NO: 30884 - DNA, 1691 bp, Artificial sequence
  DNA replication origin
gccgcggtgaggacggcccgcttgggcgccccagaggccgggcaggggcgcggggacctggttgcaccggtggcggtcgtcctctccgcggcagctgctgccgccctgccgagccgcccgcgggaaaaccccagaaggccccggccgccgccgggcagggcagcgcccgcttccatccgctgcgggcccggagtcccggccgctcggccaagcgaggtgagaggcctgtggcttccagccccgatctgggccctcgccctgcgactccgactcctgtcccagtcccctaccacacggacctcggccccaactacgacggtcacctcggaccctggctctcgctccccgaccctcgctctctgacaaagggtctggggcgagggcgtggagccgcggccggcaggaggcgagcgctcagccccggtgcggggtcccgggggcaggggtcgctgagcccgggtcgggctggctggggctgcgcagcccagggtgcatgcggcgggcgaaggcctgtgccccacctagagcggagcccgcggtgtgtgcacctaggccaaagaggtgaccccgggaatgaaatctaaggaatagagggagttaactgtagagtggcgttttagttacatcgtagttaagtctgtgccacacaccagttaaaccggttatttagaaagacggcgggaaaccagcagaaatacctgaaaaaaataccacatgattgcacaggaaagttaaaattccagagaggggatgcatgggggaggggaatgctgtttttctttactgtttggcttttaaaactagttaattaaaagtttcctggtggggcgcggtggctcacgcctgtaatcccagcatttgggaggccgaagtgggcggatcacctgagatcaggagttcgagaccagcctggccaacatggtgcattttgtaaaaatgcaaaaattagctgggcgtggtaacgggcacctgtaagcccagctactccggaggctgtggagggagaatggcttgaaccagggaggcggaggttgcagcgagccgagatcccgccactgtactcccacctggatgacacagtgagaccgtgtctctaaatagataataaaataaaaataaaattttctttaaaaaagaaccgtagtgacctttagttaccccgaatcctagatttcccagcaggctccccaactcattggctgtgagatcttggtcaagccattttatcctttggagccttggtttgcttatctgttaaatgatactagtaacactcaaccagagttgctgtaaggattagtgacaagttaggcgaagtgttttgtcagggcctgtgatgggcacaaaccagctgttcaatgaaccttgtgaatgaagttattttaaatgaataagggggtttgtagccaaaagcggcctctagcctacaatacctgtgtgcttaagggctggagtttatgtgatccaatttgaatgtgggtttttgagcagaccaaggctgtaaaggaaagcaataatagaactatttgtgtgaacaacttgagggctttttaaatgttaattggtacctggacagctcccaggttgtggactcttgaagtcagatacggagaaaagggggtggaatttgtgaaagagacagaatatgctatatttattatcttattagcaagtagaaaaattagggaaat

SEQ ID NO: 30885 - DNA, 1586 bp, Artificial sequence
  DNA replication origin
gcacaggccttcgcccgccgcatgcaccctgggctgcgcagccccagccagcccgacccgggctcagcgacccctgcccccgggaccccgcaccggggctgagcgctcgcctcctgccggccgcggctccacgccctcgccccagaccctttgtcagagagcgagggtcggggagcgagagccagggtccgaggtgaccgtcgtagttggggccgaggtccgtgtggtaggggactgggacaggagtcggagtcgcagggcgagggcccagatcggggctggaagccacaggcctctcacctcgcttggccgagcggccgggactccgggcccgcagcggatggaagcgggcgctgccctgcccggcggcggccggggccttctggggttttcccgcgggcggctcggcagggcggcagcagctgccgcggagaggacgaccgccaccggtgcaaccaggtccccgcgcccctgcccggcctctggggcgcccaagcgggccgtcctcaccgcggcaactccacgcccgcccctccagcccaacctcacagccttgtcctgtccccaagcaaggagtcggcctccctgtccacagggagggaatccggcgcaggtcgcagccggcctctggctttcgtggggagggcaccaaggcttcaggtttcccagctcgcgcgttaccgttcaaaagcccctcctggagctctgaattgaggggagcactccatgccccttcctccaaagagggcgggagtcgcaacactgaagccttgctccaaacaaacccccctaccaaccctctctactcctccctcctgaccccctttctctgtccattatccgtctgagggggtccaggacttgagcagtttctgatttcctttatctttatggtgggggatctgtttcccactaagtatggtatcatcctctttttggcctctcaccaactcttcctgccccctccctacacacattcatcccccaacctccccaaattgcgggttaaaccgattttgaacttacgttattatgagtttgaaaatacttttccccgccgggcgctgtggctcatgccggtaattccaacactttgggaggctgaggcgggcgtatcacctgaggtcgggagtttgagaccagccagaccaacatggagaaatcccatctctactaaaaatacaaaattagctggacgtggtggcgcatgcctgtaatcccagctactcaggaaggctgaggcaggagaatcgcttgaacccgggagacagaggttgtggtgagtcgagatcgcgccagtgcactccagtctgggcaacaagagcgaaactcggtctcaaaaaataataaaaataaagaaaatacttttcccagttggtttgtgtaatatactatgattacatttccttttttgttgttgtggagacggagactcgctttgttccccaggctggagtgcagtggctggatctcggctcaccacctcccggattcaaacgattctcctgcctcagcctcccaagtagctgggattacaggggcccagcagcatactcggctaatttttgtatttttagtagagatgg

SEQ ID NO: 30886 - DNA, 1253 bp, Artificial sequence
  DNA replication origin
ccgcgcctccgcgagaagcgcctccgcgtgactgacgggggaatccgcgggccaacgggctgggcggcccggcggtgcgcgctcccgccggccaatcagagcgccgggcgggggaagtgggcggagcgaggccagggtagggtgagcggcctccgaagcggagcggggctctgaggagacactttttttttcctccctccttccctcctctcctcctcccttcccttcccctctcctcccctctctcctccttcccccctcggtccgccggagcctgctggggcgagcggttggtattgcaggcgcttgctctccggggccgcccggcgggtagctggcggggggaggaggcaggaaccgcgatggcgcctcagaagcacggcggtgggggagggggcggctcggggcccagcgcggggtccgggggaggcggcttcgggggttcggcggcggtggcggcggcgacggcttcgggcggcaaatccggcggcgggagctgtggagggggtggcagttactcggcctcctcctcctcctccgcggcggcagcggcgggggctgcggtgttaccggtgaagaagccgaaaatggagcacgtccaggctgaccacgagcttttcctccaggcctttgagagtgagtgtgtgcgaggctttgagggcaggaagacccactctgccaacaccggggatgggacactctgctgggcccccttcctcctcgggagtccacttgtgtggtagtggagggaggaattgaggggatgtccccctttcggagattacgtctccaggggatccggagtccagggccttgggagagctggaaaagagggtccgggcgggttcttgactcccccaagattgacgcaagaggctcgggactggggccccacgttcagagcaggcggcttttagatgaggaggtagcagttgaactgagccgcagtcacatcccgagactggttcttgttttctttcatgcctttcggactctagaaatacaggggtttcggttgtagcttttgaggggcaaaatgaagcctgtgaagggatgagtgcagtggaaccgaagaaagtgtccttagtctgaaatgccttcgcgctaacttggtgctgcaggttcctatggcacctttggatgcttaaaacccttcaaatctatccacccattttgtggatatgtaaactgagccagagagtggtcaagcatcttctctggagacgaccccggaattctgctttttctacctg

SEQ ID NO: 30887 - DNA, 1401 bp, Artificial sequence
  DNA replication origin
tactgctgcccaccctgggcgagctcagccgcgtcttgggcgccacctcagcctggcggctgcccacctgccccggctactaccgcgtatcggcgaggggagcccccgatgggtccggacgtgggcggcggcggcggcggggccggggcgcagcgctccgcagcgggagccgcgggctgcttggtcggcctgccccgccggcccctcttgttggagcccaggcggcgggagaagggaaagctgacggggagggccgggcgcagtggcggcggtggggagcgccggggccgggttgggaggcccgaggggctgggcgggaggggcccggccggcggaagcgagtggagggagaaggctcaaccgaattgctggggccccactcaagatcgccttcaaccgccaccttgtttcttccctctacaggagcgcggtcacgtgaggtgcgccgccgcccagcctgggaagggggcgaggtggcgcggcggccgctagggggagcgcgggagcattgagtcgggggcggagagctcggggcgcctggacttggcgcagcacggcgctccgggtgcgggtggcgcggctgaaagaggcccgcagctcctgacaagccccgcgtctaaggccttcggagaccacagtctccgcggacccctggctggagcccaaagcctgccgggtctccttcccgcgactccccttccgcggctcggagaggaaggcaggagagcccccaaatatcgttcccctcccgccctctagggaaactgaggctgaaagaggcagcgagagaaagaaaaaaaaagtcgcggaggggggcggcccgagcgacctaagggacggggcagcgccagcgaccgaggaaaattagtcggggtggggtacagggagacaagcccccagaatttaggaaactccgaagcttggaagtggagtcctgaattgactccgatgacaactgctccggatctgtgccaggagccacaccccgggctgccacgcctggagggaggggggtccctaagacctgttgcatgggatccccactcggaaagcctcagtaaactccagaatgcaactactgcatgttccaatctcccgccaccttcccagtgtcccagctaggagcctgaccaccttagcaagaacttacctctcctttgcagtggaaaagagggaatcctgcctaaaacctacttcacggtgttacaggtctgtattatcgggaaataaccttaatttatttacctgacaaatcactaggtttgagctcagcccaggggacgaatcatggtgacagttcaggcaccctcaaaccttatcacagggactcaaccctgagtggttgaggtcagttcttcagataagagaaaggtttgccgggcacagtggctgacgcctgta

SEQ ID NO: 30888 - DNA, 968 bp, Artificial sequence
  DNA replication origin
caattcggttgagccttctccctccactcgcttccgccggccgggcccctcccgcccagcccctcgggcctcccaacccggccccggcgctccccaccgccgccactgcgcccggccctccccgtcagctttcccttctcccgccgcctgggctccaacaagaggggccggcggggcaggccgaccaagcagcccgcggctcccgctgcggagcgctgcgccccggccccgccgccgccgccgcccacgtccggacccatcgggggctcccctcgccgatacgcggtagtagccggggcaggtgggcagccgccaggctgaggtggcgcccaagacgcggctgagctcgcccagggtgggcagcagtagccggaggaagccaccgccgccggcccgccccgcgccggcaccagcgcacgggcccggcgggggcgcgggggcagccacctagcccggaccaccgcagcccggagggctgtcaacagagtggtgtatgatgactacgagagcgaggaggaggagtaagaggaggggggcggcgatgccgaggagacccaggagtctgaggacaactaggaggatgacatggaggaggacgacgatgactccgattatccggaggagctggaagatgacgacgaggacgccagttactccacggaaagcagcttcagcagcactccaggtacccacccagcgcagttgctgcagactcattccccacctcctctcccctccccccttgctcacttatgtgctgtgcatcccgctccgatctcccgccaaccccgccgacccctaaactttagaggggaaatgggagggcacatcaagtggcaaaaaactagatttataagaggaaagaagcacattgttcaaaatggagattgcattgttgcaggccgcactcgcttgctccccgtccccccaactccctttttttctcctcaaaatttgtgccagtgcag

SEQ ID NO: 30889 - DNA, 1093 bp, Artificial sequence
  DNA replication origin
cattttgtgttcatgattttttttttttttgtagaaagacctttaatacttctgtttacaaaattcgggcatacatttcagtttgccctgaaccgtgcccaaggctgtgtgctcatctctgccagggtgtctgtgcccttcatgtactgccgaccacgagggtgcagagcagagcctggggtccggaggctttgctgggcctcagggggaagggaatgtgaatgtggcccagcccagaggaccctccatttcgtcgattttggattgggcgacagaggaagcagatgtcggggctgcagacatgctggcctggacaggggtctggggaccccggggctgcctgccgtggtctagaggagatggctgggggccacttcccacagggtggggtggcagcggcttggcaaggggaggcctggctaccaggggcttgaacatttgctcactggagcctttgtgcttggcccttagcagcacggctggggctgtggtcccgtgcgaggtgtgctgggggggtgtgtaggtggctggtggtggcagcttgtgccagagtgacacaggcttccgtgggcctggctgggggcagttaaaaagctgaaaaggtacttggtgtgtgagggtaaggcttgggaggcagggccctagaggaggccatgttctctgtcctggttgaggggagcagtatgggggggaaggtggggcagatcccagctggcctctgtctcctggttgcaagctgacagcaggccagggaaacagtgaggccctctgccctggccttggggagaaggagtgcatgtgtgaggctggggtactgtggccctggagtggggctagggttcatcgccaggagcaggcttgtggagggatttaaaaccagggtcctgtctctgagccaccccacagggacactcgatccaagcctgttaaggccgtggaactcgagggtaggctgtgggctgggcccccatggggtcaggacggaggtgggggctgccctggaggaacattagtgtttctgagagcaccttagtgttgccccgtctgggccagctgggtgaggagttggggagcagggaggaggccggcgcca

SEQ ID NO: 30890 - DNA, 1089 bp, Artificial sequence
  DNA replication origin
agggctgcctggaggaggtggatgtcaccagaacctgtgggaggaccctgaggagcagggagggagggagctgccgctgaccaaggcacaaaaacatgttcctggggcagttcttggaaggcagatttccaggcgcctgcccccaatgtggccctgcctcccgctcccccaggccccctcttcctagagggagggcggcaagaggcgcttcattagcgcctctgaggccccagcagccccgaggggatgaaaagcgcctaggaggggagccgtcctcattttggcacacctggcagggggcccaggaccactgaaagggattcagctggggccggctgggcaggcccggtcattgttccggctagatccgcggtcagggcttcaaatgcaaaaccgggctggggatggggtgggggcgccggtggcctctgctcttcctttaatagaccaaaggactctggcggcttagctctttttcctaatttaaagatattttcaggcgtttgggagctcccctaggcgaagcaggaaggctgggaagtggggggccttgaaattctcttcgtggttgcccgcggaggatggaggaaaaggcggggaggaggggggctgaggttggtctggggtcacgggtggggcgctgcccccccgtgttgagttctcggctgtcctctgccccagtttccctctctggaaactctgtctggtttctggaaccgtccccagcaggtaggacggatgcaggtgtgcccaaacggcagtttcttcctaaggagctctttcgggtcaactctggaggccttgacttgggaggcagatggaggaggcttgatccctctcagcatggcagccgtggtgccaaggcaggaaggagggtagggaggcaagccaatggggtgcagcggcctccatgccagaaaatgggggctccctggatcatctcctcggcgggagggtgtacggggaccaagagagagaaccaaggggccccgctggaggggggcttggagcctagggacagttgagggggtactgtcttcccctctctcctggtcacgctgcccagtcggcctttttctcccctttccc

SEQ ID NO: 30891 - DNA, 1017 bp, Artificial sequence
  DNA replication origin
tgaaaaccatgcaagctgatcgctgccctcccggagtttatggtctggtgagaagatccctgctctgagtcactgccaagctctagctatgtgactttgaacagggaatttctgtccctatctataaaataaacggggttaaaccagggaatccgccattcaaattcctggcccaagtgtctccggggtcgcggtgcccaaaggagggtgggcgaggctccctgggcctgcgctgcggcggcctgacagcgggagcgctgttccggcgcagagcgcgttcgcgttccgaaagcgcgtgtccctcgccgcgtgccgtcgtccccgccgccgccgccgccgccgccgccgccgccgccgccgccgccgccgccacagcccgctgggccggaggaggcggagctggcgctgtcccggctctcttgcggggaagcaactgagggggcggcgcggcgggccccggcggccgaagaggctggcaggtggcgccgtggggtgggtgctcctggtgagaggagtccactccgtgcgtgcgggcggaggccggcccccgagagccgccgacatgaagaaagacgtgcggatcctgctggtgggagaacgtgagtccgcaccctctggccggcccctgagtccctgccctccctgcccctgcagcccctgtcgcccctgtcgcccctgcagccccaacctttgcagccccggcccttctcgcgcctcacagctccgctcgcctttctccgcgttcctaggccttccagccccttcactcttctcttttggctggccgccggcggccctcaccctgtcacctcacctgggccctccagagatctcctttccctgttccccagccgtcctcccaagccatgtccctattagccctaaccgcccgacctcatccctccgaagcttctctcctccttttcctcttcgaaccctgtccttctgggcctcacagtttcccaggccgcctcctttcagaccttcttgtcttctggagattcccttatcactgcc

SEQ ID NO: 30892 - DNA, 1108 bp, Artificial sequence
  DNA replication origin
gcggccgggcagaggcgcttcccatttcccagacggggcagccaagtagaggcgctccccacttcccagatggggcggccaggcagaggcgcttcccatttcccagacggggcggccaggcagaggcgctcctcacttcccagacagggctgccaggcagaggcgctcctcacttcccagacggggtggcggccgggcagaggcgctcctcacatcccagacagggtggcggccgggcagaggcactcctcacttcccagatggggtggcggccgggcagaggcgctcctcacatcccagacggggtggccaggcagagatgctcctcacttcctagacggggtggcagccgggcagaggctctcctcacttcccagacggggcagccaggcagaggcgctcctcacctcccagacagggcggctgggcagaggcgctcctcacatcccattcggggcagccgggcagaggcgctcctcacatcccagacgatgggcagccgggcagagatgctcctcacttcctagacggggtggcgggcgggcagaggctgtaatcttagcactttgggaggccaaggcaggcggctgggaggtgaaggttgtagcgagccgagatcccaccactgcactccggcctgggcaacactgagcattgagtgagcgagactccgtctgcaatcccagcacctcgggaggccacggcaggcagatcacccgaggccaggagctggagaccagcccggtcaacacggcgaaagtccgtctccaccaaaaatacaaaaaccagtcaggagtggtggcacgtgcctggaatcccaggcactcggtaggccgaggcaggagaatcatgggagcccgaggcaggcaggttgcagtgagccgagatcacggcagtacagtccagactcggcaagagagggagatcactggggggggggagggcatttattatttcatgtagtttcttccggccaggaatttgggagtggcctagctgggtggtcgatcgactcagcatctctcatgcggtggctcatgcctgtaattccagcactttgagaagccaaggcaggtggatcacttgaggtcaggagtttaagaccagc

SEQ ID NO: 30893 - DNA, 1243 bp, Artificial sequence
  DNA replication origin
tcccgagtagctgggattacaggcatgcaccaccatgcctggctaattttgtatttttattagagacggggtttctccatgttggtcaggcttgtctcgaactcctgaccttaggtgatccacccacctcagcctcccaaagtgctgggattacaggcgtgagccaccacgcccggcccaaagccctactcttataaagcctacattgaagcaggagggagaccctcaacaaatgaaggagcacacatggaaaaggaaggaagggagggagagagggaacgagagaaggagggagggaggatggaagggagggagggaggaaggaagggagtaagggagggagagaggatgggagggagggagggagagggaaagagagagggagggagggagagagggaacgagagagggagggaggatggaagggagggagggagggaatgagagagggagggagggaggatggaagggaggtaacgagataggatgaaagggagggagggagggaggatggctggtggtgagatgctgacaatcaaggtgatgtcagatagagtttttgtttgtttgttttgagacagagtctcgctttgtcgcccaggctggagtaggtggtgtgatctcagctcactgcaacctctgccgcctgggttcaagtgattctcctgcttcagcctcccgagtggctgggattacaggcacccgccaccatgcccagctaatttttgtatttttagtagagacagggtttcaccatgttggtcaggctggtctcgaactcctggcctcaagtgatccacctacctcagcctcccaaagtgctgggattacaggtgtgaaccaccacactcgactgtcacattgagtttccagatggtttctttacacaatctggaaaggctccactttgaggaggtaacatttaaactgagattaagtgacaagcatgaggcagctttttaaaaaaagagggaagagtgtttcaagcagagaatagccagtgcaaaggctctgaaggaagcaggcaataggtctggaaacagtgagttcagagaagcaggcaaggaacagcgcagtccggttttaaaaagcaggacaagggcaaggcgtggtggctcacacctgcaatcccagcactttgggaggccgaggcgggcagatcacaaggtcaggagatcgagaccattctggctaatgtggtgaaaccccgtctctactaaaaatacaaaaaattagccgggca

SEQ ID NO: 30894 - DNA, 1452 bp, Artificial sequence
  DNA replication origin
cgcctccgcgcccgctccgcagcccgcgcccgcccccatggccccggtccccgcgccgccgccgcctcctcgcgaccccgggacgcccggcccctccgccgccaaacttcactgcgctagctgccccgccggcctccgcctccgccccggccctcgcgcccggctccgaggcgagggcgcccttgggccggccccggccccgccgctccccgcgctcccttcccgcttctcgcggcccccgctctgcgcccgagtctcctcctccccgcggagtcctcgggggcggcgcgcgggcgggggcggggctgctcgcggggaacgccggcccccgccccgcaccccaccccgggcgccgccacccgggcccagtcggtcagagcggcgcggcccgggagcgggagggctgcggcggggctggcgaggaagtggtggcgctgcccggggcggggatggggactgcgccgtccccggcccggtcaccaccggcctgcactccgggcccgggcttggctcttccatcggcttaaccatcacttggaggtggcagatatgtgatggagacactatgttggcgacgtcagggttaactaggagtgaattgggggcgcgatgttgtaaggacgggattcctgcctcccgccccattatccttacgccctattcactgcggtctcagattctgggaggtctcgggaggcccagaaatgggagaagtcagattgcggggtcgtgggccccaaagcctaaatcttgcccttcctacacccagagctaagtgaccatgcccaggcttcatttgaccacatggacaaaggtaagcccagggaaatgccccatctggggagagggacggtaaagaaactaaagcaatcagaaaggaagttagccaaaacggagtaggggatcttttaaagaaaacaatcgatgctgtttccctgcaggaaagcgcccccaagagagaccatctcccgaagcagaggctctggctgtaaatggtgctagtggccggcctggcaggggccagctctccccagaggctcaggagcttctccaggaggcatctcgcagtcagtccccagcccacaccaaggctgtgcccttccactcctcttgctttcctcttcccaccacccactcactcactagtctttgccctcttccttcctctgggaaacggaacaggctcctttccattagtgagagctgcaactaatgcagtcatcttcagaaagcaaagacataaccccgtgcccaggatccgaactgcgaccatcacccagcaatgactgctccccttaaacaccgagaagggaattcacttgattctaattaggtgagtttgctacagacaccaattttcatctctgtttcagaaagtgtgatcatttcaactatttttgtttctcaccaccctcctccccatccctactctactaacaagtcaagatcctg

SEQ ID NO: 30895 - DNA, 815 bp, Artificial sequence
  DNA replication origin
cgcggacctgtcaccgccggagccccctccccgccgctggtgcagtgcccgggacacggcgttttcccgcagaggcggccgcgtcacggcggtgactccccctcccctcacgcccgcgacctgcgagctcccggagctggggaaggagcggacgccgcagagtccccgtccctggccatgcaagccggcctggcgaccccttcctccgctcccggattagctcccgcccggcacctgccttgccgcgacactgattgaaattcaagccggcccccgcctctgaccccggccggagcagggaggcaaagagtgctgggagcggctttgctcctagaaggaggcccgggagtccaagaccgtggcggtgccaggggacggtcccctgggcgaggagagggaggggctgccccgagggcttccccgccgtctgctgctcgggtctccatccctccggtcctgcgggccggccctgcgaagccctgggaactggagtttcttgggttaacctcccggggctaacctacacataggggtgaaaaaccgggcagacaccctgccctgcccactcctccctcagggtggggagatggaagtgaaaccaggcccccaacccacacaacgaaagcgggaaagtctgaatggggttggggggtagtttacgatcttctctctttggcgtctgcggttaaatctatcacttccttctggccctaaacccctggcagaatctgatgtagtcaccacttagactcagccttggaagagaatgggtgggcttcaccgcattcggcattcaccacccccccttccccgca

SEQ ID NO: 30896 - DNA, 1134 bp, Artificial sequence
  DNA replication origin
cctgggaacacaggctacattagcacaggcaagttccggagtcttctggagagccacagctccaagctggacccgcacaaaagggaggtcctcctggctcttgccgacagccacgcggatgggcagatcggctaccaggattttgtcagcctagtgagtgctctggggcccttggtactcggggggacctgtttgagggttatggcttccacacatttaaaggatttaggcaattcaaaggatctgttggcctgcagcattgaaaaagtccaggcttctgaggtgaaagggtgccaccaaggactcatcttctctttgtctctaggctctgccctccgcagtgtcagcccatcctcaaggcagcacctggcaatttcagaccctcctgttgtggcagcaaagtggctgcagctgttccagccctcataccctcaggctgcaccttgcagaagggagggagggagggagagagagagggagggagggatggagggaaggggagagagaagaggaggggaggggagagagaggagagagaaacccttcttggtgtagctcttgcacaaggcctggtattttctccctcccattggcctagattgggtcagtaggatgggtagattgcgttaaatcaatcattgccccactcctgtagctgagagtggggtcagttacgccaaaatgaagggctgcgagtaggtagggtattggtggtaggagaaggggctggggagtgggggccgggagggtcagtgcagcatgtggtagagccagagctcagcatatctgctcagccgatgccctgggctgccaaagaggctggagaagataggcccatggatcctgcccagcggtctgttatctcggagcagagacttcccctcactgagggttagtgctgcgctatttcaggggctgctgtggactggggttcagtggggttaagcaggcagtatttcacccaccatgggatgcaggtgacatcagtagaaaagcggggtgaacaagcaggttgaaaataagacccaaagtttttgctgggttttcctattggtgagatggagctggtcacctctcttcatgtcacccatggagggagcgagagtgaaatgacttgtgtgaagcgccccagac

SEQ ID NO: 30897 - DNA, 941 bp, Artificial sequence
  DNA replication origin
gaacccgggaggcagagcttgcagtgagctgagatcgcaccactgcactccagactgggcaacagagggagactctgtctcaaaaaaaaaaaaaaatttttcagggctgggcaaggtggctcatgcctgtaatcccaacactttgcgaggcagaagtgggcggatcacttgagtccaggagttcaagaccagcctgggcaacatggtgaaaccccatctctaccagaaatacaaaaattagccaggcgtggtggtcagtagtcccagctactggggaggctgaggtgagaggatcacctgaggccggggaggttgacgctgcagcgagccaaagtcatgccactgcactccagcctgggcagcagagcaagaccctgtctcaatttaaaaggaaaaagaaaaaaaaaggatttctttttggctaatcaccaagcacactatcagtatgtggatttgtttgccccagccttgaatgaaccagccaatgaggaaatcaggatgaggttcctaggggataggaggaattgacggtttgactcagggaaagctcagtggaaatagagtatccactgacatgtacaggccagagatgcagggaagatgaaagcacatgcatgaattatgctgaagctctttttacctgaaatcatcaccagagggagtttctgcatttgtgccacttgggcttccgtcctcactgtcccctcgttgctgtgccaatctacaagccacaaaaccaatagtgctatcaattatgggctctaaaccaagaggagtatgggggcctggcaagcagggtaaggcaaggagtcaactaaaaatgctgcaaggtggaagtgcactgcctatcctcatgacaaggaaaacccatacagcagtgctgacaagagccccttctctctccaggccacttaacgggtggaggaaaggctaaataccca

SEQ ID NO: 30898 - DNA, 1575 bp, Artificial sequence
  DNA replication origin
tttccggcgtcggcggccgcggccggggacggtgtgagagcggtaagatggcggcggcggcggtggtggagttccagagagcccagtctctactcagcaccgaccgggaggcctccatcgacatcctccactccatcggtaaaggtcgccgcgccgcctccccggccccgccggcccagctcggcttatgtcggtcggcggcagcggagaggggcccggctagccggctctgatgctgctgactcactgtgtgaggggggccgggccgggggcgcaggccgctcggagctccccagagcctcccaggtctcactcttgtgggagggcttgaggcaatccccgggtcccctcgccggctgctgactcacggggggctcagcgtagggtgggagagtgggccgagccgggcccccggggatccctccctagccatgtccccggctctggcccgcacgagctggtctgggacccggagcagtgccggccggcgtgcttgtcacggactggtcctagagtctctacttgaaaggccttggcgaaaccagctctggacaggcatttcccgccgttgtaatcagcacagcctgctccgggtgggagcgcgagcgcttgctcttctctgggagtttccttccacgggacgctgggagctgctactcctcagccccacggcagaaagctccactaagaggagggtctctttcagaatgtgggaaattcaggggtgacacacacctcagattggcatttggtttgtggaggtggccgagacgctcatctgctctgtgtagggtgtaagagtgaggtgttggagcgggaccgcctggctagaggaggtgactaatctttccagactgcctgtaggggttggaagtgagttaagggagttagttgtcagccgcggagttcagggaattctttggaacgggtcggctgcatgttgccggaaaaattaaaatttcttaacgctgtaataacgatggtcttacacctacacacaacaggaaaactgaaatgggaatcccagccagtcgcttccggcagctttctgttgggattcaagtgtgaacagaaatttattacgacagaagaagacgttaatgttcactcataaaggattcaattagggcttggactagctcttcactgcacatgtaatggcatctttgtagtgtagtttgggaagatctgaattggctcaacaagtagtatgagaatgcacctgtatgtgggacttgcaagatgttggcatttgacttagtgtgttgaattttggtattccagacctgcacggagaaaggacaatgacaagatcttgatactttatcattggggatactagagaaggagaggaagtgggcgtcaaggtgtatctttgaatgatattggtaaaaggtgtttcattttaaaagttctgatcttaggtcagttacttctacggaaccagagtcatctcaatcaccgttacatggatattttattctgagtacacactattatttagaactaatgtgaggagcatgaattttaatagtctgtgtctagtgtctaatattttttctttcataaagtaga

SEQ ID NO: 30899 - DNA, 1071 bp, Artificial sequence
  DNA replication origin
acggtgcgggtaggacgcggcaacgagcgggaggcacctctacgcgccgggccccatctaggagccggactccgcggctgcggcgggacacgcggcgtcggcccgccccgcccctcggggccgcccctcccgcacagctcgccgcccgctccgcgccgccgcccaacagcagcccggccgccggagagtcctcggcgcccgcgcaacccaactctgccgacgcggggcgggcgccgagcagggcggagccgagggccgaccccgcccgcgtcccgcccagacacgtgctgcctttgttcccgccgcggcgcccgcagctgccggccgcgggggcactctcggccgagtccctgccctggcagcgcgcggcccgccctctctgaggctgccgccctggcctggtgaggagccctccgccgaggccagggtccggagctccctccttccacctgacatccccgtccctgtggaaagcagccagggagcgcggggaagaaggccctgggcggggagaggcgacgcctttactgaggcctcccgagtgccacgcgcacctcgagtggacagtccaatcggttctggccacccctccggggcctccgttccctcatcatgggtagatgaccgcggccgaagtgggcctcagagatccaagccagagaagcgtggcccgtagccaagcctgagcccgtcacaaatatgacctctaagttcccactcgccctcttatttgtcatattaaagctgaagcaactgcccctccggccagctttctgaccctcttaaacgttttcaattctaagtatgtataatttgagaacttgatgctagcgaaattgagtaaaattctgtttctgaaagctgttcctgtcagatgtgaatccagatccttcacaaaggctgttgttcatttactattttaccttgtttctggagatcgagtcaaaactgaccacaaacctgggaaacaggaaacttaagccctgtcttaatccagattatctctggacctagagatgagggagtggctctccagaggagaggatgccacccagttacctgaccactcca

SEQ ID NO: 30900 - DNA, 1541 bp, Artificial sequence
  DNA replication origin
ttctccactaaagaaaagcccttctccctaaaaaaagaaaacagcaaatcagggcggtgtgtggtcaaacgaccagacacaatctttccactagacccgctcagcttcgcctcgcctagattgaagatgtccccgggtggcggggatcttgcctcacgaccccactggcagctcagttagggtggctggctccaggagcctctgggagagtgaataactccacacaggagccagaaaagggcctccaaccagaaaccccaattcctccctgggccaggcagccagaggcccctctctagctccatacagggtgcagccggcagccttgcctaccctggacccagcaagggcacaggcggcaggggcaggtcagtcctttgagttccccaaagtgggaggtcagtggcctgggtggctctgaatacatcttctgggttttgcgcaaggctcgtgagttcaaaagtgcccagagttcttggcagggatgaaaaaaaccccagggagagactgtgggaaaggtgaggcccttggtggctttgctagacacatactgtacacaaaactgatttaataataaattcttaaaaatgcattgaatccttgagccatgacgcaggctacagtgctcaccgatccaggcctaggaggagccgcttcttgtcctcctggccgctctcgttcttcaggtcggagaagacctgtgtgaagtagtgtgggtcggcatttatctgcagcatctttgagctcatgaggttgatgacagagaggcaacggtcccaaaaggcctccttgcagctctccaccaggaagggcttgagcgggtaggagatctcgttgcccatgtaggagtaggagaggtacaggcatgtcagcaggacggcctggagctcgtgatccgagcccacctcggaggagataacatccctgcagagcatgtagaggaagaccacgttggccggcgtgatgaagccctggtcctgccagccctgcagaagcagcgagcggtccacgctgcgcagccagagcacggggtccgtgggggacaggtgcttcaggcggtagcaccggcggcagagaaactcacccaggcagcgaagcagctcactggtggacgcctggacgatgacccgtttgggcgtccctgcggaggtgacggcagggtgaggggctttcttgactgaggaggagcccccggtctgggaacccgagagctggctggccgggggtgcaggcggctgggccggtgggggctgggcgaatgtggacaggttggcgcacgacagcgacttcttcaggttctcattgttgaggtgcgtgatgttgttctggtagctgctgttgggctgcaccttcttggagttcttcttcttggccgacacggccacgattctcttccaaggcagcacggagatgatggagtggcgcttcaggttcttgtccttggcgttcttgctgttctgtacggccgtatagtggcccacggtggccgcgccatcctcaaacagcgtggccttccggtagctgggagacagggacagcac

SEQ ID NO: 30901 - DNA, 1294 bp, Artificial sequence
  DNA replication origin
ggcagccgcggcgggaggagcggaaactgtcgggtgcgtcccgttcggagccgcgccggccgagaaggcgccgaggagcagcgaggcggcctctgtccggcccggacccgccgagcggcgtgcgcgccccctccccgtagcctcgcggcgcggcctcgccccggcccctcccgagctcatcgcgggcccacggagcggccccggaggcccgagcgcgcccacctgagcccccgcgctggcgccatggcggagcaggagagcctggaattcggcaaggcagacttcgtgctgatggacaccgtctccatgcccgagttcatggccaacctcaggctcaggtgagggcggagcggccgcgcgcaggggcgcgaggctgcgctttcccgagagggggcgcctcggggcgcggccggatccggggtgtcgggagcgcccaagctccagggatggaggcgcggccgggctgcggtgtccgggggtctgccaagctccgcggctgcgctttcccgagagcggacgcccctggggtgcggccgctttggggtgcggggggcgtgtcgagctcaagggccgcgcttccctgagaggggagccctgggcgctgtccggggtttaggtgcagagggtgtgccgcgcgggagggcgcgcttccccgcgccaggtgagggatgtgggcgggccggtgacctcatggaaactgaagggaaataacttgaacgagagttgcggtggccccgaaggccctaggaggactggaggattattttggagagaggctggcgtctcatcccggctttacacttgcttcttttctttctttcttcgcccttcttttttttttcctcctggcgtagttccatcctgtcattcaggatgctatggagtgatccctgagctgtctgttccgggacactggctatttttttagttactctctaaacgtaattagacacgtttccagacatcgaagagactgctgtacttgccagtgccaagataaactgtctgaatttgacaagacgttcatggttttggtttttttcaaggagttagtggatggagctcttgtgttattaacatccttgagaacgtagtcacaactcaacgccccaaaatgggcttccaagatgtggatttgttttagaaagccctttacatgcgattatttcacccttgatagagtaatatgtaaacagttttaaagtagtttgacttaaacattaaagtaagtggaatttcaaaatagctgagttttggtgtgcgtgtgtatgtttccctgcaagctttggctgca

SEQ ID NO: 30902 - DNA, 1038 bp, Artificial sequence
  DNA replication origin
ctcgggcctccggggccgctccgtgggcccgcgatgagctcgggaggggccggggcgaggccgcgccgcgaggctacggggagggggcgcgcacgccgctcggcgggtccgggccggacagaggccgcctcgctgctcctcggcgccttctcggccggcgcggctccgaacgggacgcacccgacagtttccgctcctcccgccgcggctgccgggcgctgtaggggccgggacaccgagacggagacggcagcggctggtcccgcctccagcctggggctcgtcccggctccgccccgcccgggcctcccggctccgcccctcccggcccactgaggagcccgccccagccgcggccctggccgccgcctcttcacctgggcggcgcgcacgcgcgggtgggcggcggggacgcgcgctgggccgggcggcggcagctgggtggcagcgccccctggggacaggcgctgggatctcaggcggccaagaggatggccgcctgccgcccacacttggtagctgccaacaaagttagaaaagtagttcgtggagcttttcgcgaggacaattcattatgattctgtcaccctgctccaaaacccactcccgcctctctactcacaccctgcccattcttgaagtggtggttcaagcacagactgagaggtaataataatggctaacatttttggggcaccaaaaatgcccagagctgttctcagcgccttagagaacttttaagaaacttgccatacgactaggaagtggagcagctgcggtttcacgcaggtcatttgacttaggagccgcagcgttcaaccacgtctgactacctccattcttcagtggcccattttctcttccactcatccgagcatgtcatcagacattaccttatatgattattaagtttttaatatatctttgtatcatctctccaggattattgcggatgtcttgagcatgggaccattctttttgcatccaccaaataactattgtactactttgcatatataaatatgaaatccatactgg

SEQ ID NO: 30903 - DNA, 773 bp, Artificial sequence
  DNA replication origin
ccccgcctggccagccgccccgtctgggaggtgaggggcgcctctgcccggccgcccctactgggaagtgaggagcccctctgcccggccagccgccccgtccgggagggaggcggggggggggggtcggccagccgccccgtccgggagggaggtgggggggtcagccccccttccggccggccgccccgtccgggaggtgaggggcgcctctgcccggccgcccctactgggaagtgaggacccctctgcccggccagccgccccgtccgggagggaggtgggggggacagccccccgccctgccagccgccctatccaggaggtgaggggcacctctgcccggccgcccctactgggaagtgaggagcccctctgcctggccagccgccccgtccgggagggtggtgggggggtcagccccccgcccggccagccgccccatccgggaggtgaggggcgcttctgcccggccgcccctactgggaagtgaggagcccctctgcccggccgcgaccccgtctgggaggtgtgcccagcggctcattggggatgggccatgatgacaatggcggttttgtggaatagaaaggcgggaagggtggggaaaaaattgagaaatcggatggttgccgggtctgtgtggatagaagtagacatgggagacttttcattttgttctgtactaagaaaaattcttctgccttgggaaaaaaaaaaaaaaaaaagaaatttggttatttctgtggtctacagtaagttaacataataaa

SEQ ID NO: 30904 - DNA, 1244 bp, Artificial sequence
  DNA replication origin
tcccagtaggggcggccgggcacaggcgcccctcacctcccggacggggcggctggccaggcggggggctgatccccccacctccctcccggacggggcggctggccgggcggggggctgaccccccacctccctcccggacggggcggctggccgggcggggggctgacccccccacctccctcctggatggggcgactggccgggcagaggggctcctcacttcccagtaggggcggccgggcagaggagcccctcacctcccggacggggcggctggccgggcggggggctgacccccccacctccctcccggacggggcggctggccgacccccacccccccgcctccctcccggacggggcggctggccgggcagaggggctcctcacttcccagtaggggcggccgggcagaggagcccctcacctcccggacggggcggctggctgggcggggggctgaccccccccacctccctcccggacggggtggctgccgggcggagacgctcctcacttcccagacggggtggttgccggacggaggggctcctcacttctcagacggggcggttgccaggcagagggtttcctcacttctcagacggagcggccgggcagagacgctcctcacctcccagacagggttgcggcccagcagaggcgctcctcacatcccagatagggcggtggggcagaggtgctccccacatctcagacgatgggcggccgggcagagacgctcctcacttcctagatgggatggcggccgggcagagacgctcctcactttccagactgggcagccaggcagaggggctcctcatatcccagacgatgggtggccaggcagagacgctcctcacttcccagacggggtggcggccgggcagaggctgcaatctcggctctttgggaggccaaggcaggcggctgggaggtggttgtagcgagccgagatcacgccgctgcactccagcctgggcaccattgagcactgagtgaacgagactccatctgcaatcccggcacctcgggaggccgaggctggcggatcactcgcggttaggagctggagaccagcccggccaacagagcgaaaccccgtctccaccaaaaaaaaacgaaaaccagtcaggcgtggcggcgcgcgcctgcaatcgcaggcactcggcaggctgaggcaggagaatcaggcagggaggttgcagtgagccgagatggcagcagtaccgtccagc

SEQ ID NO: 30905 - DNA, 1635 bp, Artificial sequence
  DNA replication origin
tcgccagggcccgcctcccagctgccccggccgccggggggcctggcggtgacggcggcgcctggcggcggggatttggcgcgggccgggggccgggggccggggcgcgggggcgcgaggctggattcctagggccgcggcgcttcccggcatgctccgctgcaggcccgcgcccgcgcccggactttgccatcggcggggcagtcgcgggatgcgcccgggagccacagcctgaggtgggtgagccccgccgggccgggcgggccgcggcgagtcggggaaggggacgcgggggcgcggggcctggcccggctgccggggagaggggaggcgggtgccgcagctttgttcttgccgcggggccgcgcgcccgaagttggggaaaggagtaggagccgcgccccggagcgctccggggcccgtgcggcgcgtcccgggcgggctgggggtccctccctcccggggacagagtgggcgtcctgggtggacgagcacggggaagcgggtagggtcttgggtctgttctgtccttgtggttctggaaccggaggggaagggggaaagtaagggagagagaaagagacggagaaaaacaggaaaacttactcttcagtacgcagggaagaatagagaaagaaaaacacaaagaaacgccacgcagactgcagagaaggaccacgaacacacgctccgagaaacacactcagctcacacgcactgagaagcacacttaagataaacactcaggtcacacacacaagcacactaagaaacattcagttcacacacactcagaaacacacgcactcagaagcacacaagataaacactcagctcacacacagaagcacactcagaaacattcagttcacacacactcagaaacacacgcactcagaggcacacaagataaacactcagctcacacacagaagcacactcaaacattcagttcacacacactcagaaacacactccgagaaacagttcacactcgctcagaagcacactcagctcacacacacaagcacactcggagaaacattcagctcacacacactcagaaacatactctgagaaacacaatcagctcacacccactcaagcacactcaagataaacagctcacacaagcacattcagaaaacactcagaaacatagctaacactcagaaacacactctgagaaacacagctcacacactcagaagcacactctgagaaacagctcacacacacagaaacagaaaaacagctcacgcacactaacacaaacacacacggagaaacacacttagaagcacactcagctcacacacacccagagaaacacgatcagagaaacactcagaacgcacaggaagagagaggaaaccaagtgggtggtcttggaggcctggggaccgggggaggggaaggagagacactgagaagcgggagacgggagcagcagagggaaagatgcctggaaagagaaacagagataaaggcagacataagaggaggcagaaaacacaaaggccaaaaggaggtggttaaaaggacagtaaagagaaacacacacgtagagaaacagaggcggaccctgagaattacccccctcccccacctacctctcacaaaatcagcgacaca

SEQ ID NO: 30906 - DNA, 1390 bp, Artificial sequence
  DNA replication origin
accctaaccaccaccttgtttttctccacctggtctctggccagaccaacccagcgcccctgttaacagccccaggaagaagggaaagggggctcactgatcaggggtgctccccgcagagctgagaccatggtgacaatggcagcagcagcagtggctcaaaaccctgcttcagctcaagatgtcccccacaaccttgccagggccccaggcacccagtgttaagagaacaatggggaaggcaggctccaggccaacggagggccttctagaactccagctctgtgagctcatcttccacaaacagcgccaccacagagctttgactagcccacctgagcccttccactcagggtccagaggcagagcaggatatctaatcccagcccccttgcacatctctgccccacacacacacacacatacacacatgcgcgcgcgcacacacacacacacacacacacacacacacacactacactgagggatgacacttcctctcccaacagatctttcagatgattatccagggataatggtagacacctagggatggtgatggatgtacagagatggtgatgggtacccagggatgttaacaggtgtgcaaggacagtggtgcgtgtgcaaggatggtagtgggtgcccagagatggtggtgtgtgtgcagggatggtagtgggtgcacggggatgatggtgggtgcccagggatggtgatagatgtgcagggatggtggttggtgcccagaaatagtggtggatatgcaggcattgtggtgggtgcccagggacagtggtgggtgtgcaagaacagtggtggatgtgcaaggatggtagtgggtgcccagggatggtggcagatatgcagtgatggtggtaggtgcccaggcacagtggtgggtgtgcagggacagtagtgggtgcccagggatggcagtgggtgccccaggatggtggtgggtgtgcagggatgttggtgggtgcccaggcacagtgatgggtgtgcatggatggaagtgggtgcccaaggatggtagcaggtgccccaggatggtggtgcatgtgcagggatggtggtgggtgttcagagacagtggtggatgtgcagggatggtagtgttgggtgcccagggatggtggtggatgttcaggaatggcggtgggtgcgcagaggcagaggtgagtgtgtaggatggtggtcagtgtgcaggtacggtggtaagtgtgcaaggatagtggtagattcccagagatggtgatgtgtgcccaaggattgtgagggatgtgcagggatgggggtaggtgcccagggatggtggtgggttcctagggatggtggtggttgccctctgcttttccaggctgcccatctcaccatgaagctcctt

SEQ ID NO: 30907 - DNA, 983 bp, Artificial sequence
  DNA replication origin
ggcagcccgggggcggcagaggcggcgagcgggcgctgcaggggccaggggtcgcccgcagggggcggccatcgctgagccgcgctaaactgcacgggctgcggcacatgtgtgccgggcgcacggcggctgggggctccttccagcggcgggcgctgtgggtgctggccttctgtacatccttcggcttgctgctgtcctggtcctcgaaccgcttgctctactggctcagcttcccgtcacacacgcgggtgcaccgcgagtggagccgccagttacccttccccgccgtcactgtgtgcaacaacaacccgctgcgcttcccgcgcctctccaagggggacctctactatgccggccactggctcgggctgctgctgcccaaccgcaccgcgcgcccgcttgtcagcgagctgctgcggggcgacgagccgcgccgccagtggttccgcaagctggcggacttccgcctcttcctgcctccgcgccacttcgagggaatcagcgccgccttcatggaccgcctgggccaccagctggaggacatgctgctctcctgcaagtaccgcggcgagctctgcgggccgcacaacttctcctccgtgagttgccctccgcgcgaacccgctccctctgcgccccactccccggcagtcaggaggcctggtgttccgccccctcggggctgtccccaggcctcttgcagtgttaccactccacgatgccaaggcagaacccattcttgggtcccctgagtcttctcctgcaggttgtgggaacttggacttaactgtaggaggagtcgcctcccaccagtgggagctcccctgtcccagcccctccttccagtgtcagcccccaaagccctcattctactccttatggtcccgtctgtgaatattagtcagcctccttcttcccgacctcaactccaggccctcaggactccaagaaactgctctgtgtttggagtgtagatctct

SEQ ID NO: 30908 - DNA, 771 bp, Artificial sequence
  DNA replication origin
accataaggagtagaatgagggctttgggggctgacactggaaggaggggctgggacaggggagctcccactggtgggaggcgactcctcctacagttaagtccaagttcccacaacctgcaggagaagactcaggggacccaagaatgggttctgccttggcatcgtggagtggtaacactgcaagaggcctggggacagccccgagggggcggaacaccaggcctcctgactgccggggagtggggcgcagagggagcgggttcgcgcggagggcaactcacggaggagaagttgtgcggcccgcagagctcgccgcggtacttgcaggagagcagcatgtcctccagctggtggcccaggcggtccatgaaggcggcgctgattccctcgaagtggcgcggaggcaggaagaggcggaagtccgccagcttgcggaaccactggcggcgcggctcgtcgccccgcagcagctcgctgacaagcgggcgcgcggtgcggttgggcagcagcagcccgagccagtggccggcatagtagaggtcccccttggagaggcgcgggaagcgcagcgggttgttgttgcacacagtgacggcggggaagggtaactggcggctccactcgcggtgcacccgcgtgtgtgacgggaagctgagccagtagagcaagcggttcgaggaccaggacagcagcaagccgaaggatgtacagaaggccagcacccacagcgcccgccgctggaaggagcccccagccgccgtgcgcccg

SEQ ID NO: 30909 - DNA, 1073 bp, Artificial sequence
  DNA replication origin
ctccagaaaagcccagccttgctgtctctcgcgtcttctctctgcccccgcggcgacaagagctggggactgcggggacccgccaacacctcccgggggtgacccggactcgctgctccgcgcgcccttctcctctcgagactccgagctcgcggtggccgtgacgccggctaagctccttccccggttgcccgggagaaccctctttgggccccaggcgaacttgggcagcggccgcgcgacgctggcgcggctgggctccgagcacctgctcctcagctcgctggccccgcggctccgggcgggcggggcggcggcggccgtgagcgccgtgcgctcctggagacgcggtgctgacgcgcccggctcctcctcgctgcattttaattcctggccactgtggccgctgcacaccgagcgggaagcctcttgctggagtcggccgggtgcgggggtggggtgtggtggggagcgggatggggatgcgctgtacagatgtgctcaggtgtatgggcttgtgggagagataagtagtataaccattgtgctgatgtggccccagtgtagacaggggtgagaggactcctgagggtgtgagatgggctgtagagagagcgagttgctgtgtagtgtgggcatttgaacacgattgcgagtgtggtgccaagtattgggtgtgcgtaggatgtgcattgtgtatgtgtgaatgggcatttctgtgaaactcttgaatgtgagcatgtctgcgggtggcgtgctgtggccattagagtgtggtgcatgcaggatgtagtgtctatggtgacgtgtatgttccgtgtgtgtatgtgtgcacttagtgagtcctgggtttgaaatgcatgtgttgatgtgtggatggatatcagggtttctagatgtggtgtgtggttggtgtgttttgtgtgtgtgtgtatgtgcatgtgttgtatgtaatgagtatgtgtgttgaggcattgcgagcagggtaggctcagtgcgacaatcctcccctcagcctcttagggacatcccatgtgtgtcccagccccttccctggaagtgcctactgctca

SEQ ID NO: 30910 - DNA, 1064 bp, Artificial sequence
  DNA replication origin
caggatgtagtgtctatggtgacgtgtatgttccgtgtgtgtatgtgtgcacttagtgagtcctgggtttgaaatgcatgtgttgatgtgtggatggatatcagggtttctagatgtggtgtgtggttggtgtgttttgtgtgtgtgtgtatgtgcatgtgttgtatgtaatgagtatgtgtgttgaggcattgcgagcagggtaggctcagtgcgacaatcctcccctcagcctcttagggacatcccatgtgtgtcccagccccttccctggaagtgcctactgctcagccctggcccagtctgccaagcacagctctccaagagggtgggaagggggagtaggacttccagggacaggagactccatctttcccattccccttgctgggacagggaacacttggagccccattactccatgagataaaggggttttccagacattatccggagagtagaatttggtggtggaggcagtgtgaagggactccaagggtgggaggatgctccagtggaagaaggaccaacgtgtgtatcctttggggagaggaggcttggggaagcagagatttgggtgtggagaggagttttaccgtctttgtaatgatgaattaggggcaatttggccagatctgttgaatgagctgtgggtttccaagcaggagagaagcagtgctgggatgggctttccctccccactgacctgagggcacccttacagcgtgatgactccctgcatctggtctctggagaagaggacctctgagcccctcatttcccactcacccacatacatacatccacacagtcacacatgtacaagcacacatatacacaaacacacacacacactacacatacaacacacatatacatgaacatacatgtataccaacatatacacttaaatgcatatatacccaatgcatactgcatacatacatacacacaacacacatacatatacacaacacacacacacctggaaacccttctcactcatctggggaaaaagctattgcagttgggcattgatgacagtttgctttgggtttggttgc

SEQ ID NO: 30911 - DNA, 1688 bp, Artificial sequence
  DNA replication origin
ttgggatggcatgttacaattggaggcatcgagatatttctgtgggttgggtcatggtggttcgggggcctggagtttctcatcaatgaggtgttcaggtttccgtgaccgcttgaatgcaatggattacaaggaatgggaaggaaatctggattgacttctagactccccctggcttggtgtcaggcagggatggtgttgcaaataaccaaaataaggggagggaggaaggagggaggtggtggcagaacagagaaaagttggtaagttcagtctggcctcctggaggtgcctgcaggaaccatgagtgaaaatgcccaactgactgctattgacctgagatgtcaggtgcaaggcacaggtgtccatgagggctgaggccaggaccttgggacacaggagtgtctgaagggtaaactgctgaacactgagaaggagcactcagagaaggggcggggagtggggtgagtggtgtcacaggagccagaagggagcgagccatggggtcagatgctacttaaaagtctggtaatatgaggactaaaaggagtgcatttgatttggcaattagcccctttgtgactttgctggagaggtttccatggagtggtggaggcagagggctgaggagtgctgggaggagtggaggcggaggccatgcctattaacctctccttcaaggagctcagcggcaaagggaaggagagatgggctagggaggagggcggggaatggaggatttctagcatgtagggaattcaaacacattgtgggttgttgagaagaagccatgggagggggaggttaaagacattgggctatgaatgggaggtggagaggtagccagtgttgcctgtgaactggatatgttgctgggagttacctgcaaaatagagtgtagcccttgccttagtgagtgacctgagcccaaaaaaatagaccttaagtgggaagcaaggctgggggcaggtaggaggaaggcacgggcatgaaaacagaaagggccaaggtatgtgcgtctatgtgtgtggctgcgtttctgtttcagtgtgtctgtgggtctgtgtctgtatatgtctatgtgtgtgtgcatctgtgcatgtttgactggaggcatctctatgtgtctatgtgtgtgtgtgtgtgcctgtgtctgactcaaggcatctgtgtgtgtctgtgtgtgtgtgtgcatgtgtctgcctggaggcatgtgtgtgtctgtgtgtgtgtgtgtgtgtgtgcatgtgtctgactttggcatctgtgtgtgtgtgtgtctgactagaggtatgtgtgtgtgcgtgtgcatgtgtctgactgcaggaatctgtgtgtgtctgtgtatgtgtgtttgtgcatgtgtctgactagaagcattaattaagacaacactctgagcaggggttgcagtggattgaaggagcctggagtgttttattggtaagttgtttaggtttttgtagccacttgaatcagtgggttgtgtgtgggtgggtgtgtctgtgtgtgtatctatgggtctgagtgtttgtatgggtgtttctctgtacatgtctgtgtgtgtctgtgtggttatgtctgtgtatatccctgtgtgtatttctgtgtgtgggtgggtgtctgtttctgtgtgcctctctgtgtgtttttgtatgtttgtgcgtatctgtgtgtgttagaatcac

SEQ ID NO: 30912 - DNA, 1616 bp, Artificial sequence
  DNA replication origin
ggcccggggcggagccggggcctctcctgagcgccgcaaccccccgcccgggcagccaccgccggcgccgggctccacgagagggcgggcgggggagggggggcacgaaggccgcagatccccgggctcgcgtacagagccaggcgcccgacgcggccccgggcccgggcggccacgggaccggcctcctggcgccggacaaaggccaagggaggcgcaggagggcccaggccaggtcaggaggtgggggcccgctcggctgggggccactcgggtgcggcgcggagggcgggggtgtcggaaccgctggtgcccaggacctgcctccggccccttaatccggatcggttcggtccggattagtagtgatcggtgtaaacacactagtgaaaccgcgtgtttcctcgcgagatttgcacggctgggaggcagggggggtcctggggggtgggggaagcgccgacagtgggggaggagggggaggggacgaggaaggtggggggggtccccgctgccccctgaatttgtttattcacttaatcatcctgccaattttatatgggaaccatctacctattacagaggcagaaagtaagggttagacagggtagggtgacttgcacaagctaacagtgctgccaggtgagagagtcatcattgttgggcttcacagcctgagtcctcttcattgcatggtgctgcaggtgacagccatgggcctggaactgcttcaagggtagtttccagtgtcctcacctctccccttccccagcctcacctctcacatttccagaattagccagttcctattattactgaagcaatagttaagtttgagggaaaaacaccaaatataactacagtaacaaaatataataagagttaacatcattaactagtcatcatgcaattgccacaactatcctaggaggaagctattaccgttttgatcattttacaaatgatggaacagagtatcagggagattaagtaatttgcacagggacacacaaccactccaagaaaagatggagatccaaatgttgctcttttcaagaggcagctcagcttaatggggaagtgggaaagcatatatctcaacaaggagaaataccaaatgggtctaccatatgcaaagcacagtgctatgctctggagggggatgcaaaaatgagtaaaggagcatatggttctctgctgagaaagagaaggctctcacaacacaagagttgaacttgggcaaaagacagtagggttccacattaccgatgtgactactggaaattctttcccaactatcctgggtcggaggcagaagaagagactggttggagagcccaggagagcctctgaacattaagccaacagtcttgaatcatgacaagagcctctccacagagtcctcaaatgcacttctattcaatcactcagatttttcttctttgagcatctaagaggcaatatgatcaaagggagacaaggtcgtgaaatagaaagaatgataactttgacatcaaacttgttataaactccacctccccttattataagctccgagaccttgggaaattgcatatttccctgaggctcacttccctagctgtcacttgtggata

SEQ ID NO: 30913 - DNA, 712 bp, Artificial sequence
  DNA replication origin
gccacggagactccccgactcctagctccccctcctctgtccacgtgtccattccgcattcctagcctggcggcgcgcgcggctccttaatgagactcgggccaagggccgacctcgcgattccgctcgcccctattttatgtttgatttttccttcccaacgccggctagcgctgggacccgaatggggccggccagctgcggcgggaggagcctccacctccctcagctgcgtttctccagggtagacgccaccgcagtcactgatgtcccttttcaaaggatgcacgctccccaccgggcgccggaggtgttttgcagccgctcttccagaggcgcgggtagggggcaccctacccccacccccagagttcgctgggcactggctgggaatcagcctcgctgctgtgcccagctcctctcgggccgcgggggctctggggctcagcttcgtgcgggatgggtccggggcgcagctgtgggaaacctatttattctgttgctggggaaggaagacggagaagaggaggggacagtgctttcctacaggttgtttagcaagcctttaaagaggcatgaggtgggggtggggaactgcccctcttgcatactcacccaggcacctgctgactagcgggaggggtggctggagtgatatctgttcccaccatcaggccctttccattagagtgcaacctagatcagacccggc

SEQ ID NO: 30914 - DNA, 1601 bp, Artificial sequence
  DNA replication origin
aacccgaaggtctggggtcgtgtccgcccacggaaatctagagggatccgagggatcctccggatcgcgtccaggccgccccccgcccccgtctctccctgcagccggccgggctgggggctgttgggatccgccgggatcgcgtctttcctcgccccgggcgcgcaggccggtgcggggccgcgccgcccgtcgcctcgcttcctgcggcggtcctcgggaagggaagtggactgactccgggccggggagccgccgcggctcgcacgcccgcggtcctgtgagctgcatctaaatggccggcttaggcgagcccggagggcgggggtctgggcacccgcacaggccggggcggtgggccgcgggccgcgcgcggagggagcgggctccgcgctctcgcattctgcaatctgttgcgtctgctccccaggctcgccccgggctccgcggtaaagggggtgggagaaggagggattgaggttggcgcgctttggcggtgggacagcgggcatacgggtggggggcagcgggtttttgaacagcccccaagaatgggaaatcagaccagagggaaggaggctgcagcgggccttccgcaagctggagacgctccaggaggcgaggggagcagaccgaggtgggagggagagagctccgaaaggagagtggagaagcggggccctctgctccctcctaacgtgaaaccagccgacctgggatacattttcttaaccagcaaggcgtggcggggttggggggcgggggtgtttcgatgctccacgctgaggggtgagcctcaggcagaatggagggcgcttagatggagggggcagtgggctctccgcattggtggagcgccctcggtgtgccgggctcagctcttgcccagatctgcccagtccctaagagcctgctcaagctcgccaggagtgtgcccaaggtctctaaccagcggcctctttcaccctgaccaaagcgcattctcaaggttgagagaataagaaaaagaggggctctcggaatcgtagggtcctggggctaggaggggggcggggagcaggcagacctccctctatgggtggcttggttattcccggctgaggtaacaccagggggggttgttttgcgttcagttcaccagagacagctaacctcagttctctatgggaggaataggcagagcagcgagccagcaggggggcgagggtgaggtggggcgaagtgggagcatagcggggaaccagaaatctctaggctctgtgtgcaacactgagaatgaaggtgggggagagggaggtgggctgcctgtctgcgcactggagctgcatgggctgcacttgtgacctagcactggccggcagggagtttccctgcccagtaggaggaagcccagaaacccaggcctgagtctaggtgggttcttcccctcttcttacatcttgctgtcggagttcccttcccaaagcccaaccatggcgtcacctcaaacgctgatgatgggcagctcaaactctgtcattagggtccctctgcccaccttcccgatccctgagcctggaattaaagatccctttcccttcctcacctgccagaatcctgcc

SEQ ID NO: 30915 - DNA, 755 bp, Artificial sequence
  DNA replication origin
ccattcacacatggtctctgtccaggagtcctggcagaaactggaaaggggaaagaaaggccagagaccacgctgcctgtggaagatggggaatgtgagggaggcagcccaaggtcaccctgcccggtggcgccagagtcagactgaaacccaggctacttggctcccagtctggctgtgtggtcagaaccctgtgacctcaattgcctgccaggcacagaaaactgcaactgtccctctatctcccagcattttagaaaagccccggaaccccaaccaagagtcagtttaaagggagactaagtccccggaccctattcttaacagagggaaggggtggctacgtgggtgtcaggcagccctggaggaggagggcagcccaggcaagatggggttttattgtggggggatttctatcatactggccttacccatctgggggatcccccaagttttaagtatctgctggcacccttctctgaggcaggggagactgagacatgcgatggagaagagagttcaggactcagggaaggaggttggaaaggaagccagatagtcaggaggggaaatgtccgctcagtagggcgattcagaccctacctcctcaaataccttctttctgctcaggcagccaagccctctgccctaggtgtgctgtcactgtgttaggcactggctgtgtggagagacagggaataagcccatggctctgcctccaccaatccaggactactggggcacagagagggcac

SEQ ID NO: 30916 - DNA, 1190 bp, Artificial sequence
  DNA replication origin
aggaagattcagatttggatatgcacagataggaaaggagataatctaatgcagagggtgcagcatgaacaaaggaggggagataaggcagcagccgtgagtgtgaaggtgagtgagttgtccagttacgccaccagcaggggattgggaggagtcctaggagaaaaaggatcctgacgccttgtgtagggggccctgaatgtcacactcaggtacaaagtgagtttggattttattttgtaagcagataggagcgcttctttgatatacacacatttgcattgtgttgcacaatttatagagtgctttcttatttgattctgagaaacaaaacaaatgacaacacagcctcctgcgagaccagcattactgttatcattgtcctgtttttacagttgaggaatgtgactcgggaggttcttggggagatccaaaataagatttcaaacctcaaacctccgtttgggtccttcctgttccttgacagtgtccaacgagttttgggctgggagtgagaggggcaacaatgtctgatttgtgtccaggagaaaaaaatactctggctactgtgtgggggaggagaatgccagagaggaggggagaccctattggccagtggtatgtcgtcatagcgacagcagtaaggccagaatgggggcagggagggaggacaaggggcagcctgaggtggaattgccagaagttggcagcttccttggtgggtagggagaggcagttaagaggagggaggaggcccatgtttaggtgtgggagactgaggataaaatttcctggttatatagtctgtggccaaagggagaagggagagagctggatccctggggaccctacaccagctgagagagcaggtacaatactaaggagcttgggttcgagagtcaggggaccccaggttcaagtcccactgctggcccctttgcccatataacttggttaaattatttaagtgtcctgcaccttagttcatttatctgtaagatgttaggattggcactcaaaaaggaagttactgatagaaaactggtcgcgtggatggagatcataataagaggtacctcagagcattgatctgaggatgaaatacgctaaggcctgtcccacacggagcgcagtgcaggatacacagggatcacagggactcttttcagcaccagagtccactcagccct

SEQ ID NO: 30917 - DNA, 1299 bp, Artificial sequence
  DNA replication origin
catccccgagcgcctgacggtgaactggaaggtgcgggccttcatcgtccgctcgcacgtgcccgcctcgcagcccgtggtccaggtgctgttctacgtagccggccgggactgggacgacttcggcgtcaccgagcggctgccctgtgtccgcctgcatgccttccgggatgcccgggaagtcaagagctcctgccgcctcagcgggggcctggccacttgtctggtgcgggcagagctgcccctggcctggttcgggcccccagcccccgctgcgccacccacggcccgccgcaagtccccggacgggctggagcccgaggcgacgggggagagccagcaggccgagctctactacacgctccacgcccctgatgcgtcggggggctgcgggggctcccgccggggggccgggcccggggtgggggcccgagcggaaagccctacccagcaccccctgctgcgcatcgggagcatcagcctgttccgcccgccccccaggaggaccctgcaggagcacaggctggacagcaacctgatgatccgcctgccagaccggcccctcaagcccggggaagtgctcagcatcctcctctatctggcccccaactcctcctcgccctccagccccagcgtggagcacttcacactcaggtagtagggaagatgggtggggatctggtttcccttccaagatcaaatgcatacctgactccttgtgggtgggttggggggtggggggacctcccagctgtatccctgtccagcatcctaatcccggatctgtcacttagcacttgagcaacctcaggaagatacctcgcttattggagcctcaaggctcttatctgtctaatggcaacaaacattcctgcccctatttctggatctcatagaaatggcatcatggtaaagaggaaatatcagtttcacaagcatagatttccagaataatagaactgggactagaagggcccttagacattttacagacaaggagactgaggccaaggaagagaaattgggtccagagagcagcctcttggctgggagccaaaagaatcgtgtgtgtgtgtgtgtgtgtgtgtgtgtgtgtgtgtgttttgggacatttgccccagtcctagagttgggagaaaaattttcagaattcccagctctttctatccttctacaccttgaaaaggacacagtttgcaaactcaaaaatgccttaaattgtatcacatccaccccaaaaatgataatatttcacactaggaatctgtggtttgagttatgttgtgtgactctgaggac

SEQ ID NO: 30918 - DNA, 1779 bp, Artificial sequence
  DNA replication origin
gtctcgggctgagccgcccgaggagccgtcgcccctgccgtgcacctggctctggacgctggtctgcgagctgccgctgctgtggtggtcgccgtggcagaaggcgggcacggtttccagcgggttgcctgctggcggcgacagctctccttgcacccgcagcggctgcccgttgcccaggaacacccagtggtgagagtggtccatgctggtctggccctcgggcgggatgcgcttgtgccggtagcgcagcacaaaaacgatgcagttgatgaggaagacgaggatggcgaggcagaagacgcccagcagcgcgtacatgccgatctccaggtctgtcagaccccgtggcacctgcaggaagccggtgggcagcggcaggaagtcttctgtgggtggcacgacggggctggcggtgcccgggcctggagcctccggtgcgggtagcgcagagcccggcgggccagctccccgggcctcgtcctcgcccccgccgggccctggttggctggggcccgggtagtcataagtggggtcctcctcgtccctcccaaagtgcacccgcaggcccacaggggtcgtggcgagcacactcttgcgtttggttttctggcagctctcagcgatggttagctctgcgcgaagcagctcccctgacccctcggcctcagccactaccagagggaaggcccggtcctgggtcacagtggccacatgctcatccaggctgctcactagcagtccatagtctcgtgggctgtagagggagagtggggctgtggtgccatcactgtaggagagccagaggctcagtagggcttcctggaggagaaggagaaggaggggataggagtcaaagagctggttcagctggcttcctgctagatcctgggctctgtaggggcagggaccacgggtctctggctccctgctgtattctcagcactggaactgtgcctgtgacctgtggcgggcattcaggaactactgttcaagtgagagtcctcctcacagggtgtggggagggtaaatcccagaccatggcatccaggcctcatactgctctgaggatgcccttgtccacttcacccttctcccctggataacctaaaggtaagttttgccttgggtctaattcaagtcccttctgctgctggaatagctccatatctccatgcctaaccttgggcttacccccatcagacaacaggctgttgagaatacacaccccctccccacttctgcctgttggctaaaaccttctgaggattgccctccctccagatgaggaagcagggttcagagagaagtgattgccttggggtgatggagtgagttagggacagaggacccgtgtcctaactccgggctcagcacttgatgctcacctcctcactccccaggactctcacctgtcacctcctcactccccaggactctcatctgtcacctttccactttcatcctgtggctatgcctgtggtgtatacttggggctccagagttgagtgagggtacttcctgggggtgatgtggaggtgacagccctctgtgaatccaggagggagaccctcagagggaacatctcaggtggcaagagcagcaagcaagaccttgctctgacctcccatgtagatgttgtggccatagggtgggcagttgtgcagggcatggagggcagagatcctccatttcctaaagccctaatatggggactcttggtgctagggcaaagcagagcccccaagttctccttccataccaccaactccctggctg

SEQ ID NO: 30919 - DNA, 768 bp, Artificial sequence
  DNA replication origin
ggttctggtgccaaagtcaaaagcttctcatctgtgaaaagaggttttaaattaccctgtgtttaaacaggaagagagagggaaaatattaatggagctgagactggaaagtccaagtgagatcctgctcttccagcaaagcgagcgagggagggcgtgattagtatcttcagcattggagcattttgatgtaatctttgatttaaaaggttttgcaggtgcgtgtgtgggggtggaggaataactctccctgcccaacctggaggttcagagtaggcatcaggaaggggagggggaggagatgggcccccgagtgggacaccagggaggatggtggggcagctgggggaatctagccaaaaaacccggtctgagagtgggggttgtcctagagactaggttggggagtagtcagaagagggaggagaaattttccaaatctagagaaggagtcagccttgctttggaaagcctggcatcaccagtggggtcttcagaatttgcacttgcctttttctcatcaatgtgtttgagcatccatgctgggtactggggtaggggtggggatacagactaggggaagtatgttgtgccagtgcaaactggggctgggcaggaccaaactggggagtgccgaggaagagcctgaggaggcctggagagcatcattggatggggcaagaggtggggaaggggcatctaaaggcatttgggaggtgggaattgttacccagttggaggactggagaaatcaaatgtgggcagagt

SEQ ID NO: 30920 - DNA, 843 bp, Artificial sequence
  DNA replication origin
taagggaggttgttaaaatacagctctctgggcccacgggaggcctggaatctctgggagagggttcaggaatctgtgtttaaccaacttcccaggtgattcagatgcatttaatctctgagttgatgtctgggcaggctgggctgggtggtctgaagggaagtgggtgggagaagccagacttggtggtggtgggatgtgggggaggctttgcaggggagcaggggaagcacagtccttgcctttaagaaaggctggggtgttgtggcttaatgaggtgaccttggacaagttacttaacctctcagtttttgtttcctcatctataaaaagtgggggtaataattccttgaaagggctgttgagaggattaaattccatgatcaatacaatagattctggtgtctcaaatgtcaggcgggcccagtcttggcccagccccgccctgaagtcctgacggagtctggccaacatttctgtaccccagaatctgggagatcagacagtgagtgatggggccagggcaggctggggaggaccttggcagaggggagaaggagaggaacattagagagggaagggatggaggtggaggagggcagagggttctctaggagctgaaatatggctccttctttccggaatgtgcctcttaatcaacttaatgggcctctggcggagcagggtcctaggaaggtaggagaaatggaggtggaagctgaggctgctgttgctggggtgtgggtaggaggtgggctgggctggactcagctggctgagggtgctagtggaagtctgggggctgtgttggtggttgggaccttcacccttttccctcctaaa

SEQ ID NO: 30921 - DNA, 778 bp, Artificial sequence
  DNA replication origin
ttcccctgctcccctgcaaagcctcccccacatcccaccaccaccaagtctggcttctcccacccacttcccttcagaccacccagcccagcctgcccagacatcaactcagagattaaatgcatctgaatcacctgggaagttggttaaacacagattcctgaaccctctcccagagattccaggcctcccgtgggcccagagagctgtattttaacaacctcccttagtggttcagatttgctgataggtttggaaaccactttattaatccaaatctttcattatacagatagaaaaaccaaggcccagagaggatatgtaataagtccaaggtcacataggaaaagcccaaagtaggacctaagccccaattcactttttgcccggaggtccatcagcagagagcagccaggccccagagcttttctggcactacccctaccctcacccctggcccccacttccctccaagtaaccaaacatggaaagctcaggcagggcatcctgtgggaaagaagtgatctgatgaccccacaccgcttcccttctgggcctggcctggatgtgccttgtggaaaggtctttgcattctctaagtctcccttcttccatctgttacttgggtctctgagatgtgccctttctgccttctgtaggggagccaagaaccgagaatgaaaacacaacaggggccaggggcagtggcctgtcatcccagcactttgggaggctgaggcgggtggatcacttcaggtcaggagtttgagaccagcct

SEQ ID NO: 30922 - DNA, 866 bp, Artificial sequence
  DNA replication origin
agcctggccaacatagcaaaaccccatctctactaaaaaatacaaaaattagcagggcatggtggcacacacttgtaatccctgctacttgggaggctgaggcatgagaattgcttgaacccaggaggcggaggttgcagtgagccaagatcgtgccactgcactccagcctgggcaacagagcaagactccatcaaaaaagaaagaaaggaaaggaaggaaggaaggaaggaaggaaggaaggaaggaaggaaggaaggaaggaaaggggaggggaggggaggggaggggaagggaggggaggggaggggaagggaggggaagggaggggaggggaggggaagggaggggagggaagggaagggagaaagaaataaagagaaagaaagaaagaaagaagcaagaaagaaagagagagagaaaggaaaagaaaagaaaagaaagagaatacaacaagtgcaagaagtgactctagccagttcctgcgacagtgttgggaatgagtcaccaggtaagatgtcgatccacccccaaaactttggggtttgtgctcagaggcacaagcacttggcttgctcaggataagagctcatggctgtgccagaaggatcctcctcagaggggcccttgactgcagggaagccacttgtttttgacaaatccattacaccttctttgcagctgttatccccactggatggaggaaacaaatcagggcccagagacaacagtcgggtggtcaacctgctctcagagtcacctgggacgtttctatttttaccactgaagttcctgagtccctgaaaatcatcagtttcagaaaaaccagaccggaggccactcaggacaatgagcagcatgctcag

SEQ ID NO: 30923 - DNA, 1924 bp, Artificial sequence
  DNA replication origin
ctgagaattaaaaccacaatcctgacccatgcacacaacagaacactgcggggccataaactacaatgttgggaggatatttattgacgtggaaaaatgcttacatatatttcaagtgaaaaggcaggttgcaaaataatatgtacagtatgatgccattcttgtaaggggaaaaatatctttatacaagtctggaaatatatacacccaaaattccaacagtgcttatctccaggtggtagattgtgcatttttatcatctttacacttacctatattttctaattcttttataataataggcattatctgtgtaattggttaaggctttcttaaaataagtaaatacatcaataatttttgcagggtagtatgggcaggaaaagaacagccagccacctggatccagggggtggggaaaatgggaggtgggaggaaggactcacctaggaggggggtgggggaggacggagggtgggaggattcacccaggatgggggttaggggagggtagagggtgagaggactcagccaggaggggttggagaggatggagggtgggaggactcacctaggaggagggtggggaggatggaggatgggaggactcacccaggaggggttggagaggatggagagtgggaggattcacctaggaagggggtgcggaggatggagggtggaaggactcaggatgggggtgcggaggatggagggtggaaggactcacttaggatgggggtggggaggatggagggtgggaggacttacccaagatggggtggggggaggatggaggatgggaggactctcttaggatgggagtagaggaggatggagagtggaagggctcacccaggagaaggtggggggaggatggaaggtggaaggactcacttaggatgggtggaggggaggatggaaggtgaaaggactcacttaagatggaggtagggaaggatggaggataggaggactcacttaggaggggggtggggaggaacgagggtggaaggactcacccaggagaaggtggatggagggtggaaggactcacttaggatggaggtgggagaggatgcagggtgggaggactcacccaggatggaggtaaagtaggaaggaagaagatgcctccctaataggacaaaggcctcgttacaaagactagattgtgaggccctgcctcttccaacttctttcccttcccaaatctccacagagcccagaggtcctcccactcctcagaggagagaagtctagtctggaagcccacagctgccccatatagggcagaggcaagggatgcagcagcaggaaatcccaaggagagatgcgggcttgtcaggctaagcctggcgcatgtgagacgaaggcaggcatctgagacagtagtgagcttggggaggctcctgaggagggatatcccataacgacccctccagggcaggcaggtggcccagggtgacaggagaggcagcttggagggccctgagaagcaaatgacccagcagttaatccaggccccattggttggcaactttagggctggctgggccgggagctctgtggagctcttggcctggtgggaagaggcaggcagggaaggtgaatagcacttcccagccttctccgatggcaagataggaaaggctgagcagaccccggtggtcactgcctgtgtcacttgggtgtttgttattctctttgttcctgtctatttcccctctgtcattagcagttgaaacccttaaaatggccaggagccttcttgactggataataatcagagctcctaaaacatccatggactgcctttataggtggtgagcttcctgtccccggagatattcacacagaaactgggccactatcctggtcagctctcaagggttattgagtcagaaagagagtcacacctctg

SEQ ID NO: 30924 - DNA, 1001 bp, Artificial sequence
  DNA replication origin
tgtcggagagtggcggggacagtggggtcggcggcgtaggccgcgacccccggcgaggcagaaaggagcgctcctccaccgggtccgggacgcaggcgggaagtgatcaaggctccctgagtcccacccgagcgctcccggttcagcgcaggaggacgcacgccgggccagggtacgagaaggccccgtgggttccacagggaacacagcccgggcgccggcctccccgcctcacgcggccccgtgggggtcccggggagccgcgagcctccccctgggctcccgggagggccgccacgtcacggagggtgtgccccggggctccgcaggcgggcgggggaggagccggggggctggctccccggccgcgccgagctcctcgccccgggcccgctgccttccccacgccgggccccgccgcgccgtgccgcgccgcgtagcccctcacctgcctctccggctccggcgctcaccgtaggcctcggaacttgctcattacaggccgcgggcagcccacgacggttggagcgcctgtctctttaaatccgggtcctagagcgggaggcagcgcgcaggcgcaagagccaaggccgcggccacgcgaccggtccccgcccccgtctgccacgtgggtcgtagttgcattctgcctgccctgtgatgtttgggagtagttttcaacctgcaatcgcggcccgggaagcggaggtggggggacgtggcggctcctcggaacgcagcctggcctgaacttccgaggctccccttgattttctcatactgttagagaggatctgtttttaaagatattggtggagaaactatattgtaatgaggtcggggaaggcaaagatcgcgtcaatctattttttaaatataatccctctgtttgtgtcccgcagactccctagtaaatagtttgtattcagtagctttcatggaattgagacgaggcactaaacagcagatagatataaaatgtaaaggagtgatggaggaga

SEQ ID NO: 30925 - DNA, 1540 bp, Artificial sequence
  DNA replication origin
gccagcccggccccgccgtcgggagcctcagctccgccagggggcgcgagcggaggccgcgctcgaggccgccgggcgcctcgctcttctctatggtggctcgggcgcggcgggagcggaggcgcgatcccgagagggggcggggccgagtcaggggcggggccgcgcggagggcgggagcggccgggccgggccgggccggctggggatgggtgggagggggggccgacttcctggggccgcccgtgaggatgtcgcgaccgcccccgggtgcccctcagccccagagacgccgccgcggcggagtccgcagcctccctgcctgaggcgtccgcggccgggatccggcccctcccctcgcctcctctcctaggtgccggccgggagggcggccgcagcaggtgaggaggcggcggcggcggcgctgggggccgctgggcgcccggcctggggaaggacgggaagggggacggtcgggtgccgtcaggctgtggtctgggggcccttcctctgtgtggggcgcggcctgggactctccctgccctacaggggtggggggaagcccttggctggctggaagtccccgccttcagggcagcccacacctgtcctttgaaaagtcccctcaaagaaagcgtttcacctgtgggggcagtaacaggagacgtgcgtcctcgattatccccaagcgccctgcagaccggcaggtctagttggcttgtggggaaaagatacctctttgtacgtcagaagaaactgaggcaggtccgcggcggcctgcttacccctttaaaggaaccagcccgtccctatctccgtcttagaggaggcggctggaggagggaggtttggagtttggaggtttgatggagaagtttgggaatgcggttctccccgcagggtccactgttccctcgcttgggagttgtcctctgttcgcgatgtgtgtgaggtcgccactgtgcggcagcggtcaagaccgagagggaaatggggcctctcttcagccggctgcccaggagacagttgaccagacatggggaagtctggcgaaccaggggagccagagcctccgctggcacgtctgctcagagcttgagttcaggctggcagaagagataaacaacagcatatcattttctcctttttgttggtctgtcatttgttctaggggggaagaagactgcttgtgtaatcaagagtgtaccgtgcaccccccagtctaccataaggaaggataattgttagcttggaaatagggttttacccacaactgtctctttgctccctggttaaaggccagagtgacgtgatgagcaaacatcccggggtgcatgtggccttctaagaaagcagtgagttccttatgtatccctttgattattggtttggaggacagagagacttcctgttaaccactgtcgctgcaactgtttggggtgccttattctccccgtgacagttcaatttactgaaatgtgggccgggctgcccgtttattataccattcttctaggaatgggagtaggcaggggacaag

SEQ ID NO: 30926 - DNA, 1453 bp, Artificial sequence
  DNA replication origin
aggaaagatggctggcagtcacccctatttcaaccagcctgactccacacacccatcgccgccctccgctccacccagcctccgctggtaccagcgctgccagccctctgatgccaccagtggcctgctggtggccctgctgggtgggggcctgcctgctggcttcgtgggccccctttctcgtatggcttaccaggcttccaacctgccctcgctggagctgctcatctggcgatgcctcttccacctccctattgccctgctacttaaactgcgtggcgacccccttctgggaactcctgacatccgaagccgggccttcttctgtgccctgctcaacatcctcagcattggatgtgcctacagtgcggttcaggtggtgcccgctggcaacgctgccactgttcgcaaaggttcttccaccgtctgctccgccgtcctcactctctgccttgagagccagggtctcagtggctacgactggtgtggactgttgggctgcatcctaggactaatcatcattgtgggacctggactctggacactacaggaggggaccacgggtgtctacaccgccctgggctatgtggaggctttcctgggaggcctggcgctgtccctgaggcttctggtctatcgttctctgcactttcccccctgcctcccaacagtggccttcctatctggcttggtggggctgctgggctctgtgccaggcctctttgtgctgcaggcccccgtgttgcccagtgacctcctgagttggagttgtgtgggggcagtggggatcctcgccttggtctccttcacatgtgtgggctatgcggtcaccaaggcccaccctgccctggtgtgcgctgtcctacattccgaggtggttgtggcccttatactgcagtattatatgctccatgagactgtggcaccttctgacatcgtggcggcaggggttgtgctgggcagcattgccatcattacagcccagaacctcagctgtgagaggacagggagggtggaggagtgagatagaacttgggagcccgggggttgggagggacagggataaataaaggcaaagactgaagacaaacatgggaggagaagtgactggaaaagaactggtgtgggagagggatacctctcagagtcaagggtgacttggggacttggtggagagggactacgtggaagacctggggccagcctgggaccaagggatgtggagtccaggctgggtcctagaatcagggcataactaaggggtaaagtctgaggagcagatccaaagggctgaggcagggaggccgtgggccatggggaggacttcactcagcagcaaagagaagagcattggggctggagtgttccggcaaagacagagccagcagctgcgctgggggagggaagcgtgcctccccacccctcccctcacggggaaggtttcctttcctcg

SEQ ID NO: 30927 - DNA, 807 bp, Artificial sequence
  DNA replication origin
ccggccgccatcccgtctaggaagtgaggagcgtctctgcccgggggcccatcgtctgagatgtggggagcgcctctgcctggccgcgaccccatctgggaggtgaggagcgtctctgcccggccgccccatctgagaagtgaggagcccctccgccccgcagctgccccatctgagaagtgaggagcccctccgcccggcagccgccccgtctgagaagtgaggagcccctccacccggcagccgccccgtctgggaagtgaggagcttctctgcccggcagccgccccgtccaggagggaggtggggggcagcccccgccgggcaagctgccccgtctgggagggaggtggggggtcagcccccgcccggccgctgccccgtccgggaggtggggggcaccgctgcccggccgccccttctgggaagtgaggagcccctctgcccggccaccaccccgtctgggaggtgtacccaacagctcattgagaacgggccatgatgacggtggtggttttgtggaatagaaaagggggaaaggtggggaaaagatagagaaatcagattgttgctgtgtctgtgtagaaagaagtagacatgggagacttcattttgttctgtactgggaagggttcttctgccttgggatgctgttgatctgtgaccttgcccccagccctgtgctctctggggcatgtgctgtgtccactcagggttaaatggattaagggcggtgcaagatgtgctttgttaaacagatgcttgaaggcagcatgctcgttaagagtcatcaccactccctaatct

SEQ ID NO: 30928 - DNA, 1254 bp, Artificial sequence
  DNA replication origin
ccccagagagcacagggctgggggcaaggtcacagatcaacagcatcccaaggcagaagaacccttcccagtacagaacaaaatgaagtctcccatgtctacttctttctacacagacacagcaacaatctgatttctctatcttttccccacctttcccccttttctattccacaaaaccaccaccgtcatcatggcccgttctcaatgagctgttgggtacacctcccagacggggtggtggccgggcagaggggctcctcacttcccagaaggggcggccgggcagcggtgccccccacctcccggacggggcagcggccgggcgggggctgaccccccacctccctcccagacggggcagcttgcccggcgggggctgccccccacctccctcctggacggggcggctgccgggcagagaagctcctcacttcccagacggggcggctgccgggtggaggggctcctcacttctcagacggggcggctgccgggcggaggggctcctcacttctcagatggggcagctgcggggcggaggggctcctcacttctcagatggggcggccgggcagagacgctcctcacctcccagatggggtcgcggccaggcagaggcgctccccacatctcagacgatgggcccccgggcagagacgctcctcacttcctagacgggatggcggccgggaagaggcgctcctcacttcctagatgggatggcggccgggaagaggcgctcctcacttcccagactgggcagccgggcagaggggctcctcacatcccagacaatgggcggccaggcggagacgctcctcacttcccaggcggggtggcggctgggcagaggctgcaatctcggcactttgggaggccaaggcaggcggctgggaggtggaggttgtagctagccgagatcacgccactgctctccagcctgggcaacattgagcactgagtgaatgagactccgtctgcaatcccggcacctcgggaggccgaggttggcagatcactcgtggttaggagctggagaccagcctggccaacacagcgaaaccccgtctccaccaaaaaaatacgaaaaccagtcaggcgtggcggtgcgcacctgcaatcgcaggctgaggcaggagaatcaggcagggaggttgcagtgagccgagatggcagcagtacagtccagcttcggctccgcatcagagggagaccgtggaaagacagggaaacggagaccgtggggagagg

SEQ ID NO: 30929 - DNA, 1162 bp, Artificial sequence
  DNA replication origin
gcactgtgggagcccctttctgggctggccaaggccagagccagctccctcagcttgaagggaggtgtggagggagaggcctgagcgggaaccagggctgtgcgcggtgcttgtgggccagctggagttccgggtgggcgtgggcatggcgggccccaaactcagagcagccggctggctctgccgcccgggggaatgaggggcttagcacccgggccagcggctgcggagggtgtactgggtcccccagaactgccagcccaccagcgccgtgctcgatttctcaccgggccttagctgccttcccgtggggcagggctcgggacctgcagcccgccatgcctgagcctcccaccccctccgtgggctccagtgcggccggagcctccccgacgagcgccatcccctgctccagggcgcccagtcccatcgaccacccaagggctgaggagtgcgggcgcacggcaccaggactggcaggcagctccacctgctgccctggtgggggatccactgggtgaagccagctgggctcctgagtctggtggggacgtggaggacctttatgtctagctcagggtttgtgaatgcaccagtggacactctgtatctagctaatctggtggggacatggagaacctttgtgtctagctcaggtattgtaaacgcaccaaccagcgccctgtcaaaacagaccactgggctctaccaatcagcaggatgtgggtggggccagataagagaataaaagcaggcttcctgagccagcggtggcaacttactggggtccccttccacactgtggaagctttgttctttcgctctttgcaataaatcttgctactgttcactctttgggtccacactgcttttatgagctgtaacactcaccgtgaaagtctgcagcttcactcctgaagccagcgagaccacgagcccatggggaggaacgaacaactccagacgtgctgccttaagagctgtaacactcaccgtcgaaggtctgcagcttcactcctgagccagagagaccatgaacccaccagaaggaagaaactcctaacacatccgaacatcagaaggaacaaactccagatgcgccaccttaagagctgtaacactcaccacgagggtccctggcttcattcttgaagtcagtgag

SEQ ID NO: 30930 - DNA, 1636 bp, Artificial sequence
  DNA replication origin
ggggtgcgaaggtcgaggccagggattaaagaattcgtccagggccgcccaagcgaatatgtcaggctcagggacccagcggaatgccagcccgcacccccgcaccccctcctccttccagcgcgagcaggcggcgcgctccggagggagagctggggctggaggttcctaccccctcggcggcccgcatctgcccccgcgcgcccgccctgagcccgccccgactgggcaggcgggggagcccctacttctctccccccgggcgggggagccggggggcagcgccggagcccggggggagctcagccccgccgaccggccggccagggcagggggcagctaggacggccccgggtaagcggcgggaggaggggaagcggtcaggggtggagcggggccgggtcaggggctcggggggtcgggccggggtcgggggaggaggagacggcctgggcgaggggcgtccgggactaggagggggccggcgggcgggcgggcggggaagcggcgcggggccgccacgtgagagctggagctgggggtgggggtgcctgcaaggtgctggaggcggagagcgagctgggcttctacatccccccaaactcctaccaatcaggtcatggggagcgcagcatcctctgtcgcccccagcccacccccaggcgaacgtggttggaacaaacagctggcagacttgtgacccggccctcgggatccgcgaagcccccgctctcagccttgggcagcgacccaggtgtccagacgcagggaaggggacggaaccaggcttcgccccctgtgtgtgtctctggtctcttgcctctctttccgggcagtctcttgccgggcgctgtctgcagactcactgcagagcgcaggccttggggagaaagcgctcaggggcctgggccctgcttcctgggacagccccctcccttccgcactcagccaagggtgttggattaatatactcttagatccaggacctctgcctggaaagaaggaaggggcaccgatcgcttctgagttggggacagggccacacttggacctgatgagttccaggaggctggccccagcctaggggcctcctgcacccccttcctagctcctgggtagtgcccctcttgcatttccctgccgctccccagaaagggctggtttctgggcagggagtgtggtgtccgcgacaatctgcaggtagggtgcatcctagaaatctctgagctgccacacccagagagaggccaggactcttcttggcgttccttgccctctcttcctcccctaggactccccactccccacctgcctgtactggttatgtaattaacccagctgagtctctctgccatgctggtggtagtggtgtccagggatgcctaaggggcttcgggacctggagggacacatggggaggagggataggtacttccccctagttgggagcccatgtaagtgtataaacacctgttggagaagggacactgcatggggcaggaaggagttcagggtcctaatcttagttaacaactcaactggctatgaggtcttcacttccctaagtcactgggtttgttttttggggggtttgtttgttttttaaaccttcaataaaatgagaagaatctctctc

SEQ ID NO: 30931 - DNA, 1509 bp, Artificial sequence
  DNA replication origin
agcatacagaaggggcacatcaggtagcagtctaagggcagtggcagaggcaggagttgcattgatcccagcttgggccatggagagctcaccagcccaggtagtgctattaaggagcacctgctttgagccaacagtgctagacactcagggaggaagagggagtatatacaaatgaggatggcctggctgtggccttctcaggagctcacagcagaagtggggaactggagatggaacagctctaatgaaagtgtaatagaaggattgttagaacacaggagatgaagggagtagtcccctgcttgcaggaaggatgggaaatcaggaagcttcttggaggtggtggcactttagctgaaccttggaagatagaattttaacaggtccaacacccagctcagagctggactcttagaggtacttaataaatgtacttgttgaacaaaggcctcgatggatggatgagggcacgacatggagcaaggcagagctaaactccagatgtgcacaagacagtgcagtggccctgtagatcaaacaatgtgacctgctccatcctggcttgggaatggggaggctacagctcctccattctccctgggcctggtctcctggggatggtcgggtatggaaggcttcaggtgcagtggcaggtgagagcactgcccctctgatgggaggtgtttgggggctaggggagccctcatggctgctctgaccctggtactggctggggatattgcaggagtgggcagacacctgctgcaggggactccggagtgtccacgcctacatcctggtctacgacatctgctgctttgacagctttgagtacgtcaagaccatccgccagcagatcctggagacgaggtgagaggctggaacacagtccattgccacctctgtggatgccccagtgctagccagtccctgtgaaaagggcacagtatagggacacagatagaggtatatgtgttctaagatttccacacatacactcaaacatgcatacattgtgctgttcccatttctgtcaactcatgttgggaccgtggctgtgggggtggctagagtagtgcagtagttaagaactgggacttctggaacaagacttccagggccactcagctgcatgacttgaagccagtaaacatttaagcctatgtcctcatctgtaaaatggggataacagtagaacccatcttttaggtcagttgtgctgatcagagaatataacacctccagggcttagggctgcgcctggagcagaacctacggtggtggtagtattggccaggcacagcctgccctgctgggagtacagcggttgtggggctgacagagttctgagctgcctgcctcgccccacagggtgatcggaacctcagagacgcccatcatcatcgtgggcaacaagcgggacctgcagcgcggacgcgtgatcccgcgctggaacgtgtcgcacctggtacgcaagacctggaagtgcggctacgtggaatgctc

SEQ ID NO: 30932 - DNA, 2068 bp, Artificial sequence
  DNA replication origin
tgctgatcagagaatataacacctccagggcttagggctgcgcctggagcagaacctacggtggtggtagtattggccaggcacagcctgccctgctgggagtacagcggttgtggggctgacagagttctgagctgcctgcctcgccccacagggtgatcggaacctcagagacgcccatcatcatcgtgggcaacaagcgggacctgcagcgcggacgcgtgatcccgcgctggaacgtgtcgcacctggtacgcaagacctggaagtgcggctacgtggaatgctcggccaagtacaactggcacatcctgctgctcttcagcgagctgctcaagagcgtcggctgcgcccgttgcaagcacgtgcacgctgccctgcgcttccagggcgcgctgcgccgcaaccgctgcgccatcatgtgacgcctgcgcgcccctcgggctgcaccggcactggccgagcggagggcggggccgtactgcggggctggggcggggagcgggcgggaaatggaactgtgacggtcccggcctgaggcccctgcagccacgcacctcccggtgagaagcagagcgcgagagggagccctccgtaactgcccagccctgccccttgcccccgtggcttcctgggacagccgccttcagtgctgtatttagtgcagtgcccggcccgacccgcgggggtgccacagccttttgggatgggggtgagcgtgcaatggaggctgggggtggcgaggtgccgccttggccgggcccccacgtgtcttctccagaatgtgtctgtctttgcctggtgtcttcctttcccgtgtccgcccaccccagcgtctgttggtacttacctgtctcacctaccctccagtcccctcccagctccgctcacagggctctcatttcgtccatccccttgtcgcagatcctggcagcttctttgtgaggccaggccttctgactgtcagcaccaccggcacagggcagagatgcgggtggcccaaggaccacgatcaaggggtccgggggaccgaggtcccagatcagtgaggggagaaggttgagctctccggcttccagggagacctccccgcccagcagcccccagagacacaacaacctaccttccagccttaactcgatggtccgtccctgccaggtgcccctcactcttcctgaccccaaagccagatcaccccctgggttaaaactttttttcttttttttttttggacagagtgtggaaagggagccccccaaaggatagcttctttttcatgatgccaggctccagtcctttattcccttctgcatactgcaatctgatctgtcagactggggaatgttgggttctggggtctggtcgtgggcaggatggtgcccagaagggggttaggttgtcccagtgaaaattctgttgccccgtctcaaccccatctgactaccccagactctgcctgcctcagatctcagactatcctgattaatctggggaagaacagagccagggaaagaatggtggggacccctgtacttgggggagacacacctgcatcttcctcctgccacagatggaggccctcaggatctgacaccctcttgtcccaacaccagtcagccctataccctaactcactccaccccattttctccggctgcctggccgggtttctacctctcgtcaccggagctgatcactgtcagttttgtaccgatttagaaataacaataataatgaagattctaggaatggcatgagggattgatgggggacttggagggagggacaagtggtgccctgtcccctgctcccctggccaaagaaagctgtccttgaggctgagccctcagccctggcctggtggggggacagcaaggtcccttgttataagaggggcagagaggacaactccgctttggccaacctagccaaggctgcagcatatagaccaggaaatcaggtagcccagactggtgatggagcagagtctgggggaagggtcgtgggtggggaatttatcaccaacatccattgtagggggaatctatgattctgcttccccagcgga

SEQ ID NO: 30933 - DNA, 1430 bp, Artificial sequence
  DNA replication origin
tgctgggttggtaagaacgcctgagaaatgacatggccattaattactacgcgtggttagggttgaggctcagagtggaaccgtgccttaaagccacacagtgaattcgggtcagggtggacaatggagctcaagaagggggtgggttagtgggggctggagtgggactggggagaggagcacgaaggacaaagggaagggggccctgagggcgtgtgcagagcccctcaccatctggtccaggttgcggaagtggcagggctggcgcctggggggcgctggcggcgaggggtcgggcgggggcagggccagctcccgccgcacctcctcctcgatctcctcctccagctgcacgagtgtgggcgccgcaacaccaaagcgccacgcccggcggcccagctccagcaaacacagcaccacgttcttcacgttcttgcgcagcaccaagtcctccgtctcgaacatcagcacctctggagtggaggcggggagaaaagggcagaggcagcgtgagcccccagaggacctgagcctccggggcaggggctagcggggaggaaagcactggggtcatccccggtctggggcagcagacatggggagtggtttgggtctcagaatcttggggtcaagtcagccccctaggaggggtctgggcggaattgctcaggtgctgggtacagacacgcggcccatctcacaggagaggctgcgggtgagaagaggtgacagcaaagcaaagggacctggagactggctgtgactgtgactgtggatgagagaaggatgaactccaccttcccctctccccactcagcttgcctggatgggtccaggagcaggaagcggtttgttccactttccacccacgcctctctcctcctatctccaccaggcatctcaaactcagctcccacccaggcccaaccaggcatgctgaggacatgctctggagccaaccactaagtctggagtcctgacttattaccagccgcatgaccttgagctagaccctgagcctcagtttcctcttctgtaaaatggggatgtagtctacttcgtggggttgttgtgaagattggatatgctcatagttgctaaccattcacaatgtccggcacatgcaagcattccttaaagcactagcttctattaaccttccaattctgttcctcagtgcccagccaccagccagtagcccaggcctgaccctttccccagtctcacccctgccacctttggcctggagaatggcacaacatccagtctcatcccattcctggtttcaaggccaatgagatgaaggatcctgacatgtcactccctgagccctacaagccccagcatgatggagcccctccctggcgtcatcccatctgtctcctcccatgttctctcctcatcctagccctgtgccctcaccaccagcc

SEQ ID NO: 30934 - DNA, 2390 bp, Artificial sequence
  DNA replication origin
ctggctctcccaattccccacagggggtcgatgctggaggttccggggccccaagccagtgtggggtctcccacagctgtgccgggcagggggcctgccccgccatcctgacgccgccctcttcttccctcctctgcgccgcctcatcctcttcaagggtgcccgctactacgtgctggcccgagggggactgcaagtggagccctactacccccgaagtctgcaggactggggaggcatccctgaggaggtcagcggcgccctgccgaggcccgatggctccatcatcttcttccgagatgaccgctactggcgcctcgaccaggccaaactgcaggcaaccacctcgggccgctgggccaccgagctgccctggatgggctgctggcatgccaactcggggagcgccctgttctgaaggcacctcctcacctcagaaactggtggtgctctcagggcaaaatcatgttccccacccccggggcagaacccctcttagaagcctctgagtccctctgcagaagaccgggcagcaaagcctccatctggaagtctgtctgcctttgttccttgaagaatgcagcattgtctttgtctgtccccaccacatggaggtgggggtgggatcaatcttaggaaaagcaaaaaagggtcccagatcccttggccctttcctccgaggacttctatcctccccaggcctttgtttcttcggctaaaggtacagttcctttcaagaggtaacagcactgggatccaagcagggggatgaaaaactcagcagagaaattcgagaccattttgcaagactgtgcccttctcctcaggaccccctggctcagttcttgaaaaacggtgtcatatttagtcagaggccccacccccaggaagcatggatggggatgaaggcacaggcgtctccaacctcagaggccctttgtggggtcaggacacagagtgggagggagactgatgcaggcctaccagtccctggctttttgtctggggctggaataaagaggtgccttcagctggtgggccgagaggcaggaagcagccttccttggagcagttcttccatcctttgctgtgagagcaggtgggcatgggtgcaggggaggccagggccatgctcttccatccaagccagggctaggcagctgtgtgtgtgtgtgcagagctgtgatggagagaaggggcctgcctctcctcaaaaagcaaaatgtccttgcagctccaggccagatggagaatgatgtgcagcagggagaggtcaaggggccttcctggggctctgcaacgctgcaggcgctggggatgcagcctccacaacaggcagccctgcaggctgagggtggccttgtgctctcacagtggccgcattctccaggccacacacgaggcattcccaaagctcctgctgtctggccaagaatagctgggattcctggagaaggaaccagctccccagcctccctgtcttctgcctccacccatgccagcatttattttagcatctggttttccaggcttctcccacccctccacacctgctagtgcctcatatgcacagcactgacctcagcaagccagggcgtctagggcaggcgagaatggtctggcaagggttcagccctcacctccccagggccattgttggccctgcccgttcattttctcctctgcgcagtgggcagaagggcctttgcctttggatacaaatgtttgtaccgttctggggtagagagggaagaggctccctgcccacacttttacctctggcttgaaccccaggaggatcatccccacccggagccacctgcgccacctcaaagcactgacactttgatcagaggttttattgaatggtttcagggaaagaggcaggtttgtcagagggatgagggaaccctgaggttattttctctaggcgatgcctctgcccactgggccagagcggatctgaaatacccaagaggtgaaggtgaggctgtgtgagcggacagagtcaggtgtgcggtggcgctggtgctgcgtgggggcggggagccctcggtgggcgctgttgacagcgggctctaggttatgctgggctctgcactgggggcgctaggtgacagatgggaaccaagcaccaacagtgggccttcttgacggatgggggcgctctgggcagcagctgagaaggggcggtcctgcggaatgcgtcgaagagggctccgcgctccaagagagaaggtcggtagggggtctggggccaggaaatgatggagggcacaaaggctgggagcgggggcgctcaggagttcccagcggcccccgccttacccagatccgggtgatccagaacgcagtgcgccacataggctgggtggctgtgcagactcctg

SEQ ID NO: 30935 - DNA, 1039 bp, Artificial sequence
  DNA replication origin
ttcacttatgagaggagggaagcagagtccaacaagcttattatttggtaccatcacctgaatcccagtctgcaatttcctagctgcatgaccctgagcaagttacctaacctctctgagccccattatcttgatctgtggacaaaaagatgcatacttcatgggtgtgttgcatgtcaagtgcctggcccacagtaggtactcatgaaatagtagctgttagtattacagggtataagtttctcaggctacaaagcatgctcatacccagtagcacaacagccctgtcaggtaagcaggacctcagttgttatctcttttcacagaaggtaaaactgagggttcacagagggaaaatgcccaagagcatctgctaatcagggatggaaggtgacttgaacccaggcctcctggctctgcccatggcactctgagggagacagccctgggctgagatagatcccagggcagtagcactggcccaccctggggaagaagacctggtctgagcccaccaccaggcagaggtgggcaggctttggggatagggggcatcagcatcgtggtgagagaaaggctcggggagagctagtggctggggcaggaatgaaggctttggggtccgggatgggggaagaggtgggcccaaggattgggtatgggtgatggggcgggcacatggtgtgagcgggagctgcgggggctgggggttgggcagaaatccagtaagtggaacgcaaggggcggggttgggggtactgtgcacaggaattagttgggactgatggagagatgagggccatggactcgggggagcaagaatccgaggtttttcagatttgaggaggggcatagggctttagaattgggacgaatcggcgacagggaggccagatctatgagcttaggatgggaaatcctatttgcagagccggcgttcaaggacaggaggccttgggggcaggagtgggaccaagagcggggcatgtcccggggcctcaccatacaggctctgcacggccagcacgtcgtcccagct

SEQ ID NO: 30936 - DNA, 1316 bp, Artificial sequence
  DNA replication origin
cacaggaattagttgggactgatggagagatgagggccatggactcgggggagcaagaatccgaggtttttcagatttgaggaggggcatagggctttagaattgggacgaatcggcgacagggaggccagatctatgagcttaggatgggaaatcctatttgcagagccggcgttcaaggacaggaggccttgggggcaggagtgggaccaagagcggggcatgtcccggggcctcaccatacaggctctgcacggccagcacgtcgtcccagctgagcagcgcgtcgcggcccagcctcttgtagtagggcgccatgagcgcgcgcggcgcgggcgagtgggtgaggccaagcgtgtgaccgatctcgtgcgccagcaccacgaacaggttgcgcccgcggcggcggctcagggaccagcgctcatcttggtcgaagtgcgcttcgccgcggcggggcaggaaggcgtgcgccagggcgccccctgcaggtggggcagaaggtcagggggtgccacggcccacgacgcccccaggtactcgcggcccagcgcaaatgccactggggtgtgtgtggctgttctctgctgtatagtttccctcctaaaatctggcagaacctgaagtgtgcagaggtgaacagtaggctctgcactacttcaggtgagtagtgcagtggacgatgagtaggctgtggacgcctaagaggcactgtggtgtagatatggcatgggcccaccaatttgggtgccattcctacttttacaatctactagctgtatgaccttcagcatttagcttaacctctctatgtcttaacttcctgatctgcaaatgggaatgatgatggtgagcttcttcctcacagagttgttctgaataataaatgtgtgtgtgtgtgtgtgtgtgtgtgtgtgtacatgtgtattacaaatgatgcagcagggtgtggtagctcacgcctataatctcagcactttgggaggctgatgtgggaggaacatttgagcccaggagttcgagaccagcctggggaaacaaagcaagacctcatctccactaaaaaacaaaaacattagctaggcgtgatggtgtgcacctgtagccccagctacttgggaagctgaggtgggaggctctcttgagtcccaggaggtcaaggctgcggtgagctgtgattgcgccactacactccagcctgggtgacagagtaagaccctgtctcaaacaacaacaacaacaaccacgaaacaacaacaacaaaaaagtgatccttggaacagtgcctagcacgtaataagggccacttaagaatt

SEQ ID NO: 30937 - DNA, 1046 bp, Artificial sequence
  DNA replication origin
cctccgcgctccgcgggctgggcgtccaggtggccccacagtagcagctgcagggcgcgcagcaggaggccgacgcgcgcgaccatctcgccgcctccggtgcagcccggctcggggagctactgcgcgcagggaaccagccggcagtcagccgcgcccgggaccccggggatgggactgctctgcgccgcccccgcacggagagggactgtcccggggtttcgccagtgccctagctgcgcgctctgggccgctcctccgctgcccttcgccgggagccggccagacgtcgtccagcccgggcagtgcctgcccgcgggtccgccggccccggggaccgagggagggaggaaggaaaggcaggcggagggggcggaggcccggcactcccgccccacccaccccgcgccgctgctggaacgcgaggcggtcccggagcctcttccgttcgctgcacagcctcgccctgcgcccgccaccgccctgcggatcggtcctctcgcccgccacctccagttgacccggatctgtccagggagggtgaaggaagaaaggccttctcctggcaagcgtggctacctaagacttcgatgaagagaggtcctggtctaccagagggtcgttgattgtttcagctgggtggggagcgaggcccccacccagggtcggggtgcgagagaagcagcacagagctggagtcagaactgggtttgagttccagacttgctcctttgctagccctttgagtcctgcctcagccacctgctggctgtgtggtcttggaccagtcactcaccctctctgaacccacttttctcatcagtaaatgggataataagaataccgatattctgtgactgttggggagataataacgcctgtaaattactgaacagggtgcatggcatcacgaagtgtgcacttaataaggggcaggctgcagctgtgtgatctttggcaaaggatttaactacttcgagcgtcagtttcctcatcaataaaatgacagcatacgatatttagtgcccagcgttgcatgaggatga

SEQ ID NO: 30938 - DNA, 1708 bp, Artificial sequence
  DNA replication origin
cagcccagcttctttatttctattggattcatattcttgtcttttttctttttctgttttgtgggtggatgttactgtggcctttgcattcatattcttacatttggagtttttgtcttctcacctaatcttcttcatggagattctcaaactaagtagggtataggttaggcatcctaagtttgaaaatctgaaattggaaatgctctggaatccaaaactttgagcaccgacataatgctcaaaggaaatggtcatggtcattgaagcatttcaggttttgggtttttggatttgggctgctcaactcgcaagtataaggcaaatatttcaaaatctgaaaaatccaaaatcagagacacttttggtcccaagtatttgggggaagggatactcaacctgtattacagaaaatggactttgaagttttctagtgcattatttgcactgtgttgtgtgcctagggtctgttttcaaggtcctctgtttactaagtacaagacccaaatcaaagaattacaaagtcctggtataaggggttaatttgcagagtgctgcctaagtattgatgggtatctactcttatgttatctgatgcttttcttctgttttgttaatatctgctgctgatttttctcccctggccccatccccctaggccgtggaggatatagaggtcgtggaggctttcaagggagaggtggagaccccaaaagtggggattgggtttgccctaatccgtaagtgtcttgtttactttggtgagagtaggggttgggattggggctgtggaggatacagaaaggggttctgagtccattagaaactatataggagcattatattttcctcctttcttaggtcatgcggaaatatgaactttgctcgaaggaattcctgcaatcagtgcaatgagcctagaccagaggactctcgtccctcaggaggaggtgggtcagccttttaatagcatctgcatcgtgcttatcttctgactagcattaagggggctttacgttgtttctgctggcctcattgtttgcatttctaccttgcagatttccgggggagaggctacggtggagagaggggctacagaggtcgtgggggcagaggtggagaccgaggcggctatggtggagacagaagtgggggtggctatggtggagacagaagcagcggtggtggctacagcggagatagaagtgggggcggctatggtggagacagaagtgggggtggctatggtggggacagaggcggcggctatggtggggacagaggaggcggctatggaggagaccgaggaggtggctatggaggagatcgaggtggctatggaggagaccgaggtggaggctatggtggagaccgaggaggctatggaggagatcgaggaggttacggaggagatcgaggaggttatggaggagatcgaggaggctatggaggagacagaagccgggggggctatggaggagaccgtggtggtggcagtggctacggtggagaccgaagtggaggctatggaggagacaggagtggtggcggctatggaggagaccgaggtgggggctacggaggagaccgaggtggctatggaggcaaaatgggaggaaggtgagtattagaatgtgtttattaacctttttacctcactgcacctagattgggggatttgaaccacattttaacaattttttggaac

SEQ ID NO: 30939 - DNA, 943 bp, Artificial sequence
  DNA replication origin
caggggggaaactgtccccagatcccatcccctcccaccaggttcctcccttgacaaaggaggattacaattccagatgagatttcggtggggacacagagcccaacctgtgagggtctcaatctatcttgtagctcccctggggctggggctgagtacagttctgctggccctgctctacagcacgtggggactcttcctgtgtgcccccatctgctcttcctggggatggtggctgcttcctcaagaggagggtggatctgctctcctgcccacccctctccagggccttttggagccctggccacgtcctccctgggtaagggcaggaaaccgggctccttgcccttcttgctgcttgggtgacaatcctggggtcatccataggccccatcactgttcccgcttctaaatggagggtattttggcacatcttcctggcggggtccggggcctcatccctgttatttattctatcttggtaaagccaggttaagacatctgggcaaggagatagtagagtggcccccaggaagggtgggtggagggcctggcctttgggcttgcctggagcagggtgggagggggcaaggttaccaggaagcagggctgtcagggccaaaatcaggaggcggtgataatgctggtggggggacagggctgtgtgcttggcttggggtggggcatgagagccaaggtttgtcagcacgcagaggggtggctgactcatggactaggggctatggaacccaatggctgcccttagttcctggatcctgggagacttctggagcctgggtgtggggcagcctaggggtggaggtggggcagacaggggtaggggtaggagaggaggacttgcatggcagggtgcagggtaggaaaccagccaggggccagtttgcattggcggctcccatccccatccccacccccaagccca

SEQ ID NO: 30940 - DNA, 819 bp, Artificial sequence
  DNA replication origin
ttagttcctggatcctgggagacttctggagcctgggtgtggggcagcctaggggtggaggtggggcagacaggggtaggggtaggagaggaggacttgcatggcagggtgcagggtaggaaaccagccaggggccagtttgcattggcggctcccatccccatccccacccccaagcccacccctacccccaccctgctgcagagatgggcctgggctgctgtcctctgctttggcctcagcagatcacacgatggaagctggcagccccgtgggcaccactcgagccagctgtgacctgcagtttctgcttcctggagtgtggggcgcccactcaggagagcacggcacaccccacacccctcattttgaggatgctgggaggtggggaccaaggtcctgcagccctctgcttgcgctatgaaaggtagcctaggagtcctgtgtccgcccatccacgtggggccccaggagcctgaacagtggcaggcagagagatgaggagggtgagagaagtggaaaagaaggagagagaaagagagatggggagaagggagtgagatagagagaggatgagagataaggagagagacagaggaggctgagaggaaaaggagcgagagagacaggcagagagacacaaaaggcaaagagagagacagggagagacgagcatgagtaggaggtcgggtcactctcgatcccagtccccagtgaaaaccgtaggtcgccatcacctaactacgcgtgcaataaagtcttctgcctgctgcttacagcccgagaacccttttccgagagaataaaatctttgaccgt

SEQ ID NO: 30941 - DNA, 1889 bp, Artificial sequence
  DNA replication origin
atggggctcggggctcggggctcggtccgggaggaggggggtcctttctgctccaggacagctggcgcgaccggtgggcaaaggtccgcggccctggagaacgccacggcggggtccacggacaccagaggaggaaccgccaaggtttttccaaaggacaagcggcccggcccggcggtcctcctagttcttcggcccgcgcgccacccgggaggccgaaccggccccagcccggggccccctctccagcccgccccagccccgaccctccgctgcggggccctcacggagcggccggccagcggggagcgactaggctgccggctgcaaggcgtgtctccccgggacgcagctccgcccttcccaggaacacaagcggctgcccgcgcctgagctcccaaagggctggcgggcagggagcgggcgccgcgccggctccccggagcccagccccggaaacgggacacccacagcgggtgcccccaaacttcccacctctctggtccggtctggggaggggtcggggccggggccggtgggcagggcgcggagagctcatggagctcttagggtctgcggccccgcggctgggggttatgccaagggagaaagcgacgacgcgatggggagggaccgagagcaccccgaagccgggaccatcaagccggagccagtggaggggcgcgaagtcggcgagttggaaactaactgcaatcgtccactcgtagccttcggcgtccggctcgtcctctggcggcttggcgggcggctgcacagggctggacctgtgttggatcctcaggctccgaagatatggtccccatcctcgtcgtcgtgacactcgggacaagtggagagccatcaggacagggacccacagaacgcacactcacatgttcctgcaggtgccagcacatgctgggctccgctctcacgggacacacgcaggtgtgcaaggacaatgcaagtgcacacacacatgtgcagacacgtagtggaagcatccactcgctcacacctgtaggacacacacacacaaacatatgcacacatacagagttggttgaggatgctgtaacacagtacaccccctaatgcacgtgcgcgtccccgcgtgcacacacacacacacaggtgatccagggcacccagggcagaatcttccccaagcacccctaacaagaagcacaaacatgcacccatagaagtaatcgggggaccctgggcacaactccctctctccttccccatctaccaggacatggagtcacactcctaggcatgtgtggacaggctgcctacacactggcaggacatgtacatgctcaactttacaaggacactgtgggcacactctgcgcacacgtattctcaggtcacatgaacacagcactttgtaacctggagtcagtccctcacttggtcagtgagtgggctgaagcacccactgggacaaggtggctgagaaccaggacagggcctggtcaggaggggttgagggcagggcctgggaagtgagtgatgcaatgaggttgggcatgatggcattggtaccaccccccacccaaccacccactgcaggcctcccacataatcgggtcactaaacaaatcccagagggcccagccccacctgttgcctggctttccagaaacagaactcggttgggaatggttgctgcttggacaggtctgtccccagaaagccctgggcatggatggagtcctgtctaccctctggtttccactgacacatttatctaccaacattctgtccaagtctcctctttggagccctcaccagaatcacccttaatgaagagtcacagggagaagatgtccacccacgcatgaggagacaggcctggaacagagccttcctgcacagcc

SEQ ID NO: 30942 - DNA, 1388 bp, Artificial sequence
  DNA replication origin
ccagccctttgggagctcaggcgcgggcagccgcttgtgttcctgggaagggcggagctgcgtcccggggagacacgccttgcagccggcagcctagtcgctccccgctggccggccgctccgtgagggccccgcagcggagggtcggggctggggcgggctggagagggggccccgggctggggccggttcggcctcccgggtggcgcgcgggccgaagaactaggaggaccgccgggccgggccgcttgtcctttggaaaaaccttggcggttcctcctctggtgtccgtggaccccgccgtggcgttctccagggccgcggacctttgcccaccggtcgcgccagctgtcctggagcagaaaggacccccctcctcccggaccgagccccgagccccgagccccatggagcaggcaagcgccggagtcccgaggctaaggcccggccggcgggcgctctggcaccttttcccgcccccgagggtgcctgtccggcccggccgggactggctgggaaaccgaggccggaagaggtcgcagtccagcaaggaatcggtttgtgtggggtgggggtgggatgggagacccctccccaaccccaccagccccagcccagctgtggcccccgccgtgtcactcagaaaaccagcgtcaaaccccagccctgcctgggatgtggaccttgcctggggagagtcccgttcaggcttttccagggcctctcccctgagcaacaggggtgtctgcgctgggcctgggcactcaccagggcctgcaggctgccagtctggagtttccctagcatcaaatgtgccaccggaagctgaaggtggggatgaccagtgccccccggagcgaagacccccccatctctccaggattgggggtctgcttaggggtccacttaggggtgtatccctcaggcattggaagtgcagatgggaggccctgagccatggtggctcccccagtccccagttctttctctgtgtaaatccagctttgcagggacggggatgtggtgcctttcccggaagagccggggtcctggggcgtggggaggctggggctgggtcgtggggagctgggactggggtgtggggaggggcccagggtgagcaagctgaagcaggactggcacaggcctctggagggcctgggggaggctggacgccccggggtgcacccttgcttgtgcactcttctaagggtcagtctcagtttgcccatctgtaaatagggttgattgtccctgccctacgtggctgttgtgagcattcaatgagcactaccagtcctgggagactcttggtgttttttattgtgctaaaatacacaaatataaatttcccatttcaaccatttctttttgctccttcactcccc

SEQ ID NO: 30943 - DNA, 985 bp, Artificial sequence
  DNA replication origin
aaccatcagctctcctgagaactcccgcactatcaggggagcagcaggggggaacctgtccccagatcccatcccctcccaccaggttcctcccttgacacaggaggattacaattccagatgagatttgggtggggacacagagcccaacctgtgagggtctcagtctatcttgcagctcccctggggctggggctgagtacagttctgctggccctgctctacagcacgtggggactctgcctgtgtgcccccatctgctcttcctggggatggtggctgcttcctcaagaggagggtggatctgctctcctgcccacccctctccagggccttttggagccctggccacgtcctccccaggtaagggcaggaaactgggctccttgcccttcttgctgcttgggtgacaatcctggggtcatccataggccccatcactgttcccgcttctaaatggagggtattttggcacatcttcctggcggggtccggggcctcatccctgttatttattctatcttggtaaagccaggttaagacatctgggcaaggagatagtagagtggcccccaggaagggtgggtggagggcctggcctttgggcttgcctggagcagggtgggagggggcaaggttaccaggaagcagggctgtcagggccaaaatcaggaggcggtgataatgctggtggggggacagggctgtgtgcttggcttggggtggggcatgagagccaaggtttgtcagcacgcagaggggtggctgactcatggactaggggctatggaacccagaggctgcccttagttcctggatcctgggagacttctggagcctgggtgtggggcagcctaggggtggaggtggggcagacaggggtaggggtaggggtaggacttgcatggcagggtgcagggtaggaaaccagccaggggccagtttgcattggcggctcccatccccatccccacccccaagccca

SEQ ID NO: 30944 - DNA, 840 bp, Artificial sequence
  DNA replication origin
ggaacccagaggctgcccttagttcctggatcctgggagacttctggagcctgggtgtggggcagcctaggggtggaggtggggcagacaggggtaggggtaggggtaggacttgcatggcagggtgcagggtaggaaaccagccaggggccagtttgcattggcggctcccatccccatccccacccccaagcccacccctacccccaccctgctgcagagatgggcctgggctgctgtcctctgctttggcctcagcagatcacacgatggaagctggcagccccgtgggcaccactcgagccagctgtgacctgcagtttctgcttcctggagtgtggggcgcccactcaggagagcagggcataccccacacccctcattttgaggatgctgggaggtggggaccaaggtcctgcagccctctgcttgcgctatgaaaggtagcctaggagtcctgtgtccgcccatccacgtggggccccaggagcctgaacagtggcaggcagagagatgaggagggtgagagaagtggaaaagaaggagagagaaagagagatggggagaagggagtgagatagagagagagaggatgagagataaggagagagacagaggaggctgagaggaaaaggagcgagagagacaggcagagagacacaaaaggcaaagagagagacagggagagacgagcatgagtaggaggtcggatcactctcgatcccagtccccagtgaaaaccgtaggtcgccatcacctaactacgcgtgcaataaagtcttctgcctgctgcttacagcccgagaacccttttccgagagaataaaatctttgaccgtt

SEQ ID NO: 30945 - DNA, 1189 bp, Artificial sequence
  DNA replication origin
gagaaggcgcctcagggaaggggtattagtttgttttcacactgctataaagaaatacttgagcctaggtaatttataaaggaaagaggtttaatcgactcccagttcagggaacttacagtcatggcagaaggcgaaggggaagcaggcaccttctccacaaggcggcaggagggagtgagcggagaagcaggaagtgccacactttcaaaccatcagctctcctgagaactccctcactatcaggggagcagcaggggggaaactgtccccagatcccatcccctcccaccaggttgctcccttgacacaggaggattacaattccagatgagatttcggtggggacacagagcccaacctgtgagggtctcagtctatcttgcagctcccctggggctggggctgagtacagttctgctggccctgctctacagcacgtggggactctgcctgtgtgcccccatctgctcttcctggggatggtggctgcttcctcaagaggagggtggatctgctctcctgcccacccctctccagggccttttggagccctggccacgtcctccccaggtaagggcaggaaaccgggctccttgcccttcttgctgcttgggtgacaatcctggggtcatccataggccccatcactgttcccgcttctaaatggagggtattttggcacatcttcctggcggggtccggggcctcatccctgttatttattctatcttggtaaagccaggttaagacatctgggcaaggagatagtagagtggcccccaggaagggtgggtggagggcctggcctttgggcttgcctggagcagggtgggagggggcaaggttaccaggaagcagggctgtcagggccaaaatcaggaggcggtgataatgctggtggggggacagggctgtgtgcttggcttggggtggggcatgagagccaaggtttgtcagcacgcagaggggtggctgactcatggactaggggctatggaacccagaggctgcccttagttcctggatcctgggagacttctggagcctgggtgtggggcagcctaggggtggaggtggggcagacaggggtaggggtaggagaggaggacttgcatggcagggtgcagggtaggaaaccagccaggggccagtttgcattggcggctcccatccccatccccacccc

SEQ ID NO: 30946 - DNA, 780 bp, Artificial sequence
  DNA replication origin
gaggctgcccttagttcctggatcctgggagacttctggagcctgggtgtggggcagcctaggggtggaggtggggcagacaggggtaggggtaggagaggaggacttgcatggcagggtgcagggtaggaaaccagccaggggccagtttgcattggcggctcccatccccatccccacccccaagcccacccctacccccaccctgctgcagagatgggcctgggctgctgtcctctgctttggcctcagcagatcacacgatggaagctggcagccccgtgggcaccactcgagccagctgtgacctgcagtttctgcttcctggagtgtggggcgcccactcaggagagcacggcacaccccacacccctcattttgaggatgctgggaggtggggaccaaggtcctgcagccctctgcttgcgctatgaaaggtagcctaggagtcctgtgtccgcccatccacgtggggccccaggagcctgaacagtggcaggcagagagatgaggagggtgagagaagtggaaaagaaggagagagaaagagagatggggagaagggagtgagatagagagagagaggatgagagataaggagagagacagaggaggctgagaggaaaaggagcgagagagacaggcagagagacacaaaaggcaaagagagagacagggagagacgagcatgagtaggaggtcggatcactctcgatcccagtccccagtgaaaaccgtaggtcgccatcacctaactacgcgtgcaataaagtcttctgc

SEQ ID NO: 30947 - DNA, 1216 bp, Artificial sequence
  DNA replication origin
aaaatacaaaaattagccgggcgtggtggcgggcacctgtagtcgtagctacttgggaggctgaggcaggagaatcgcttgaacctgggaggcggaggttgcagtgagctgggatcgcgccattgcactccagcctgggtgacggaatgacacattgtctcaaaaaaacaaaaaaaaaaaacaaaaaaaacccccaaaaagtaaaaatgtttttttgattttacctataggtttacaatttttggtactcctttgtgcagatccaaatttccatctcatgtcattttccttttgcccgaataactaacatttcttgtagcgtagatctgctagtgaagaatcctgttgggttttgtctaaaaaaatctgtttcttgtcctcatttttaaatgataaggaaataaacctggggtctcagttcctcttccccgcccctcactgagcagagttcttatgcactgctgccatgtgggaggtggagatgggttcagaggtttgtgaaaagcttgacgcgctgcacgcccactccacagggcacctttagaggcttcttggggaagctggtcgggtagctctgactcctcgcatctctgtgtgtccttgggaatgtcaggtggaagatcgatgtgcatttgcaaatgggagtgagtgtgagaaaagaaaaatgtggggttgtggctggtagggtgtgttcagggagcaatggtgacctctgttgtctgtgctctcccaacagttctgggattgtggggaatgcaattgttctgtatcccttttgtattttggaagttctccgtgaagtctaactgcaggtcatattgtcatttagtctagagttggaggatggatataatttcatgagtatgaaataatatgcagagttgttggacaccaactgggcccacccactccaccagaactcaggtctccttcatttgactcccaccggcaacgtcactcactttaacacctgaattactctctcttagataccagaggggaaacggaggcatgcaggtgagaacgtggcagcagtccctaaaagtcacttctggtgctggccctggctcatccgtgccctgggggagaaatgcaagtgtcagagctgcggaaaggagctgagatctagcagggctcgcccttatcaacctccgcctctaacaagggccacacagcacgtaggggagattaggccgatctgcctgcctcatcgcgg

SEQ ID NO: 30948 - DNA, 1239 bp, Artificial sequence
  DNA replication origin
tcgaccccgcagcggctctgcggagtccagggaacggggaggctcagaccctttcctcacccttctcggaggaggctgtcggttccgaccttcaccgttttcgtggtcgcctcgctaactcccacctctgctccctgttactggctgacgaggcccgcgtcagggccggcgtgggcgggagcgcagctccgaatgtcgtttcctctacgggcagtcagccgctcgcgccgcggggagtggaagaaggagggcgggggacgaggggaaggtggggccgggcggggtcgggcgccgggcgggacccacgtcctctcgcgagactggggctggccgcgctggggaccccgctggagaaatttgcgcccagagggtgcggggccgccctggccgtcccgcccgtgggcccggcgcccttctcggagcccagccattccgctagacccgaactaggactggtaggaggggtgatcggcccaacctcaggccccagccgcgggccgggaaggcttccccacggacgaggggcaagcccctcgacgtcagggtgtcgtctatgtagaggggaatctgcctcctctcaaaggggaattctttcagcgagtcaagcccgtctgattcggggctgactcagggcagaggcccagagaggacctggataggttgcgagaagtcgagatcagagggggcggaaggcagtgagaaaagggagacgagcatcggggggtgagagacaaactcaggtctggctcttggcccttgacgccactgaattcgcttcccacggtgggaagaggagaaaagggccctgacaccgcggctcgccaggggcccgctgcgtagctgcatcccgatcccgctgaggggacagcaaatagtgaagtgctgatagcttgtggttgtcgttacactggaaggaaatagaaaaccggacagtggtgtgtgtgtgtgcgtcttggccaaaggaacttcttgggctgggttaatgtgagcaggtactcccttgggcgaagtactggcactggccaacggcctttccctctggccgtctccgaggaagcagagctgctgtgaagacagttcctctcgccaccgtgtgttcagttctgaccttgaaggttttggaggtctgttgtgaagatatttagcctatgaaagtcctggtgatctgaaggacagatcaatttactgctctatttcctggagctgtgatacctttaaaaaaagtattttgggtcgggc

SEQ ID NO: 30949 - DNA, 1597 bp, Artificial sequence
  DNA replication origin
ctgactgcccgtagaggaaacgacattcggagctgcgctcccgcccacgccggccctgacgcgggcctcgtcagccagtaacagggagcagaggtgggagttagcgaggcgaccacgaaaacggtgaaggtcggaaccgacagcctcctccgagaagggtgaggaaagggtctgagcctccccgttccctggactccgcagagccgctgcggggtcgatccctcccaggggcggggtcgcgctgggcaactgcagtcctggggccgactgggcggggtgcgcccagaagcggggagaaggggtcagttgggggcagagggcacccgggcggcgggcggcggggaacaggctgcggggcccaggccaggggtggggtcctggggccgggactcctgcagcgggcggggaagcccccggcaggccggtcccttccgcctctcctttggaccctgactggaggccggcgggcgggcgggcgggcgggagagagggagggagcgcggcgcgaggggggcgggtcccggcggcgctgggcgctgattggctgagcgtgtgtggaatcgggtgatgggaaacgcagcccggctctcccgtaccctcccgctccgctccctgccccccgtggcgaatgtgctgcgcagcggcgggtgcttacgctcgcggggtttggctgttgcaggcaggagctgggaggaggcggcagcggcggcggcagaaacagcagcggcggcggcggcggcagctgggaggaggtggtgacggtggcaacggcagcgtcggggacgatggcgcgactcgtggcagtgtgcagggacggggaggaggagttccccttcgagaggaggcagattcccctctacatagacgacaccctgacggtgagcgggccgggccgggctgggcccgccgctcccctggcagctgtttcccctcctccccctcccccaggccgagcgctgcgcactggagaaagagtgtgttgcaactcctaggcgaggccttctcttcagcaggccccacaaactcgcctttgcagtgggtggctcggtaacctctgtcggccccaagcccagagctccgtacgcactccctctctccagattttccttcttttggaaccttattccttgaccctttccctttaggagacgctgcttttgtcaaagcacacatctcagagaggggttgaaggatcttgggcgtttagggcctaccccatacagaaaccacctaccctcggggaggcttaattacctggtaatgtcgcagctgcactgctacctgtgtattttctgttttaatactggtagctctcaccacataagcttaattactgggggcagagtgacatgctcgtgcacagtcaagattccactaaaatggtttgatttcgttgtaaatagtctcgtattgcctaatgcattaaaactcttgaaatgattgtattgctaggccctttcttcaaaacgggctttcttcgcattatttagtttacaggtggacttttttttttttaaaggaagccaaattattgaatgtgtaagagtactataaaaagctgattgctcatcttgagtgtcaagacccagttccgggt

SEQ ID NO: 30950 - DNA, 1788 bp, Artificial sequence
  DNA replication origin
gaccggctggcgctggtgacgggggcctcggggggcatcggcgcggccgtggcccgggccctggtccagcagggactgaaggtggtgggctgcgcccgcactgtgggcaacatcgaggtgaggccgggccgagggcggggacgtcgcgggcgggtcgtttccccggagtcgggttcacctgcccgccacgccggggccctttgctctagtcggggcggcctctcggatcccttaaggcaggcttctcccttccccttaagtctcatctttgaaggagccgtttgccctgacagcccctgctcgagttaccgaatctccgaccccggcatctccccacccgcccctcgggtctccccagggtattggcccgaggaaggggaagccggaggtcgggggtggtggtctcgcccctgtggccttctcgcccccggcggccaagtgcctctaatctccagaagtcacccaccacgcagggcaaggtggctggccaaccagatgggcaggagccaggactgaggttggggttggggtgggagctttactgaagagcctcagccccgccccctcacctcgggggtaactcatgcccagtggcatgaggaatgaatggaatattcattagtgggccctcctccactctcctggggcgaacagagtgggtgaaatcgggcggaaaccttgagaggataaagcaacctggaactccttactctgctcttgacgtggggttgggagccctcagagctcagagaaaaatcaagatggccattttggagcagggaggaatttctgtgctaggctctctctggatgtgccctgtaagctcattctcagtgtcgggctagtgcttagctgcagggctttatctccaccgtgctcaaagtcctcaggcagggaaagggtaaggaggccttgggtgggggcagagggagaaggtatacaggaaggaggactgtcccctcccctgctgctgaccaaaggtatgctttataacccagataatcccaaggtcacctggctccatcactgccccactctttcctccctttatcctattctgaggagctcaggacccagccccagccttggagcccagaggatcaggccagggattaaacaactggattctgtaattctgaagccactcttgccttctcacctactcccctaccgcaagctagccaggaagggggggcctgagccccaaggggatccccaggctgatcactcagtcccagggtgactccatgtctgagaggagaatgcccctgttgtgagggggtgacatgatgttgtagatcattactgaggggaggtagggagatcaggtggcacaggtggggcaacaggaaggcagtgacagggagaaatacattctgagctcatcccttctggttttcttgtggcaggaattttgagtctagaggaggaagcgggaagatgtacaccaggggaggggaaagctgcagtcttccttgcccacagtctgctttgattgattcagtcattgatgttaaagcagaatttgggttctagcttcctacagagaaaactcctgtttcctgaagtgatcaaatgtgggtaaaatctggtgaaggggggtttctgattctcagaggactataccttttgaactcacagaaagtcaaagcagaaaagaatgtcccaagacacccgatcctgtcctttattcctggctcagcttgggaggaggaaggggctccaggccagggcagctggccaagctggccttcctctagggcaccgcacgccccttccccctcgccc

SEQ ID NO: 30951 - DNA, 684 bp, Artificial sequence
  DNA replication origin
gacccggccctggcggaccgaaggctccaaaagatcttgcattctcaaagacttctgcagatcgtcaccgcctaaggcgccccaggcccggctccactcatgggaagggtaggaaagaaagctgggagcgctctggggcgcggggcagagacagcggtgttggaggcgcgctgtggaggcggcgggttccagaggggaaggcaggccgagccaaggagaagagccaggtgacagggcaggatgtcgaagtgggaggtaaagtccacccagcgacctactgggagcccaaaataactttagtggaaaatggggcagacagaggttagggaagatacgcttccctaacctctgcctgcctggaatgagagcaccagccagggaagccccctcgccctccgccccccgcgcatccctgagggtcagcattctcacagccttcaccagtctggaaaactgagtacccagagcttaaggaactgtctcaaactgggtttatctggggagctgttaatgggatggattcctacggagtccagagcccaggggaaggagcctttgcacaagtgatttgactgactgaggtggcgaggccagggtggctcttcaggaagatgggaatgacgccgggaagcaccagacctgaggtcagaagttcaagaccagcctggtcaaccctggtgaaac

SEQ ID NO: 30952 - DNA, 690 bp, Artificial sequence
  DNA replication origin
ggaagagctacacccgcgagccgggcctgggccaggggcgaggggagagcgccaagactgccccgccgccgagggcgccgatggaggcacaggggttcccgtggggcgccccgagagacaccgtgcctggccggcgggacgtgggctggcttctcacccgacggagagaagcggcactctcatcttcgggcaccgggtctgggctccgagcgggggctcctggaacacaaggcagtgggggcagacgggcctgggcccaccccaggctgggaaggggtctgagcggggcgtcctgactggacccggccctggcggaccgaaggctccaaaagatcttgcattctcaaagacttctgcagatcgtcaccgcctaaggcgccccaggcccggctccactcatgggaagggtaggaaagaaagctgggagcgctctggggcgcggggcagagacagcggtgttggaggcgcgctgtggaggcggcgggttccagaggggaaggcaggccgagccaaggagaagagccaggtgacagggcaggatgtcgaagtgggaggtaaagtccacccagcgacctactgggagcccaaaataactttagtggaaaatggggcagacagaggttagggaagatacgcttccctaacctctgcctgcctggaatgagagcaccagccagggaagccccctcg

SEQ ID NO: 30953 - DNA, 853 bp, Artificial sequence
  DNA replication origin
gtcagagaggggaagcaaaactcccgcccgcaccggcccggggccttgggggaagggccagggcgggcgcctccggctcacctcccgacggtgaaatgtggccatttaccttcacgctccggtgccggcacctaaatcactgtctccgcggccgcgctcaaggttgctcccgagccggccgccgccgagcagccgcgggaactccggccgagcccccaccccgagccaggccggctccgcaggccgcccgctgcgtcctccgccccgcgtcccttccctcccctccctttccttcttcttccttctttctctttttttggcccaaggacttaactcagggagtaaggaggccacagtcccgggcccagactcaccgagagcctccaaggcccgcttctgtcgcagactgaggtcgttaggaccgcccctgagggaagaaggctccgtgaggcaactttgaacttgggtccctctgcccagctatgtgccccgagaaagcaggacaagagtatttcaatcctgtgactcccgtatgactggtacgcagaatgcatcgtgtgtgtgcgcgcgtgtgcgtgtgtgcatgcgtgtgtccgtgtgtgtgtgcgtgtgcgcagtgtgcggctgtgtgcgcacctatgtgtgtgcgcgagtgtgtgtgtgtgcctgtgtgtgcgtgcgcctatgtgtgtgcatgcatgtgtgtgcgcaagtgtgtgtgtgtgtacctgtgtgtgtggaaagtgctactttgtagaaggtaaacactcgtctgcccttgtgacttgtgactttggcaccctttcatcaggccctatgctcatccttcagctccttctgccttcctggtctt

SEQ ID NO: 30954 - DNA, 2028 bp, Artificial sequence
  DNA replication origin
gtgaaggtaaatggccacatttcaccgtcgggaggtgagccggaggcgcccgccctggcccttcccccaaggccccgggccggtgcgggcgggagttttgcttcccctctctgacccgctccgaggcccgcctgggagggcggcgcccccacggtgcaggacaggagggctgcgccgggctgcggggtgagcaagacccctagagctgcctttcccgaccccttcctatttggggggctgtttccctcacttccccgtcgccccggcctcctcccaaagctgcttccagagggaagctgagaagcaagtgcttaaagcctctggcacttgggggcgccaccttctctcaggagagggtgggcggcggcacctccggggtgctagtccacgcgcagggagcttccccaggtcacctcctctactcctcaccagggtccattgaggcggggcctgccttatccccatggtgcagattaggagccgaggcccgggagctcgagggacctgcagaaggccacgcggctggaaggggtggaggaggctggggacccaggcccctgagcctcctgtgctctattgcctctaagaggtttggagtggggtgaggtggggggtgcttgtgggtgtgggaaaggttggcatctggccgacctcactactgttgtgtgtggaagtcctggttataaaaataatacaatggccaggcatggtggcttaggcctgtaattccagcacttagggaggctgaggcaggaggatcgcctgagcccaggaggtggaggctgcagtgagccatgatcatgctactgcattctagcctgggcaacagagtgaggccctgttctcaaaaaaataataatacatgctcttcacattaaaaaaaatccagaaatgtggatgtgatttgagaaccctttctcctttgggacaaagcttccttcctgaggccctgcccctcctgccaggtgctgagccccttgacccctcccgttctaggtaaagcagatgtgagtggaatgctgagatgaattgttcgattcatttcgctgtgttgctgaagagaggaaaaaagaaagagagccataccagggcacgcaaacattgcctgcgcagaggcatagcatggcacgatagcccccagcccatcattttccaggctccagcagggtggcagaacaaggcagggtggaggggctcagggcacaaggtcctggccatggaagtctccagccagtgccagtctacacggaggcctgcagcagatggaagggaaatcgttccctggctccactggggcatctttggtcattgttattcataatggctgctttttattggaaacctactacgtgggtggcgtacctctaatcatgccagcagccctatgaagtatgtatcgttgtccctattttatggataggaacactgaggtcagccccctggcctaagaccccattgctgagaggtggtgtagctgggattggaccctggttccactgaccctaaagagattcttcttcctgcagccactgtctctctattccactgtctgtgccctgggggagaaaaggggtctgccgaggcctgggggagcctgcttggagttggatggtgaaggagactggcctttaccgcatcgatgtggttttcctgggaccattctcctgaggagtgggggcgggaccctgcttagagaaggggatggtgggtgaggtaagtggaggtctaagttctcagctggtcttctaatttcaggggctctgtgggcccctcaccccatgttacccccaaacatgggcagagagaggagtcaaaggcagacggaagagggtcactttgtgggcagtgacctgaaggttcctggggtctgagggtcccagaggagggtgtctggggcgggagagaggtcatccttcatggcctgaagaccagaggaggctgtcaggggcgggagagaggtcatccttcatgacctgaagaaaccttggctgggccagagaaactaagtaggggttgcaggcagatgta

SEQ ID NO: 30955 - DNA, 1175 bp, Artificial sequence
  DNA replication origin
atttcggctatgtaaacaccgaggcacagtcatttcccccttacaaggccagagatgttgtcagcctggggtttttgtgcagaaacatccatttaatgcgtatctttttttccccagcccgcactcctaattgcagtgaggtttggtttactcttttttttttttcctttctctctcactccttccctcttttcttccaactaagaggtgtgtgtgatgggggaggtcagggacggaaataaacaggcggtttggtcttctctttcttccctggcagccttaattgctacttaagcgtgggccctgcacttaacatccggggggcaggcccggtgcgtggtgcacgccgggcgcgctgtgcacagtctccggaggccgccagtgcgaccccgccccacccgcgcacccccgcccggagggccccagcgcgcatgcgctcgccgcagggcggcctgcggggctgtggacgcgaggccagctcgtagggggctgggcggtcagcggggtcaagggacagccacgctgggacggaggacggggacaggggagcccctgcggcgccacttcttcctctccgagtcctgtctgcccttgatggagccactggtggggttacttgctggcggtcggccactttcgcccctccctcgccagcccgccagctccctaaggttttgtggttttttgtcaccaccacacctcagtgttgagctaagtgaggacgtccccccagcaaatgtattggacggaaggaaacgctgtgcgggaggaggcggaggaaagtaggccacccggggctcaagtggtgagaagaggcagccaggcagggtggaaggtggggtgtggccagcttgttgggtgtcccaccctgtgctgttgggggcgtggagggtagtgtggggtggccagggcgggctcacgtcctcatccccctcctctttcccagaaccacacccaaaccctcttcaaccccctgtgtgtgggctgtggcaggggtcaacctcttgtgttcaggtcccctaggggcccaccccactctactaggaaccaggggtcggatgctgtcaggggaagccgtgtggcttgaggagtcgagaccctttccaaatccacccctgtggaatcttgagcaaatccccacacccaacttagcttcagtgtggtggaggtgggcc

SEQ ID NO: 30956 - DNA, 1586 bp, Artificial sequence
  DNA replication origin
ggtccacagcagagccctgcacacctggtgagctgtgcgactcccagacctcactaagccagagcccagcagagtcttccaaagacaacagaatcttcccacgttcagtgggaggaaggaggaagtatttattgggcatctactgtgttctcatgatgaaatttaagttttacacctgatataggtggttggtctaattatgttcaaggtagagatgaggaaactaggcagagaggttccgtagcttacactggggcgtctggcatcggacatgagagccaggagcttcccagactggagcactgcaggtgctccagtgggtggggtgtgtgctggggtgtgtgtgtatgtgagagagagtgtgtgggtgggagcgtgtgtatgagtaggggatcaatgtttgcctcctccttcctcccactgaactgaccacagggtgtgagtgcatgtgtgtgtgagagtgtgtgctggtgtgtaagagtgtgtgctggtgtatgtgtgtaatagtgtgtgctggcatgtgtgtaagagagtgctggtgtgtgtatgtgtgtaagagtgtgtgtgctggtatgtaagagtgtgtgtgctagtgtatgtgtaagagaaggtgctggtgtatatgtatgtgtgtaagtgtgtgctggtgtgtgtatgtgtatgtaagagtgtgtgctggtgtgtgtgtaagggtgtgctggtgtgtgtaagagtgtgcttgtgtatatgtttgtgtgtaagagtgtgctggtgtgtgtatgtgtatgtaagagtgtgtgctggtgtgtgtgtaagactgcttggatgtaagagtgtgtgctggtgtgtgtgtgtataagagagtgtgtgctggtgtgtgtatgtgagactgtgtgtatgggtgtgtgagaaagagtgtgtgagagaatgtgtgtgtgcttgcggatgtgtgagagagggagatggggatgtgtgtgtgcctgtgagacaggtatacttctgtgtatgtgtttacgtgtgagagtgtatgtgtatgtgtgagagtatgagaatgtgtgtgtagtgtgtgtgtgcatgactgtgtgtgtattgtgtgttcgtgtgtgcatgtgtgacagagtgctgtgtatggtgtgtgagagaatgtgctgggtgtgtatgtgagagtgtgtgctgtggtgtgtatgtgagagtgtgtgtgctgggtgtgtgtgatgtgagaggtagatatatgagtgtgtgagagggaggaagagggtgtgagagaatgtgtgtgagagactgtgcttgcgggtgtgtacgtgagagggagagagacgcgggagagtgtgagagcgtgtgtgtctgtgagagagaaaggtatacttctgtgcatgtatgtgttgagtgtgtgagtatgtgagacagagtgtgagtgtgtatgtgtatgtgtgagaggaagagagtttgagagaatgtgtgtgtgctgtgtgtgtgtgtgtgtgtgtgtggccagggagggggcctctgtctcctgggctccttatatcagggacagtgtctgtgcggtgtggatgggagtcatagggaggcctgggagctgagagctgggagcaggcaccagccta

SEQ ID NO: 30957 - DNA, 855 bp, Artificial sequence
  DNA replication origin
aagcactggagataaggagtgaacagacaaaaacatctaccctcagggggtttacactctagtggagggagacagacagcaaattacatcagttatttaagtgtctaagtgcttgtataagtgctatacagaatgaagaggaaaggagacatagagggtgttgtgggaatgggttcaattttaaagagagtagtcaaggagggcgtcattgagaaggtgacatttgagcaaagacctgactgaggcaaactctgctgatttttggggaaggaactcctgggcagagggaacagccagcacaaaggccctgaggaaggattggcctggccagttcagggagaggcgaggaagccagagagaccagtggaaggagggaggccggcatggtaggaggtaaggtcacggggaggaggccaagggagccagatggggcagtgctcacagaccattgcaagggctttgactctgaaggaagctgagagccaggcagggtttgagcagggcagggacacggtatgacttagaacgaggttcctctggctactggtcaagagcaggctgtggggcaacaagggtggaagcccatttggaggctactgcagtcacccaggtgagaggcagtggtggagagcagtggtcagattccggatgaattttgcagggagagctacccaggttagctgatggattggctgtggggttgagtgagaaagaaaggagtcaagggcgacgaggctcggagaggttagggtgggctgcttctgagtgtgctgtgagccagtgcctttctcttgtacagaacatgtccagactgctgtctccaatagcctataccctccagttcccttctctcct

SEQ ID NO: 30958 - DNA, 1217 bp, Artificial sequence
  DNA replication origin
ctctagcttctagtcttccgttgctgcttattcatgggtggtcctgggaacccatttatgacatttacacacttgtttagggtgcttttgcattcatgaaacgcttggatgtacattgtctcatttcatcctgataagaatcctgcagggcaagtgctattatactttattttttctttttaaattcattagaatattgaacttttttagtcagcagaggaagcagggccttcgtggcattaagagaattgtgtgacgtcaccaggctgggaagggctgggctgcactgcagctgaggttcagtttacccaccagtaagcgagatgagcagactcagttctctttaaagtctcttccagctctgacattctggacattggaaaggtcaggggaaaaaatgccaggagctcttttatttttttaaacagggacattccgcagagtggactgggtgtctgcgagtgcatggatatgtgtgtgcatgtgtgtggatgggtagacatgagtgtgtgagaatgcggctgtattgagggtacatgaatgtggatgtgtgtgtaggcgccaaggtgtgcctctgggtgttggtattgtgtgtacaggtgtggttgcatctgtgtgtgcaaggtgtgtaggtgcataggtgttgctgtgggtgcagggtgctgtatgacagtgagtgtgccagtgtgtgacggagtgtgtgtggatatgtgaataggtgtgtatatgtgagtaccagtgtgcaacagagtgtgagtgtggatgtgtgaataggtgtgtatagtgactgtgctggtgtgtgatggagtgtgagtggatgtgtgaataggtgtgtatggtgactgtgctggtgtgtgatggagtatgagtgtggataataggttatggtatagtgagtgtgcccagtgtgtgacggagtgtgagtgtggatgtgtgagtaggtgtgtatagtgagtgtgctggtgtgtgacaaagtgtggatgtgtgaataggtgtgtgtagtgagtgtgctggtgtgtggagtgtgagtgtggatgtgtgagtaggtgtgtatagtgagtgtgccagtgtgtgacggagtgtgagtatggatgtgtgaatagatgtgtatagcgagtgagtgtatattgggagagagaaaacgtggcgcagcaccaattgacgtctgtctgtccctccacctctcccagcaccctcgtcccctcctccccaccctg

SEQ ID NO: 30959 - DNA, 1127 bp, Artificial sequence
  DNA replication origin
ccctgaggagctgggggcaccaggagcagacgggtcctggagccccgcgcccccggctgcctcggcgcgctcaacgtggccaaaggcaaagcagttcgctcggcccgggccagcgccgcgggaatggagcgcggcgaggccgagaggcgaggcgaggcggacacaaaggagaggcgagggaggcgagcgcgcggcgccggcgccctggccaaggcgtatcggacaatctccgggctaattcgtgtcagggccggcctcctatctcccgcccggctccccggccgctgataaaattgaagtggaaatgaagttggatgctctggagcacccgcgcggctgtgggggtggcgggggctccgtccggggcagctgcgccctccgcgggcgcccttggcgctgcccttggccaggccgcggggatggagcgggagagccgggcggggaggggaggacgccgccgcgcagaccccctgcccggcggttcccgatcctgtccccgtccagatgaacatttacccagcagtgggagcggggtggaaatgcggggagcggcccgaatgcgggagacggcaaggcaaggacaccctcgtttaatgagcgcttattaagtgccaggctcggagccaggtgtttaaagtgagttatgcgctcagttacccctccccccaccatatgaggtggatcgagtgattgcttccatttttacggatgctgacttggacacccagagtctcagccggcccagggacagctagcagaatggctgcattcgcacccaggctctggcacactgcagctgcggcgcgtcaccaccgcactagcccgcacttgggagcgccccgaataggcagagagatgacacagaagcagggccgggcgctggcagttctgcaagcccgttaggacgcaggccttgcagccattaggtccatcccctgagctcagaaccgcctgaggggtggatcttactcccaggtgaggaaacctgaggctgaaaggtggtggagggaatcgagctgggaaccaggggaggcggactgcactggcccgctgagttatctttctgacccccaaagtccaaatcagctcgagatgaagtctccgctgccctgtactttcttgaggga

SEQ ID NO: 30960 - DNA, 954 bp, Artificial sequence
  DNA replication origin
gcggcctggccaagggcagcgccaagggcgcccgcggagggcgcagctgccccggacggagcccccgccacccccacagccgcgcgggtgctccagagcatccaacttcatttccacttcaattttatcagcggccggggagccgggcgggagataggaggccggccctgacacgaattagcccggagattgtccgatacgccttggccagggcgccggcgccgcgcgctcgcctccctcgcctctcctttgtgtccgcctcgcctcgcctctcggcctcgccgcgctccattcccgcggcgctggcccgggccgagcgaactgctttgcctttggccacgttgagcgcgccgaggcagccgggggcgcggggctccaggacccgtctgctcctggtgcccccagctcctcagggtccggccgggtcacctgggccgatccaggcgggcaggggcctcgctgctcctcccccgcagcccctctcgccctcccggggaccgtgtgcggggagcagctgggagctgcgtctggaggggctgtccgactggggaacttgtcctgtgccttgtccatgccattacattcatcctcccaagaaccctgagaaatgaggagatcgtcagagaaggggaaactgaggctcagagaggcgacagtactcgcccaaggtcacgctgcgagtaagtggtcatctgtccattccctagagcctcggtgaggggggttgtcgggcatatttacacagttggcatttcccctttacctactatgggaggttgcgagaattgattattccccacatttattgcaagaaggaggccaaatatgatgaggatgatggaggcacttaaagcttgcaaagacaggtgcatgacttccttccaaaccctcttctcccaggtgccctcccaggacacaccccctcccaagcttcctccccacttccccctataa

SEQ ID NO: 30961 - DNA, 940 bp, Artificial sequence
  DNA replication origin
agacacagaggcgcagagaggcgcagttgccaccaggcaagagagaggcctctagggacaaaggagggaaaggtgggctctatgcactgtgggaaggagcgccaagtgtgtgagaggcaggaaggtggtcatgtctctgtgactgtgagggtgacagttctggtctctctgtgtgagcatggggaagccccctatgttccctcacagcaccctcagttcttagactggggagaagaggcaggggactggtctgggacttgatggtccccttggtagctgagttggctggaaggggtccaacgcccacagtctgtctggtaatgcagctttgaggcttaggtttgggaggtgaatgtcaactctcacccctgtgaggtggcagctttgctctgttggcctcctcagaggctaaataaagaaatgctgagatctataaaccacccagcccagagagaaaaaggagggaggaagggcagctccctagaaaaaaatccaccccctccccaccactaaacacatttttaattgtcccttgggaacatttgtacatttgaccaaagcaaatctcaaagcagcagcagcaaaatgagtcagaggggctggtggtccagagagagctggggatcggagatggggaggtgaggagaggtggcaggcatgtttgggaaggtgagaaacttggttcctttcccaccatctctgtcaagctttagaaagaaagtgagcaggagaaataaagttccaggggaaagaaagagaagggcatataaaaggcaaatccaacccagaaaggaaagaaagtgaagaagaaagaaaaaggcagggaggggggagagactataataaaagagggtgaaggcggccccaggaggctgggcctcgtcccaaaccatccgtcttcattgtctccgtgtgtgcaaaggcaactctggcataagga

SEQ ID NO: 30962 - DNA, 701 bp, Artificial sequence
  DNA replication origin
gcgtcacggtatgtgcctggcctgggtaaacaactctggcttcccacgagcgctggagggaccctgggcatggggcaggggcgtgggggagggggggcaggggcgtggggtggggcagggagcgggtggaacagcgaggtcaagcgtggagattccagttgcgagtcagctccgcgccgcggagcaaagacaggacgtggataatcttgggagggagacgctgagctgaagaacagaaaagagagacagaggcagaagtgaggagagagggacaggaaaagaaaataaaggcagaaaaccagagaaaagatgagacggagtgcggaaaagcaggcggggataaagaaaggaaagatctgtcggggaaatgcggggagaagtggaggaaaagaaacagaaattagacccagagagagaccctgccacgaagaaggccgcggggacgggcgcggagccgagggccctgcaggcacggagggggcgtcccgcgggtctgggggtgtgcggctttgggacaggcgagtgcgtgctgagagaaagaggcagcgtgtttggtgggagactctgcgcccgtggaaaagcggctctgggcaggaatccaacaaataaataaaacgtctaagacggcgtgacaacaatgtgtatttgggtgcgtgcccgtgttcctctgtctgaacacccagtaaggaagacaaacgggg

SEQ ID NO: 30963 - DNA, 794 bp, Artificial sequence
  DNA replication origin
gtctagttctctccggactcaaattgccttaatctcacccatcactctctcatggaaatgatctactcgtgtgcagtacttcacagcttgtatcacggtctcccctgaaccgtatagcaagagggtggtggggggtggaagagaagggtactatctccactttcccggccaggaggcccaagttaggaggcttgtccgagatccctaggtcagagcactatttaaggtgagaagttgggtggggagcttggcaccttgctccagtgtgcactttgcgcctggccatgttttataagcaaggggggcttgggctggttaagggggagcagggaccgcagggccaggaaagggcagcatccggcaggccggggcgtcacggtatgtgcctggcctgggtaaacaactctggcttcccacgagcgctggagggaccctgggcatggggcaggggcgtgggggagggggggcaggggcgtggggtggggcagggagcgggtggaacagcgaggtcaagcgtggagattccagttgcgagtcagctccgcgccgcggagcaaagacaggacgtggataatcttgggagggagacgctgagctgaagaacagaaaagagagacagaggcagaagtgaggagagagggacaggaaaagaaaataaaggcagaaaaccagagaaaagatgagacggagtgcggaaaagcaggcggggataaagaaaggaaagatctgtcggggaaatgcggggagaagtggaggaaaagaaacagaaattagacccagagagagaccctgcc

SEQ ID NO: 30964 - DNA, 894 bp, Artificial sequence
  DNA replication origin
cagcagggctggactggccccctccccgcaggcctcacgcagcgcagcaggctgggaggcgcctgggggtccgggtggaagaagtggggaccccatgccacacggcttttggcgcttgcgggggtgccagaagcctaccgagtaccggtcgtcttccgccgggaagtgccgggtccgcaggaggagcgcgaagccgagtccgagcccgcggagcccgccccctagatcgcagaaccgccttctccatcctctgccctgccccgcgtcggggtctgggagcgaccggcggaggccggcggcgcgccggagctgactagtcccctacgctcctccggcccgcagcggggagcccacatgtgtatgtgcaagaaggtgtggagaaggcgttagggtcccggcacccacgggtcagggcagaacgccaacgagtcgcactgcgggtctccgcggcttcggtttccatgacatggtgacgccggcggcaaggcggggggctgcctgtgggccttgaggttgctgggcggtgcgggcggagtcagcaaaggggcgttggcaaagccctaaaaccccacggttccacggagcgcaagccagattctctgaagcagcttccccgttcgtccgaagagggtattccatctgcacagcgggattccctgccagcccaggttcactgcgactccgcttccccgagcatttcccccgtttcagcttccgtctggtctgcgcatcgcgagtggggtccaaaggccaattccacaataccagccagctccggagggacgcccactatcactgccttccatgctcgggccaaatgagccttcctagcaccccctcccccgaagcacaaaaacggggagcaaaagtgggaccgcccagcccaaccacctt

SEQ ID NO: 30965 - DNA, 853 bp, Artificial sequence
  DNA replication origin
gcctgggccccctcctgctccggtaaggcgtgggtttcgatgggagggacagagagagagcgggaataggcgcaggcggaggccagagttctgctgtagagtgggggtagtccaagaccgagccttgtggaaggttggggtgcagccgggtccggaatcccaggcggctcccctgcactgctgggctttgcaattcagcggctgttgccattgtccccccgtactttcttgagctggaagtttgtcccaagcgcagcgcacatctttggagggggaggaggctcttagcagcagaatctccctcctcccgtccctctttctgtgccccctcccccaatccatccaaagtccacagggtccgggtcctgggcgagctgagtgtctgtctcccgcagagcactcttgcaaagttgattcgggcggtttcctgatgggggcggggagaccggaggcgcggcgccggcgcgggggaaggagtggaccgggaagcgcctcgggtgaggagttgcaaccctggcgagaaagttgtgagaaaactgtgatccggagacaccttttacgtacaaaaacaaacgactaggcgggaaaccgggggctccagcggcggctgggggtggtggtcgtggcgttgggaagagggaaggaggaggggggggtgccgggacgccacgaagaggctgcagtagatgggcgtgcagtgcatgggcagcgtgtgccgggattccagtcctcccctgtccaggcttcgggttggcaccggcttccccagacaacagcaaaccacaccctccatagttcactcctcagggaacccgtaactccctaatcccgctctggctaggaactcgggacc

SEQ ID NO: 30966 - DNA, 865 bp, Artificial sequence
  DNA replication origin
ttttttttttttgtttttcttttgcagcgggaggagtcggggaggaggggggcagcttggagagctttaaaaaaaaatgtcctggcgcagcggctacagtaggccggcggctggaacggctcggcgcggaccgccgctgtcgccgcccgggccgcggctcgttgctggccctccccgggcgcgtccctcagtccctggtctcctggcccagtcgccgccccggtgcgtctctccccagctccggcggcttggtcactgctcctggctgttggctgagctctggaagccccctcgccttaatgcagcgcccgctgacgtcactgcggcctgcgaccaatcagcgcctcgcggtccctctgtaaaccattctgcatcccccggcccgggagagtgcggggagaccgcgtttagaggatcagtggcggcggcacccgcggccccgcgcggcgcggacggcgggcagcaccgtgcctgggccccctcctgctccggtaaggcgtgggtttcgatgggagggacagagagagagcgggaataggcgcaggcggaggccagagttctgctgtagagtgggggtagtccaagaccgagccttgtggaaggttggggtgcagccgggtccggaatcccaggcggctcccctgcactgctgggctttgcaattcagcggctgttgccattgtccccccgtactttcttgagctggaagtttgtcccaagcgcagcgcacatctttggagggggaggaggctcttagcagcagaatctccctcctcccgtccctctttctgtgccccctcccccaatccatccaaagtccacagggtccgggtcctgggcgagctgagtgtctgtctcccgcaga

SEQ ID NO: 30967 - DNA, 909 bp, Artificial sequence
  DNA replication origin
ttctggtcgtcattctcgttgctacccgcttccttgtccgacacgttggcgctctccgagtccttggcgtcgtcctgcgacgggtcttgggaatccggagacaaactggggtcactgcccgtggtggctaagagggaaaggacagatgagccggggccttggcgagccttcctcccccaggacccgcttgcacctagccagccaggaattggggcctcacccgagtgaaggctgttctctttggcaacactgctgttacttaggtaatcctctttgcagacgaacttattctcgtcgatgatgtagagttcctcgccagtggagagctgcttgttacacatcatgcaggtgaagcagttcaggtgaaacactttgctccgcgctctccgcaccaggtcgctaggggagatgccctgagcgcagcctgcgcatttggtaccgaaacacctgcgggggggtgggggtggggggcgggggcggggatgggtcagccaggggcaaggggagacaggcggagagaaagatgacagcgagaaagagggaagatgtaaaaagtggaggaagtaggagaggaggaatggagcacagaaagaagggaagagagagataaagagaggcagaattccggttaagcaggtgaggaggcagcaggagagagagcgcggcaccagggaagagttagggaggggatacacgcggttagagccaggggcccaagctacccgccaagccccagcctcactcccagcgttatcccagaggaaagatgcatcgtctaaagaaggtggcaaggcagtgacctgtgtgggcggggggaacggggcacttattttccgattagattcagaaaagtcgaattacaattagaactctatataaacgtgcgcggagcgccgcttttctctcctt

SEQ ID NO: 30968 - DNA, 949 bp, Artificial sequence
  DNA replication origin
gagcatctagaaagtcctcttcccagcccaacagaggtgatcgtggcagtggagggggagggacgggagttcagccagaggctggaggaggagaactgttgaacactctggagagagtggggagccctctttctgcacataccccaccccacctcgggttcggaagggtcagagaagtctcagtgtcccccagagtcaatcagtccctctgccttctgcacaaagtgaactcttcctaagtctgcaactccaactttgtgatcgcttgctccaattagacaagccccagatcagggacttcccctccaaagagaggtggttccgccgggagtcagctctgcttccagcgggttggagtgaaatttgggtatgggagcctacctggaggcagctgggcctgtgggcggaaaggaggtgagactgctgaagctccaggccagggggagtctctggctcagtgctaggtgtccggttcaccgggcctgatgccctgcgtggctgtgggtggatgtacctgcctgggaggctggctgtgcatgtgcacatgtgtgcaacacggaaggccctgaggcctacaggagactgtgagaacctgtgtacatgaatgagaagtcgtgtgtctgtgtcactattggcaagaggctgtggataagtatgtttggcactgtgagattgtacatgggtgtgaaaaggagattgtaggttttggtatcataggctgtttctgtgtctctgtcatggttggggggagggttgctgcaagagaccgtgaaatggaaacgcggtgtgtgtctgacattattttggagaggcgtagtctctatgtgtgtacagccccagagaagcggtaactgtgatagtgtgactgttagaaaaactccagctataccacaactctccccctccagacacggcggcctgtccaggtcctcctgtgggattcctgctc

SEQ ID NO: 30969 - DNA, 1523 bp, Artificial sequence
  DNA replication origin
cgccccgcgccgccctcccattggctgccgctgagccctcgggcccgcgcctcgccccccggcggccctggcagcgccgcagcccggagcggggtcggaggtgaacggcctggagtaaccccggacgtagtcacctcatggagctcgccggctgaggtgggagacaggggcggggcgggggcgggtcaggcccctgaagccccgccccttctccgtgtgccgggccggcctggtgctgcacgcctgtcagccatcgcccgagccgccggcgtctcctcccgcccagcagttcctccacgcaggggctccggaatcgcccgaccgcacacgttgccaccctgaggtgaggtgagggccggcccagaacctgtgaccggggacctggagaaactggggccaagggaggggcggcggcaggcagggggccgcctcccagcctccgctcacccgcacgcggcctgggctccacactatccagatcgggtgcggggcagcccagcccttcccgcagctctgaggccttgaggtcccctccctagagacatggagaggtctggggtctcgggaggtggggattcagatcccggaactgggaggcgtacagttcagggctcctctaggaaggggggctggagtttctgcctggagctcgcccgccacccctcttgcccagctccagcgtggtctgattccttccagacccctctccaatccgattctgggctcgggagagggagaagaccacgtgggaagggggcgttgcgggttgggtctgattgcattgaaagtcctttctctcttgcagagtgaggtgtggggtgcagacctcacttgctctctccgtgcctttgtatcgtggcgagagccagggccaggcaggttgtatctgccagttcctgttcccaggattttattatgttctctgcgagggacatagtaaatgtacatgccttttgttactctcctcgtttgccatgctgatcaagggaagttactggaaataggacgtaggaagctgatgtgaagctaatgatttcacaggaaaatgtgcgtgaaggtcctgcccggatcggggccaacattattttggatttgagagtgggagagtggacactaatggacacttgaaatcacctctaaaaatcagggacttcgtgtaggccttgtgggttctatagagacatttaagaatataactgctcaggagaaatagtttaatttcagatatttttgtttggaggtttaagactggaataaaaaaaaagaccctaggccttcctgattctgtttctacttaagcgatgtttcagtaatttcctaatgtgtggataaacctaataaccacatcttcagtctcagaagtttatttccttggattttctctctctttccattcattttttccctcccaattcggtagtatagattgagaagcatgctttctttggttacatggtcttttctcactcagcagggaagaatactcatatttgtcccttcttgagggggatgccctggatgtc

SEQ ID NO: 30970 - DNA, 1426 bp, Artificial sequence
  DNA replication origin
agcccctgcgtggaggaactgctgggcgggaggagacgccggcggctcgggcgatggctgacaggcgtgcagcaccaggccggcccggcacacggagaaggggcggggcttcaggggcctgacccgcccccgccccgcccctgtctcccacctcagccggcgagctccatgaggtgactacgtccggggttactccaggccgttcacctccgaccccgctccgggctgcggcgctgccagggccgccggggggcgaggcgcgggcccgagggctcagcggcagccaatgggagggcggcgcggggcggagcgatgtgaggcgatgccgatggtccgagcgcggatctgccattcggggcccagcggctagagggcgggcgggccgcgggcgggccgcgggcgggccctgggcagtcgtggcgcccctggcccggccttcgcggccccttctgccacagccgggtacggggccaacccctcggctcctcctcctggcggagaggggagtgggggaagcggtcccgcatgcgcctcgcatcagggacagaggcgtcccaagtgaggggccaggactagccggcctgtagaggcggggaaagggaacccagaattaaggcgggctagaatggggcaggcggtgtgcgggcccgtttgtctgtttaatcctaacacattaacaaggggtgggcaatcgcgtccactacctgtcctcatcacgctggctggtttccaagtctgggcgagctaagtaaccccatgctggaactccataaccagccccccgtttcgctcctcagccccgagacagcccactccaaaggtgttatacatgctggatcctggcgtgttgaggagaagcctcagtaaacgaagctcagtaagaaggggaatgtaccaaagaaccaccgtcttctgcctgccctgagcaaaatagttgccacagcgttccagacttttcggattggagaatgcttcccgtcctccactgtgggcacgccgagcctttgagaggaagccagtcggtgtctctagttttgccagttacttcatagcaagactttcatggtagctgtgtgttgaaaattaataataactggaaggggtcccaacacaatacaaacattgcgtagggaagaaacttggagaaaattgcacttgagaagaacagggtgaactcagcccttccaaggaggaatttaatgaagcatgcagcgcaccttcttaatgcttacaaacttgtgaggaaggccaggagaggtgcagaggatgacagtttggtaggaagaagttccacgccagagagtaaaaagtgaataggatagaaatacatgcccaggtaagaagttcttggcggaagctgaggcagaaagagggaaagattggtcaacaaggaacaatatttatctaggagccctcataatcccac

SEQ ID NO: 30971 - DNA, 1252 bp, Artificial sequence
  DNA replication origin
acgcgctccagggctgagcgggaaatggcgaggccggggcactggggcaccgcccagacgcggggcgggcccccggggtcaggcccggccccacaccgccctcccccacagagcggcgaggcccgccgctgcccgcccgccggcccgccagcctgccgcgtcaagcccgccgccggggcccgcagcccgcgactcctcccccgccgcacctcgtggcccccgcttctccctagtcccgctagaggggctcgcgctccgccacccgcccgcccgcccgcccagcgctgcctggcgcctcacctcgccgagaccccctaatccgcgccaaagagccgccggtcgcgcgcgcctccgggctttgcgtgcgcgcccccgggcggcgcagtggcgagcgcgccgcgtgccgcgcgcccgccgcctccgcccctcggccgtggaggcccccgccgggtgctgagcgcccgccaccgccctcttggccttttcccggtccccgccgcgcgcctgctgctgtccccgtgcccgaggactgggaggatggggctgagccgcttgcctgacttttgatccgaccagtaatcactttgcccgtgtggcgcgtggcccgttgcctgaggcttcctggcgcgtggggctgtttggtcccctccggagtgcggtgaggcgggccgagccgggactgcctgggtttggggataacgttcccatctccacccctgttgcagcaagggaaattgaggctgagggaactgggcccagggacggcgagccgtggcgcctctccagtccgggccccgaagggctgctcgtggatgaaccagactgattttaaggggtgaagagggtgcgtttcaatcagatgctcctggaacgtcgaaattgtcttctttggaaagaaccatcccctctttgggcttcagaggcccaaattgaggcgcaatgatgagaggatgtggtggtctactctgatgtcaatcttgagggctaggtatgtcccaagatctcttattactgctgttaatgatgattctaatagctaccatttgtcgagtacttattgcatgccagacattgcacaaagcaggttacacatacggtctcatttaaaacttgtgaggtaggcacctgttgttatccctattttccaggtgaagaaatctaggcactgacataaataacttgggatcacactgctaggaagtactggggaagggaattcaaaccatggtttatctgaactatataactgtta

SEQ ID NO: 30972 - DNA, 1424 bp, Artificial sequence
  DNA replication origin
ctgcggaaggtctcgggcctctcctccgcgggccgccccgaagagtcaaggaccgccagggagcaggtgggggcgccggcacaaagtttccagaggcggggtcgcgcgggcctctgggtccccctgcgcccagggacccgaagcgcgaagtcccgccctcccgccccaccccaacaccttccccacaacccccacccccgggcctgcgggtcccctaccggcgcggcgcggcgcggagcgggttgcggttagggctccgtcctcctgcgcggccaccggcttctgcgggctgggcgccgcgcgcgccgcctcctcctccctccgcccgcgcccggggcgggccgcgcgcacgctccctgcgcctggccgccctctcccgaggtggggggacgcgacgcggggcggggggacgcgcggggcggcaggcggcgcgcgtgcgcgctgggcttctgcgccgtgcggtgtggtccgggcgcgccctagctcccgaggcagcagcctcccctagagcgctcctccgtgcaggtcccctggtctcttaccctgcctcacacaccggcgacccctcgcttccccagtcagcgtctgcgtatgagccgggctcgaggcgggctgcgggggcgctctgctggggtgctttcgggattggagaggattaaaggcgagaaagcaaatccgatacaggtgtgaagccgccgcgggtggctcgggacggcctcgaccccaccccaccgcctccctagcccggagagcccgggggttgggacccaagagcgaagggaaaatcagtagcgcggcagttcctggctgacgcttgctggaacaggtacgggcagccgtggcgcccgagacccggaggtgaacatgcaacctccgtgcgcatctccacctgctctcgccacgccaaggtgccgtccgagtctcggagcccacacccacctcccgagtccccgaggcagggcaggggttctccggagcgcaggcgggacacgggcatttgagggctcatttgctgtgtgactctgagggtcttttaaaattcaggtctgcccatctgtaacataagtcggtgcgaaacggacgttttccagcacagccccgcctcccctccgcctctggcaggtgaagggagacacgtgggaggcaaagcgacttcctcaaggctctgccgtgagtcaaggcacctaagagtcctgactccatgcccagtccttgactcaccagcccctgctcctcgccgttgcaaatggttggcctcagaattgctgagcagtcaaaacgagtaggcatgggtttgcggggaggggtggaggggagaagtaaaacccgcgtttggggtttacatctcccgatgtcctcaaccaaaagctttgaagctttttcatgttcttcccgatctccactgcccaaccggcttcagagtc

SEQ ID NO: 30973 - DNA, 977 bp, Artificial sequence
  DNA replication origin
cgggcgcgggcggagggaggaggaggcggcgcgcgcggcgcccagcccgcagaagccggtggccgcgcaggaggacggagccctaaccgcaacccgctccgcgccgcgccgcgccggtaggggacccgcaggcccgggggtgggggttgtggggaaggtgttggggtggggcgggagggcgggacttcgcgcttcgggtccctgggcgcagggggacccagaggcccgcgcgaccccgcctctggaaactttgtgccggcgcccccacctgctccctggcggtccttgactcttcggggcggcccgcggaggagaggcccgagaccttccgcagcgcaccctcgccggccctgagcgtgcgccccctgccgctcccccgccgcgccgcgccgcccccgcgaccctgtccctgtgccccggggctccagcagcctcggccgcgcctcctccgtcgccttccgaccccgctgaggccgcctactctcgctggcatccacccgctctggagcgcgccgccgctttttgcatctccccgaggtttctggtgcatggatagaagcaacttgactttcagcgatgccaagtgtccaacttgagtctttctctgcggtggtagatgggtgtgcgcggtgctaacatctgtctttttatttctcctaagtacccttgctccggagcgaagttgagttgttgtttgtaaagagggggtgcgtgctgtggccgccttaagtggattgtataactgtattttatttaggtggatgttgccagtggtaccagccagtgttatggtaactgggcatcccagaggctagggaaggaggagcgacttacaaatgcagttttaccatgcagagattttttttttttaaaaccaccttgtactttctatccagcaggacctccggacatttagtgtgtgttaactcgttagctgttcattatcgttttataagagaggggggtggagagcgtta

SEQ ID NO: 30974 - DNA, 914 bp, Artificial sequence
  DNA replication origin
ccacccatcgtctgagatgtggggagcgcctctgccccgccgccccatctgggatgtgaggagcgcctctgcccggccgcgaccctgtctgggaggtgaggagcgtctctgcccggccgccccgtctgagaagtgaggagcccctccgcccggcagccgccccatctgagaagtgaggagcctctccacccggcagccaccccatctgggaagtgaggagcatctctgcccggcagccaccccgtccgggagggaggtgggggggtcagccccctgcccggccagccgccccgtccgggagggaggtgggggggtcagccccctgcccggccagccgccccgtccgggagggaggtgggggggtcagccccccgcccggccagccgtcccgtccgggaggtgaggggcgcctctgcccagccacccctactgggaagtgaggagcccctctgcccggccaccaccctgtctgggaagtgtgcccaaccgctcattgagaaggggccaggatgacaatggcggctttgtggaatagaaaggcgggaaaggtggggaaaagattgagaaatcggatggttgccgtgtctgtgtagaaagaagtagacatgggagacttttcattttgttctgtactaagaaaaattcttctgccttgggatcctgttgatctgtgaccttacccccaaccctgtgctctctgaaacatgtgctgtgtccactcagggttaaatggattaagggcggtgcaagatgtgctttgttaaacagatgcttgaaggcagcatgctcgttaagagtcatcaccactccctaatctcaagtacccagggacacaaacactgcggaaggccgcagggtcctctgcctaggaaaaccagagacctttgttcacttgtttatctgctgaccttccc

SEQ ID NO: 30975 - DNA, 767 bp, Artificial sequence
  DNA replication origin
ccggtccgcggcgaggtggggcctggtgtttgacccggaagtggctgtgttcagctgacagctgctgataaggtggcggcggcgaaggcagcggcaggtcgggagcaagatggcgctgcggccaggagctggttctggtggcggcggggccgcgggagctggcgcggggtccgccgggggaggcgggtaggtgtgaagagccgggcgggagcccgctggcctccgcgggggcggcgaggggcgcttggcagttatggcagttttctccagccctgatccttttccttggaactgggctgcgggaggagggtcatcccccagggacccaggccgaaaggggcgtgtggagcccaggtgctggacgctggtgttccgggatcagttgggggcgccggccgcctggaatcgagcggggagcgagcgcgcgcccagtgtgggaggggagagaagatgagggtcctcttggggtgggggggggcggggcaaatcaggaaccgcgactccgctcctagtcctagctgcctctgaagcgaccagggtcttccctttccttgggctttctagacttaaccggatatgttggagggagggctttaaaaatctgttcacaaagctggaggactgtttccaaggggggtgtgtgtgtggactatttgtctcttccccttttagagtgtcctgtcctctttatttccttaacccgcgacaaacagcaggaacatctaaagacctctgaattagtaatggtcttgagatagagttcttgt

SEQ ID NO: 30976 - DNA, 1980 bp, Artificial sequence
  DNA replication origin
gatcctctgcgaactgaggtctgagacgcgttcgcccccacaccaccgcgcttggtttctttggccccgcgcgtgtccacccggaccctgcatggaacatgccctttgcaaatctaaacccgcgttggggatcccggataattccgggccttgcatgggcgcggctaacaagagtgcccaccagggaactcgcctcccagatcccggctccggatgccgcctgtccttcggcaaagaactgcaggtcatcatgcaggtcaatgtgtccgaggccgacatgcggctttccagacccgaggcagggcgcaggaaaaatgcgcggcctggggcttgcagcggcgcgaggctctgctcccgggaagtcgcagcggtttcactgcacccactcgcaccttcagtcgcgtgggcaaacctcccggcaaagggctccacagctccagttctccccggcccagccccagccccgcggggaaaagcccttgggtctcggacgctggcctgggcctggggagaagaagcccggtgggccgcagggtcgtcccgctaagggattgggaagggtccgggtgttgggagagaagcagagcgccccccgggggacttctctggtgggaaacgggcttggcgagtgtggtcgggcgcagtgtcactcaggcccggggccggggctccaggggttcgggtgggtcccctccacctcgctctgcgcctacctgagcatccggtccacctccgcccgctgctccgccgcctcctcggtgttgagcgcctgcagctccttgaggatgggaggtgtgtcatagtcgtcgccgtcctcggagccctcgtcgccggacaagcggcccttggcgtggccgttggtgagagtatggaagaccggcttggtgtcgggctcggccccgctgccaggggacaggggcagcgtctccagcttcaccccgaagttcggggatggcagcaactcctccaaggcctgaaccagcacctccttggtgaccccggagctcagcagggcgctcaggagttcttgctggagcgacgtgagcttggacaccattttccaaggacggaaaaagaagggggtgagggggtgggtgggtgcgagagaggagggtggaggggagtttcacaagcaaaccccaaatccaggaacccctccacccttcagcctccagacacctgttactccccggggtcccggaggctcctccgaaaggagtcagaaaacttctaacttgccatgatcgccaccattaggccatataagatatgcaaattagtgggaagggcccagctttcggctggatgcaaatgatggtggggagggggaaacccggagagagggagagccggaggggcagacctggagagcagaagacctgggccgggagcggggctttgccagggtccattgtactcacgctggggggctagagaccttcttttactggttctgcttatcagccaaacttcacctaacctttggacttgttaagccagtgccttgcagcctaggcgcggggcttttccaccggttctcagttccgctttagtccagagagaagacactacgcttcggggttcaggtgagagccagaggaagctggggtgctcgtggaagaaggggacgcaggaggaagcgaagagtagagaccctggatgcgtcccggccgacgcaggtggtgggccaggagagcccgcagggcggaagagaaactgaccacttaggaaggggcgccgaggccacgggggaggtgaggcagcgttaggtgtggtgagcatgccctggagggactccatttatttctacctcggttactacctccaggccccagaacctccctggcctggtctggcggtttgggtttgcagaactgcccgccagagagcgtaggcgagggtgaaggagtccgggagaactcttggaaagagactactttatgggtagagggagtagccaaagtgaagctcccccagcag

SEQ ID NO: 30977 - DNA, 760 bp, Artificial sequence
  DNA replication origin
cctgggagacttctggagcctgggtgtggggcagcctaggggtggaggtggggcagacaggggtaggggtaggagaggaggacttgcatggcagggtgcagggtaggaaaccagccaggggccagtttgcattggcggctcccatccccatccccacccccaagcccacccctacccccaccctgctgcagagatgggcctgggctgctgtcctctgctttggcctcagcagatcacacgatggaagctggcagccccgtgggcaccactcgagccagctgtgacctgcagtttctgcttcctggagtgtggggcgcccactcaggagagcacggcacaccccacacccctcattttgaggatgctgggaggtggggaccaaggtcctgcagccctctgcttgcgctatgaaaggtagcctaggagtcctgtgtccgcccatccacgtggggccccaggagcctgaacagtggcaggcagagagatgaggagggtgagagaagtggaaaagaaggagagagaaagagagatggggagaagggagtgagatagagagagagaggatgagagataaggagagagacagaggaggctgagaggaaaaggagcgagagagacaggcagagagacacaaaaggcaaagagagagacagggagagacgagcatgagtaggaggtcggatcactctcgatcccagtccccagtgaaaaccgtaggtcgccatcacctaactacgcgtgcaataaagtcttctgcctg

SEQ ID NO: 30978 - DNA, 930 bp, Artificial sequence
  DNA replication origin
caggggggaacctgtccccagatcccatcccctcccaccaggttcctcccttgacacaggaggattacaattccagatgagatttgggtggggacacagagcccaacctgtgagggtctcagtctatcttgcagctcccctggggctggggctgagtacagttctgctggtcctgctctacagcacgtggggactctgcctgtgtgcccccatctgctcttcctggggatggtggctgcttcctcaagaggagggtggatctgctctcctgcccacccctctccagggccttttggagccctggccacgtcctccccaggtaagggcaggaaaccgggctccttgcccttcttgctgcttgggtgacaatcctggggtcatccataggccccatcactgttcccgcttctaaatggagggtattttggcacatcttcctggcggggtccggggcctcatccctgttatttattctatcttggtaaagccaggttaagacatctgggcaaggagatagtagagtggcccccaggaagggtgggtggagggcctggcctttgggctagcctggagcagggtgggagggggcaaggttaccaggaagcagggctgtcagggccaaaatcaggaggcggtgataatgctggtggggggacagggctgtgtgcttggcttggggtggggcatgagagccaaggtttgtcagcacgcagaggggtggctgactcatggactaggggctatggaacccagaggctgcccttacttcctggatcctgggagacttctggagcctgggtgtggggcagcctaggggtggaggtggggcagacaggggtaggggtaggagaggaggacttgcatggcagggtgcagggtaggaaaccagccaggggccagtttgcattggcggctcccatccccatcccc

SEQ ID NO: 30979 - DNA, 1021 bp, Artificial sequence
  DNA replication origin
cttctcgtcttcagccgctcctctcgccgccgcctccacagcctgggcctcgccgcgatgccggagaagaggcccttcgagcggctgcctgccgatgtctcccccatcaactgcagcctttgcctcaagcccgacttgctggacttcaccttcgagggcaagctggaggccgccgcccaggtacagcgaccctcgggccccggggcaagctgcggggcgagcagttaggccgcgcccgcgggctggactcagggcccggccgggagggcgggcgggcctcgagtcggggctgggcggccgcagggcgccgggttcggcgtgctctgcctttctctgttggggctggggctggggctggggctggggctggggctggggccggggcagggaccgtggccggagctgaggctggggctcgggctgaggccgcgctgcgggagctctggggagccggcggcccggccattgcgcccctccccggcgagcacacctgtgtggggctttcccccccgccccggacccttctgggcttgatagtgttccgggggaggctggagggtgttgggggaggacggagaggtcatgggagtccccgctctgcctaaccacctgactcagttctttctttggtttctctctacacctctcgggtgatagattggagggagtggtcatttgggactctggccgccgcgttggagcgaggaggggagcttctagaagggcgggagagggtgagaacgagaatgttaatcctaggcagcctctctgacttctccccgcctgctccagcccaggggctgggtttccaagatgatccgccccctccccctttccctcaagtgacagtgcagcagtgactttgttctctcctaacctctagagaagctgtgggaggaccccatctccgcttttccacctatcttcctagctttgcggccttcgaagctggtggatttattgctaccgtgatggttgcttagcagtaccttcctctcccaagaagctggctgggcgcagt

SEQ ID NO: 30980 - DNA, 878 bp, Artificial sequence
  DNA replication origin
gaggcccaggctgtggaggcggcggcgagaggagcggctgaagacgagaaggaggaggggaggaggcggagggccgaggaagagcaggcggcgagcgagggagggggcggcagctgccagccacatccaccgagcgcgggcgaccgccggaggagagcgaccgggggagcctggggggcgggggagagacccagccggagcgctaggggttgggaaggaggcggtgcgggcggactggcgggcgagctgcctacggggaagggggcggaggggagggaaggggaggagggccagcaaggagggatggagagggggaagtggtggcggcggctgcgtgcgcggccccgccggccgggcgcgcccccgtggagtgcgcgcgcacgccggggcagagggcggagcggcgaggacgagggcgcggccggcggggcgggagggcgtagggttgcccgcgcgagcgcagggcgggaggcgggcgctgcacctgtcggcgccgctcaggactgggggcggccttccaactggaaggagccgggaagggcttgatcagaggaaggaaaggcataaggggccctcgggaaactgaagcctacgcagttggtcagttcagccagggtcgcatgcataaaataccagttacaagcaaaaccccaaactggattctgcctccaggtcagcgaaaagccctgacttgagcctctctggcctcagttcctgttagtagcaaattcaaaggatgatttgaaagttttgttataaaacctttaatagccgggcgcggtgtctcacgcctgtaatcccagcacttcgggaggccgaggcgggcggatcacgaggtcaggagatcgagaccatcctggctaacatggtgaaacccc

SEQ ID NO: 30981 - DNA, 1646 bp, Artificial sequence
  DNA replication origin
ggccgcttcgtaccgcgtcctgagccgcctccttggctatggagaggcggcccccgagccaggccctccgccaccgcccccgggccatggccccccgccgccacccttcctcgcgcggcccggcccgcggggctcccggccgccgcagctgatggtgttccgcaacgtgggtcggccgccggaggaggaggacgtggaggcggccccggagccgggaccctcggaactgctgtgtccccggcaccgctgtgccctggaccccaaggccctgccgccgggcttggcgctcgagcggacctggggcccggcggctggactagaggcgcagttggcggctctggggctcgggcagccggcggggccgggggtcaagacagtcggtgggggttgctgcccgtgtccgtgtcctcctcagccgccccctccgcagccccagccgcctgctgccgccccgcaggccggggaggaccccacggaaacgagcgacgcgctgctggtcctggagggcttggaatcggaggccgagagcctggagactaacagctgctcggaagaggagctcagcagcccgggtcgcggaggaggagggggcggccggcttctgctgcagcccccaggccctgaattacctccggtgcccttcccgctgcaggacttggtccctctggggcgcctgagtagaggggagcagcagcagcagcagcagcagcaacctcccccgcccccgcctcctcccgggcccctccggccactcgcgggtccttctcggaagggctccttcaaaatccgcctcagtcgcctctttcgcaccaagagctgcaacggtggctccggcggtggggatgggaccggcaagaggccttctggagagctggctgcttcagctgcgagcctgacagacatgggaggctctgcgggccgggagctggacgcggggaggtgagaccggccgggggctggccgacaaacttccttttcttgtttggtttccctttttatctattgctatcgcgatcctgacagttcttaagatagggtcttcaggaggaggcagagacttgggaccaaaggtggtaacatctcgcataaggtcagcgctaattgtggaaacagctttcactcttaaagagtgcacactccgtgacacttctcagctggtttgcatctgtcttgttggaagatggtttcagaccatcctcccatccccatcctggcatggctttttaagtttttccaaggcggctgtgtgccattgtccctggaagggagattgctggaagtgtttggcctttggggcaaaaagctggtgttgcaccttgaccgccttgcttattctgtgtaccagcaccgcacctcccttcacactcatgcatgcaaatgacaggagaatcttcaaatgcaattgtaggccagcaatcaattggacacctctattcaaagttttactgttttcctggttgttcccttagatgaacttggcatatcaaacttgggtgctgaccactgtctctgagaatagaaaatagcagaccgggcacagtggctcacacctgtaatcccagcactttgggaggccgaggagggcggatcacctgagctcaggagtttgagaccagcctgggcaacatgcgaaaccccatctctac

SEQ ID NO: 30982 - DNA, 2510 bp, Artificial sequence
  DNA replication origin
gggggtggggagagaggtgccctctgcacacgccttcctaggtgtcagtgataagggagtactcgtgtgtgtgtgtgtgtgtgtgtgtgtgtgtgtgagctctgtgtcacatcagtcccatccctcccccagagcccccgctccgcccggagctccaatgccccaacccctccctcggtggcggccctcggcgctcggcgcgcccacctcgccgggtcacaacgcccgcagctctctctcccctctcggccgcgcacccacgcccggcgcccgctcacctgctccatgctgggccctgctatgccgtcctcgccgcgccggccccggggggcgcagggggaggcggcccctccatgcgccctgtccgggcagctgcacccggcgaccgccaagcgcaagtagcggctggtgtcagcgctcgagccccctccccgcaccgccccgccccgccggccccgcccctccgcccgccccctcccctcctcaccccgcccggcccgtggcagcaccgcgcaccggcgagcacacgcgctcacaggcaaccgcacaatcgcacgcacgcacgtgggggcacacacactcgaacacacacacaacgcgcacccgaccctcgcacatccctggctagcccgctccggcaccccctgttctgcccgtcctgggggcgctgctaggggagaggagacccctgcaagcgaagccgctttcctcattcctgaggctcatcggagtcggaaggaccctactctcatgctacaggggccagagagtggcttgccagcggtctcaccgcaccttggcaacagagctgatcccagttgatcccagaccaactgcctcccaagctgacgacccgctgcagggggtgactgacagcaggccagagacacccagagcactgggactcagggagacactgtgccacccccacctcgagatcgctgtgggaacagggagctgttgccgacgtccagcctatagttgaaggtgttctgaggcccttggctgggtgtgggaaaaagagatggggattcctgttgcccacccagtgagccatgttcctggcacttgccaagcaggaggagggggctgatctgtttatccactcccagagaagggggatctgaacccccagatactactggagaacataatgtgtgggcagcggggccgcccactctggtgaagaccaaggagatggcaaaaagacaccttcgctctctgacaccctccatcaggtgtggctcctgaccacccactgccctctgttctgcatctgacagggcaggacaaactgagaggggcatcacataaatggtcatgtgagaggtgggcacgctgccctgggcaggggtacgcaatccccagtggacaagggtggaaattaacctgccccgaggtgggcggtggggtggaggcattggtttacaggcactggctgcccacaccccctgggccaatgcccaggctggcatgaaggtggcttcaccacttctcactgagccctggcctctttgttaggcaccagaggatgagggagagggggtgggaagctgagatggggagagttaagatcctcagtggctcagacaaagggggctttataggctgggtgtggggggcatgttgggggcagggagacaggaatgtgggccagggaggccctgagctccgggcagcccattttggggctgaagttggactcccccagcctcccatgctgtggccctgcagggtatttgctgctttgctcctgggactacagccaggagtacccggagccctcatccttggcctcccctggtggcaatctggtgggcactgcccacgcactcccagttttccctgaccagctggctgccgcctctcttggcttccccgccagtgccctcccagcggccttgtggctcctgtctgctactcaaggaccctgctggctgcctggggagggagggacagacttgggtggggtcacaaggctatgaggtcaatggggccctttgtcccttcagacggagtctgtcttgagctaaagagactggagacagagaagagtgtcagccagcaagcctgcccctcgccctgagccgcactctcccgggctgtggtgtagcagggccctggctgtggaagccaggctccattctctccagttggtttccctcaggttctctttcagtgctgaggaagtgagaacaagaaggtggtggcggcggtagccacccatgctgggccttcaaatagctgttgcttggccaggcctagggtctggtgttgggctttgcaagatcagggactgtctgtcctcagagatgctaatctggctctcaggagtaaactcctactagccaaagtcatggtggctagattgctaaacccaatgctatcttatcaacacaccttgaacactgcaggaagattcacaagcagagttcctgaataaggaagggatagtaccacccacagtctctgtgccagcctgcagggtccacaagtgcagtcccccagtc

SEQ ID NO: 30983 - DNA, 918 bp, Artificial sequence
  DNA replication origin
ccctagcagcgcccccaggacgggcagaacagggggtgccggagcgggctagccagggatgtgcgagggtcgggtgcgcgttgtgtgtgtgttcgagtgtgtgtgcccccacgtgcgtgcgtgcgattgtgcggttgcctgtgagcgcgtgtgctcgccggtgcgcggtgctgccacgggccgggcggggtgaggaggggagggggcgggcggaggggcggggccggcggggcggggcggtgcggggagggggctcgagcgctgacaccagccgctacttgcgcttggcggtcgccgggtgcagctgcccggacagggcgcatggaggggccgcctccccctgcgccccccggggccggcgcggcgaggacggcatagcagggcccagcatggagcaggtgagcgggcgccgggcgtgggtgcgcggccgagaggggagagagagctgcgggcgttgtgacccggcgaggtgggcgcgccgagcgccgagggccgccaccgagggaggggttggggcattggagctccgggcggagcgggggctctgggggagggatgggactgatgtgacacagagctcacacacacacacacacacacacacacacacacgagtactcccttatcactgacacctaggaaggcgtgtgcagagggcacctctctccccaccccctttccagaaagagatcacccacacggagaaacccccatccccacttggtaagggtacagcccctgctccctgaacccaggcccaaggaggctacagactctgcagaatgaaggagtgggtgggctctgtgccatatgactactggttcgttgacccccagtccctcctggtgggacctcaagatacgccggtcccctccccctacacatcaaggggtttcttccagcccggctcccctcctt

SEQ ID NO: 30984 - DNA, 1606 bp, Artificial sequence
  DNA replication origin
tgggactgatgtgacacagagctcacacacacacacacacacacacacacacacacgagtactcccttatcactgacacctaggaaggcgtgtgcagagggcacctctctccccaccccctttccagaaagagatcacccacacggagaaacccccatccccacttggtaagggtacagcccctgctccctgaacccaggcccaaggaggctacagactctgcagaatgaaggagtgggtgggctctgtgccatatgactactggttcgttgacccccagtccctcctggtgggacctcaagatacgccggtcccctccccctacacatcaaggggtttcttccagcccggctcccctcctttcccagtcacagcagctgcagcagctgctgccaccatttcatgtcagtgaaaagatggggtgggctaagaggctttctccaaatgcaccccaaaggcagagctgcagccccagccaggttttgggaggggggtgctgccttcctttcacacaggctccatcagaatacactgagtgtgggctgggctcagtgggcggggatgaagaccccctctggtcagagttctcattccctgcacggagctcagcaaatcccagacaggctggaccagtccccttcagtgagcaaggggctgtatcctgacttgcagccccctgatctaagagaagccagcagcctgatggggggcagagcgagggggctgctccaggggttgccttactcccttcccaacccccacttggggtgaggtctcaggtggggtctggagaggcgggataggttttctatttgggacacacctttcagtgctcagccgccctaactcccttcttttcctggcccaagttctttggggctgttctgcctaaagcagtggctgggggccctggctctgagaccctcccctccaggctgagcacaggccccctatcactctggcagagggcttgtgggtggcctgtgatggtggtgaggagaggggtgaggaggagtggagggtgaggagtcgggggaggtggagtccgtggaaggggtgaccctaagttctggggggttggagaggggcactgggaggcataaagtgctctgggcatcctccctgggctgggtgtgagtctggggcggggctgtggctggtccagtttccaggcctgtttggcatcttgggcattaatttaaatggccaatggcagctccccagagcagcaggcctggctgctattgtcattactgactgaacacaaaaatagtggtagggcggggagggagggaagagtagtaaatgccactgaattgctcactgtaaaatggctaattttacgttacgtgaatttcacctggatttttttttaaaagaggggcagggctaggggccactactgcttcctgtctagagaatcctaaatgcatctcactgggcctgcagctcagcctgagttgttcctccaagtagcccatctgcccatcattggccttcatcagccctccgtaactgttctggggatcagccgcttcccctttcccagaggacagaccacagcctgctcccctgtaccctcccctgggaggagaaacatcaaggg

SEQ ID NO: 30985 - DNA, 848 bp, Artificial sequence
  DNA replication origin
aaggaaatggaagagtgcagggcaaggccaaggcctggaatatcaggttgtctagggtgttcacagagagaggggacaagccaggcacgaagtcctttgtatgtgagatcccagttaagcctcacaaaggcctgtgaaatagatctcaatcctcattctatggataaggaaaatgaggcccagagaactcaagtatcttacccaaggccacacaggatttgaacccaggcatttgggctccagggtctatacacttaacccgcaggctgtgaggctggtggaatggtgacaggctgcttaaaccgtgggtccatcttctgaaagagaggcttgagctagagactctggtagtccctgagaccaggggtgtggttcagattctccagggagagtgaagagtgagaggaaccctggcttgggggtaggcagagaaggaggaggcaacaaggactgggaggaagcaggcagccagagaaggtggcactgtgtggggcagagacaacagcctcgggggccagtgggtgtgggggtcagactgtgcagggaggaggggccccagggaggagggagtcgaatctgcccactgagcattaacaggaagggacaggcgacaggcaggcagcacaggtgggtgtggacaaggcaggtgtctgtttgggtggggaagacttcagcaggctgttgggttgaggagcaggtgccaaggagagacagccggaggggacgcaaggagggcgtgatgagcggactggaggaaaagtatctggagggtggggctccagaggaggaacccaggtttatgatgtcctcaaaggagccctgaatcaagaatctgaagacctgggttc

SEQ ID NO: 30986 - DNA, 1849 bp, Artificial sequence
  DNA replication origin
tcgggccccctcccgggcctgccaccagctgaatctccccgcagcggtgcccgcggtgcccgcgcccaccgtgcgccccaggctgtgcagggcgagcggggtcgcagcgaccctggcttggcagcccgctccccagcagctaccggccccgcccacttccctggcccagcaccctcacctgtgggggccggggctccgggcggggcgggatcccgaccaggcagaaggcgactccattcatcgggtggcagcggcggctctgcggccggggcacggctgggggcgccggcagggacccgggaggggcggggccgggggcggggccgagcgcggtgtgggggggccccccccggggtccgccccctcgcccctcccccttcccaccacccaccccgcgctcccttctgggtgccccggcggcctcgctcaagggccacagacctgcaaccgggctgaggcagaggcgagcgctgcctgagagctggacgtcagagcccagcctggcgaagagaggcggtctccaggagacgcttgcccggcctctaagggaccggcccagatagagggccatccaggcccaggaaagaggacaagggcaccgaacccagaactagcacggggatagggagggagggagagggaagcaaagagaaacagccagccagagatggtcagaaacagagatccagagacccagaaagcatgagaaaggcagagacaagatagagacagcgcagagagaggcagagaaagtcagaaacaaagatgaggagacccaggatcagaaaggggggaagacagaaaaaggcttagaggcccccttccctttagagacccctagacattgagacacaagggaagatttagtgcagggggtggggagacggggtgcccctcagtgtagggtaagcccctcccagccagagtctcagcccaggatcccagagaggagggggagtcgagcatagaagagaggctggcaggtgccccagcccttcggacccccacccagccagtcctggggctcaggccatggggccagcccacagtcctgctctgcagtgaacagcagtgacagcagaggctcccaatcaccagcaccccacagccacccttcctggcttcactctgagctgggcctaaagagatgccctggtcctgagccagcttctttccttgtcccccagaaggaccccctccagcccatcccctgacagtccagggagggacagtccttctgtctttcttttccttttttttttttcggcagggtctcactctgtcacccatgctggagtacagtggcacaatctaggctcactgaaacctctgcccccaggttcaagtgatcctcccacctcagcctccccaggtagctgggactacaggcccatgccacaccgcccacctaacttttgtactttggtagagatgaggtttcaccaggatggccaggctggtctcaaactcctgacctcaagtgatattcgcctgcctcagcctcccaaagtgctgggattataggcgtgagccaccatgcctggccttgtccttcattattagaaaatagctagaaaattctttctactatctaactcccattcttcctgcttcttacttcctccagcttatgcttacctctttcccatgactttttcagtttaaggggcttccatattccttttcccagattatgtagaaaagaaggcggaggataaaataggacttggagagaggaggcagtgaaagcgggaaggccagctctgcctgctggagtcaccaccttccttgggcaaggagacccctgagagccgagcagccccaagacctccacccctttaaccttgat

SEQ ID NO: 30987 - DNA, 1265 bp, Artificial sequence
  DNA replication origin
tcacccccactcccatccatgccaagaatgctgcacttcttccccgtgagccagggtcagcccgaggagaggggcacaagcacagggcctcttccccccacccagtccttctctgcttgggctgggatccacacaagcctgacctattcccgtagtcagacaccttcctaacagctttcctccccaagcttcatcttgtgccctgactaccctcaagtgtcctgggttcttgcctgggcactgtcactacataggctcagaccctctctgtgaaatgggacaccaacacctaccctgcccactcccattcttcctgtttattattattgaggcctttgaatccagcactgaatgtagaggatttactgctcccatggttcccaagaagaggtcaggtcctcagatgcaggatcttggaattcccagccaccttggggtggacccaaccacactgtgggcaagtggaagaagccgctggggccgggggcctttgggctgcctttggaggcgaaatgactggttatataatcgagattcaaatcgcatgccaaggagcacatggcagtgagagctgtcactttggggaatggggtctgttgccctggcagaggggagaaccacatgggatcaaaagccactcacccccagctaggccgcagggttggggtggagacagagaggggtgcaggggatagagatgaagtatgtgttgctggtgggggattgaatccaagggactcatgcttggattcatgacctccacccccaccccccgtccatcctgaatttcaagttcataattaggaaacacactttggctgaagggagtcggggagagatgcagattgagggagaactgaacacacatccagcaaccaaggaacacaccagtctccaaaagagttgcaagcaccagatcccaccttcaacactgccgggaaagctggggaggagggtccccaagtctttcagccctgtctaaagaggaacaggcctcagccctggccttgacctcaacctggaccccggggaatttcttttccgagctcagggaaactgttggcctgacagtgttcaacccttcaacttaggagcagggaggcctgctggggggctcctgcagggcgggcagccaggctcagaggtaagggaatggccctgatggggggatggggctgggaggcccctgctggcccctccccagcctcagcagctggcagatgaaagaacccaggcagagcagcccagcgctgagtaatgcccct

SEQ ID NO: 30988 - DNA, 952 bp, Artificial sequence
  DNA replication origin
cactacacctggctaattttttttatttttttagagacaaggtttcggcatgttggctggcatgttggccaggctggtctcgaactcctgacctcaggtgatccacttgccttggcctcccgaagtgctgggattacaagcgtgagccaccgcgcctggctggattttgtcatcatcctgggtgcccaaggggtttgggtgtatggtggtggcagtggggaaactagtaattccctgtcccgccaaccccccagcttctcctggaggaggagccagggctactcccggtggcaaggagcccgggcccgtaaggagcggaactggggaaagaaagacttcttatgcccagtgcatttgggggcgtccgggggtcggggaacagtggggcctttgtccccaaccgctgggaatctggccgaggagctggccctgggtctggctaggccctcggaaggcaggtcctctttgaagtgaccctttcaaagctcggcctgaatccctgggaggagagacagcatggggcggggcgtggggatgactgagacccaagggccgaggcctgagggatagaaacagacccggccttggcctcttggggtgtggaggttggtcggaggtgtgtgggccggaggaatgtggtgggctgggagaccgcgtgggagccatgtgggaggacaaccacgcaaggggccttagccccaagtgggggtgcacctaggcaggggccgagttcattctggcccgagagtgtttctgtctcctatctgacttctgtctggctctgtgctcctgtatcaacagctgcttcttcctttttaatttccccaaaagtgtgagagcttggaaagaatcgggtgtggacgccagactcagagctcttgggaggagggagaggtggggacctgggcaatccagagcttttcctgcttctgagagcccccgaaggctggaa

SEQ ID NO: 30989 - DNA, 884 bp, Artificial sequence
  DNA replication origin
tcatcatgcccagacagattttgaggattttgtgcatttggcattatctcagcccacctccctgatggtggtgggatgtctggagtgacaagtgcttcctcatctcccttcccaggcttccgtggctctggcctagtttgagggagagggagcacagtccatcctaaccctgggcaagagtggccctacaggggaagagcactgggtctggggagaccctgggaaccatcccctacccgtgggccagacatagtgccagtgcggggtgcccaggttcccggtgatgggggttatgtgtacatggagggcgctgcggagacacaggcttgcttggccggctcatcaacttggcctgctggggcttgtcaggcgggagtctctacccaagcaatgctgggaaccaggcatctgaatggggcaaaagggtggaagaggcctgagggggccgccgcccttgactgaggagactggagcagggttcagaggcccaggcgtgggcggggcgggcatgtgtcagtatcgcattgcctgcatgcctgggatgcacggatctgtggtgggatttgccctgtctgtgtgcgaggttgtggagtggtcatgggtctgcgtttggtggtgtgcaactggtgtacaggaccagatggagcttcaaacatgctggatgactctcttggggtgggggcattgtttgtcacctggcagtttggggcccacattctgggaagagtgctgagcaagctggaggaaggaaaagcaggcagaatcgaccctgagcccctctctcacttccttaaccacacgccctgcaacacgtcagtttccttcttgctcctatctctgacccttgggactcaggacgctctcctccccttccccagtgccta

SEQ ID NO: 30990 - DNA, 1120 bp, Artificial sequence
  DNA replication origin
tagcagaggccttggctagtggatgtgtaatcaccatcaccatttctagcccacttgactgttcaccaacaatatcaccacagccacttactgtggcccggggccatttctatggcctcatttgtagagaaggaaactgaggtccaagaggacccagcttgttatggcagcaccgggactccaaccccagggcctctcatcccaacttctatcctacaccaaaatcctagccagcagccaggaaagcggggcagctccagcccaaccccactcctgaatctaggaggagtccaggaggaagcgtcataagggttggacctttttgaggcagctaccagaagggagcaccaagcagatgcagctccccttccctcccattccaccatccactgtccccagcaagaacctgcgggagggtggcccaatggggaggtaggaaatccagcaagggggttgggggggagatggagggacagagatggggaggggcctgggggcagagggaggggaaggcagcagacaacaaagtgtcagaaggtggagaagcaaagggacgggaagggagcctaggggacggaggtgggaggggagggggaagggagcagagcggaccacgagggaggtcgggatcaagggagggaggaggaagagagaggaagggtgagggtgaggcgtgtgggggcggctgcctgtgtcagccagggagctggttttgttctcctgtttcctgtttgctgggctccccctccgtgcaagagctggaccccccacccccaccctggcggaagccagatgggaagagtgaggctgccacgagctgagtcaggagagcttagggggagagcgggaaaggactgcagccggggagagcaggacgcgccatctccattggcaccctctcccgccccacttccatcgctagaaaactaaggattcggtgttgggaccactcctgccctgacctgccctgtgactccgtcatactctccaaaggccagaccctcctagaccagctggaaccaccatcaagatgtccccagccatgtcagactctggggccccaggcggagggcaaccagatgtcttcagctccaagtctggcctctcctcccagcaagca

SEQ ID NO: 30991 - DNA, 1320 bp, Artificial sequence
  DNA replication origin
cccccttgctggatttcctacctccccattgggccaccctcccgcaggttcttgctggggacagtggatggtggaatgggagggaaggggagctgcatctgcttggtgctcccttctggtagctgcctcaaaaaggtccaacccttatgacgcttcctcctggactcctcctagattcaggagtggggttgggctggagctgccccgctttcctggctgctggctaggattttggtgtaggatagaagttgggatgagaggccctggggttggagtcccggtgctgccataacaagctgggtcctcttggacctcagtttccttctctacaaatgaggccatagaaatggccccgggccacagtaagtggctgtggtgatattgttggtgaacagtcaagtgggctagaaatggtgatggtgattacacatccactagccaaggcctctgctagccccatccggatggggcctgggaagagcaagagccaggaaggcgagcagggcaggggctagcacaacatggcgcttcccatctggctcacatgccagggggtgggagagggggcagctttgaatgattgtcagcttgtagtgaccctctaggtagagctaatgggtagggagtcctgggaaggagggtggttcccacaggggtgttggggactccatctgcgcttaagagtgtgtggctgtcactctgtgcagggcagtgtgtgtagcactcgaggggctgtggcatccatgcctggagtgcctgagctgtgcagtgtgtgcgtggcatctgccatgttgtgggggtccctgtggggtatgtgtggagtgcgtgggtgggtaaatgtgggtctggtgtgcttgcacatgcatctctctgagtatgtggaccgtatacacttgggcggatgtctgaggtgtgtgtatacgatgtggaagagtgtcctgtgtgtgtgggggggatagtgtgtttctggggtatgtccacatagggtgagtgtgtgtgggcaggtggatgtgtgtggtgcgggtctgtacagagtgggtagggtgtgcagcagagtgagggacacctggagcatgtgtggctgtttctctgggtggatggggctgatgcgcgcgcgtatgcgtgcgtgtgtgtgtgtgtgtgtgtgtgtgtgtgtgtgtgtgtgcgcgcgcgcgctggaagggtgcaaggtgtgcgggccgggggagagtgcgtgtctgggtccagggctgccgtctgcgtgtgagggtgcgagggtgtggtcgtgcgggggactgtgtagtgccctggcgtgtggggtgtgagtgtgagatctgggcg

SEQ ID NO: 30992 - DNA, 1789 bp, Artificial sequence
  DNA replication origin
tcgggcgccttcagccgggaggcgcaggaggcgcggagccaatccagccgtcctgccgccgtccgcgcgggccgtccgtcccttcggggcccccgggccccgggcccgcggctccggggggcgggcggggacccccggggcccgccggccgcccggggggtcgaggacgccgtctgccgggcgcctagcagcggccccgggcccccgcgcggcgcgcgcgtctccggaagcccggcctggggcgtactggggccggggcagtggccgggcccgggagcccccgccggccgcggagctggtgggcagcgccgtgtggcgcgtggagcgcgcgggggccgggggctggcgctgggagcgcgccgtcggcgtggactgcagcgccccggaaccgcgctgcctctggctgccctgcctcagccacagcgaccgccgcgcgcccgggccgcgccgggccagggtgagagccgcggggccggggccggggccggggcaggccttgtcggggtctgagtgggactgggtcaccaactccctgcggcctttgagctgtgtgcgccctgcattccaggactgatgcccctggaacggggagtgagtgaggcacttgagagatggggctgagggtggcaggatttgtggcttggagctctgccagggcttctgggatgacaacccccagtctgggtcgaggcctccacggggctcagccctctcggtttccaggcagtggaaggatggaagggaccagagcgtttgaagagacgctggggcttctaggaatcccagagggtatgggtgggcagggaccccgagttccgaggcaggcagaggcaccactgaatggagcagggcccacgacccaccccacccctggtaggggacctggacacggcacacgagggtttcctagtgggcagaggaggctgagtggcagacgggcccctgcaggtagtgagtgctctcagggctgacagggctgggctgggggactgccgtgtttctgatgtccgggatggaccaggctggtagggtgtgagtcacagtgggcgccatgcccggcctgaacactgtgctccctgcaatgacctctttatgctcccggggggaggagcagggctcctgggttctagtttctggtgctgccaacccaccacgtgtccacctctgcctaatttgtggcctaaggccgtctgccctgctgtcaccatcagctggtatttttggacgtctctttctttcctgacatgagggtgggagtgtttggaaatagatccaggccaggagaatttaatcagcaatgtccctgtgtcccctgagcaactccctctcagtccccttgtctctgtgcctaagtcagagaggcagagctgtgtgtgtgagctgtgcacctttctagttgttatcaatggctccttctgtggtttttgcacctatcacttcccccacctcaagatgagaacaagactcagttctgtcccaggtcacaggggaggagaggaaacatgcatgtattatagcatgaaggattgaggttaaacaaggaagaacttcccacaggggagatgccagctctggcttttgatgggtgtcctggtgtctcctcttcaagcaggtgtgtggtagctgtggctgtgtggtagctgacattctcaagagcctagttggaagaggtgggaggaaggggactggaaggaaggaacagaggaaagggagaggtagagataagggagggaatgctggtagtgcttggtgaggaggggacccggagaggaaggcatgcctcctaccc

SEQ ID NO: 30993 - DNA, 1025 bp, Artificial sequence
  DNA replication origin
cgctgccagcccaccccagcctgggcagcagaacttgaggctactgcccttcccactccttgcccctgccaactggagagagtgggggacaccctagggtcccaccctgtcactgccccatagctggcctcgcctcagcctgggggagctgtacaggcagggccttgagacttggggtaagcagtccacctcagatccccccctccttcctccctctccccaggaagagcaaggggacaatcgaggtcaggggtggaggtttccagaagggcatcatgccaggcatggcactgtgattacagtgattaggagagtgcgtccaaggcagaagccagcacagcggctcccagggcctccccagggacagtgacctcaggggcaagtaagccgccatctggctgggacccatgagaccagggaggtgggcactgggcaaagcggaccgccggggctccaggcacaaagaggcagtgtgtgagtgtgagtgtgtgtgtgtgtgtgtggaagggtatgcttgggagtgcagggcctgcttcgtgcagtgtctgggccacgctctctgtgtggcaggctggatgctgtcttctaggtatgctgaggtgtcgaatgtataaatttggagtcctgtgacacgggtgggcgcacgtgctgagatgggcaggaggatgccgcggtgtttgcgagcatacatgttgtgatagtgcggcgtgggtgtgtagttgtggaggtccgagtgtgcaaggtactatgctgtttgtactgcagggagccaaggggctggtgagtgtgtcgtgttttaatgtttgtgggtgtgtgttgtggtgcacttcgctgtatgagggtgaactgtggcagtgggtgcttgtgtggttgtctgtattgcggcacgtgcctggtgctgcatgtgtgttgtggtgtgcttcgtgctatacagagggtgggactgtggggctgtgctgtgtggctgtgtactgctcgggtactgtgtggtgcacatgacggtgggtggggtgcagtgtgctgag

SEQ ID NO: 30994 - DNA, 776 bp, Artificial sequence
  DNA replication origin
ggcgaggccagctatggggcagtgacagggtgggaccctagggtgtcccccactctctccagttggcaggggcaaggagtgggaagggcagtagcctcaagttctgctgcccaggctggggtgggctggcagcgccagatgacagcatctgggggcctccactggcccccgcatctctgccagccggagggtggggcccaggcattcctgtggttggaagccaaggctggaggccaatcgggcctcggcagctgctgacgccaccaccgacgcggcgaggcccctccacacccatcctctcctccctcctcctcccgccagccagccgagagagagtcgggtgggggtgagggggagccgcagggagggcagacggagggggaccggaggccctggccagggcaacacagtggtcagtggcggggttagccggagctgggggtgggcggaggcgggctgggatgctgccgccgccgtgatgatgccgggagcctggggagacggcgggatggcaggagggagaggtatgtgtgtgccggccctgtgccagctggagggggctgagtgtgcgggggtgtggtttagcttgtcctcatcacatgatgtttgtgcctgggactggaggtgtagttatttgtgtgtgtttcattgtgttctactgtgtgtgtgtgtgtctctgggtgtgtatcttccagtgtctccttgtagtgtggtgtgtgtgtgtgtttggtttcaccctcccaccctttggttctttgccttgagttaggctcctg

SEQ ID NO: 30995 - DNA, 1052 bp, Artificial sequence
  DNA replication origin
ctggggccctggcaggtcccgagttgggcaggcgggggtgcgggcagacgaacgctgggaagcccagccacaccgctcaaagcggggtgacaccagtgcccctggccccagtgcctcggcagaacgggtggcccggctcaagtagtcatctgagcgagctcggtgccagccctcctggcccagctggctcaaagcatcctgggaggtggagcagggccacgggcggggggcagccacctcctccaaccggtcctgggaggcgctgcgggcccggggggccatggctgggcaccgtctctcccccgcccggcggggtacctggtttgacagccagtgtgacaaggcctgctggcactccagtctgctggggggcacccggctgccaggctctgggaaggcacggggcgtccggggctccgaggagaggtgggggaaggcaccagggctggggcggggctggctcatccccaaggaagagttgtccaggtgggcacgggcagcaggtggcacacggagccccgggtcactccaggcagcaggactccgggggtcactgggcagtgctgaggtgggctcaggcaccatagtggccctggtggaggcccgggcaggaggggcgtaggtcttgcgggggtagcagatcgggggtggctctgggatgctgcgggcctctccagaatacggctcgttccctttcaggtaggcatcctgggagtaggcctggccagagacacagagacaggtaagcagggccagacaagtcccacagggtaggggaacggcagcccgaggaggtcaaggagcccaggagggaaatgaagggagaggaccaagcggtggggggaacgagggagaggcataagtgggtgggggtggaagggcaggtccagggagagaacaaagaagaagcaagaagcctttgagacgcaggcaaactccagcaaaagtgggatttcgctaagactgtgacaaggactgccctagccacaaacattccagcatctgtttcctggggtcctcccccagtcctggcctccaccgcctgcctgccc

SEQ ID NO: 30996 - DNA, 1419 bp, Artificial sequence
  DNA replication origin
tgtgctgtggaagaagagactgcctctcccggccacagcctagagccttccttactagcagaaggggctgtgtctctgctccaccgaaggctggctgggggagccagggctgtgtcttccccctgccccaggcctcctccctctcactgtctggtagggtgagctcatctcccatctaccaccatccctctccattaccctgcatcttgctctttctccccagccccgtctatcctgctccctcttggacacctcatattcaacagtcctgaactttgtccccctctcactcccaacacgggggtgaggcaccacccccaagcccggccagaaacctgggcatcacccagccactctactctcttgcctctccctctcctgcatccagtcgaaggcaaggcaagccttagagggttccctctgctctcaaaagccaaccccagtgactaatgagacccttgggcctgaaagggtcctcacaacctggaagggggtcctgcctctctcccttcagggtctttgcatattctattccctctccttgaatattcttcccctgataaactccttctcatccttcaagtcttagcccaaatgttctttctccaagattctcaccatagcccttctctgagcccgtctcctcaagctccctgtcccacgacacgcccatcccaatggattgtccctgcatgtccaacaccctctgctgggccatccagtccaggagagcatggagccatgcacagggcctgacacaaatatctgttgagtcgatggagggatggagggtggatggaaaggacaaagagggaaagatacaaagggaagatggaaggaagaatgggagaatggaaggaagagtcaaaggaaagaaagatggatgaatgggtggaagaaaggatggaacaaatgaatgaacaaaagaaggagggagagaggaaggaaagaaggaagaatagatggatggatagatggatgaatggatggaacaaatgaatgaacaaaggagggagagaggaaggaaagaaggaaggaagaacagatgatggatggatggatggatggggagagggaaaaaagaaagagtgcgtggaaagatgctgaaaggataaatgaatgagaggtaggatggaagaaaggatgacagagaacagaaagaaagatggaagaacagatggatggatggatgaacagatgaatgaattgacagagaaacaagatgatcccaccagcacccagccgaattctgcccatggcagacaggcagatggggtacagcaggacacagacagccgacagctaagtcccccaggacagccacatgtaccatcactcaccaataaaggggatggaagccagagagtcttcggtggtggccaaaggggccaccttcctgcccaggcgttcccctcgccc

SEQ ID NO: 30997 - DNA, 1044 bp, Artificial sequence
  DNA replication origin
tccccacaccctcgctcctgcgcacgcacacacacttgcagctctcaccccgtcggtgaagaagctccggagcatccgcaggctgggtatgcggtttggcaggcgcctggaaagcgagggtcgagggtgagggatgtgggcagcaaagctgggacctcactatctcgtcacccaccaaaccccaagcccagaagccttccagcgggggaggcacactgtcccatgcatagaggacccccagggccaagagccctgccccagagcagctggccacggtggctgtggccaccccaccccgtgtccggacagggcctcaccgcagaacccggccctcgtcgcggaaggtgttgagtccatcatcgcaggacttggagcgctccgtggtgatggccagcaggtaggaggagcggcggccagccttgatgctgcctgcaaagccgcccacatcgggcctcagggtcagcggggcagcaggtcaggggcttcccagagccctcccttctgggcaggggcaggaggtgactctcccaaggggccgcaggagaagcggaaaccagaggaagaggccagacatcaagcagcaggcccaacagagacccctgggactgggcagcgagggagagggtggggctgggggtgtggggagtgctcactgcagtcctgcgagtaatggcgtccgagggtgaaagtgaaggtcggggaagatgggctggtgcccaggacaggggctgagttcatggcactggagaccacagcagaggcagggacgtgcttggcttggaggtcaatgctggggctggtgggctcatctatgcatgtggaaggagaaaggtgtgaaggcagcagacagcggagcctgcctgcctccaccctagccttgccagcccccgtgccactcgcctccaggctcagacacatcccaaagggtcctgctggcaacatgcccactgtcaagcatgactggcccactgtccagactgtggccatggaatccttaccctcaggagtggggctgagccaccctccttagaccgggctccagag

SEQ ID NO: 30998 - DNA, 1169 bp, Artificial sequence
  DNA replication origin
cacgaaagggtgagaagccacaaaactgggagacagtggaggggcctgacagggaagatgtctccttagagggtcctggggagaggggtgctgggagccagggcgagaggtggaagatgagctggggaattgggtgcctgcccagagtgtggggccttgatacccaggaagagcctgtccagggttttattattttattttattttatctatttttgagacggagtttcactctgttgcccaggctggagtacagtggtacgatctcagctcactgcaacctccgccccccaggttcaagcaattcttgagcctcagcctcctgagtagctaggactacaggcgcctgctaccacacccagctaatttttgtagttttagtagagactgggtttcactatgttggccaggctggtcttgaactcctgacctcaagtgagctgcctgccttggcctcccaaagtgcttggattacaggcgtgagccaccgtgcccagctctgtccagggttttaaatgtgggctggggatggcaggagactggggttatgtctgtgacaggaggagccaatcccattgcccttgtccaggtgagtgaggctgggggccctgacccaaggcagtggtgtgaggccgggtggagcagacactttagagagagattccaggggaaggagggccagggcttgccggctgctgggaggtatggaaggaggaggaggcgataaggttcctggattcctggcttgggctgagggagggtggtgggtggtgggaccctccctgggccatggcatactggaggaacaggtttggggagaggaagccaagtggctccactggggctatgtgagtctgagggccctgggacagaccccagtggaggtgtcctggggacagaggctctgagggcgtggcactagagggaggcccacctggggatggcctttgtctgtcagcaccgacgagttacctgtgcctctgtgcaggggcttgaaggaagaaggcaagagacccggctgagccttgagagaagtgggggggccggggaggctgacagagaccaaaaagagccagcaagttggcagtgacccatggggtgggagccatgaggcaaggagggaccagccatgtgcactgtgcgaggagagccacgtgtgggccagccctt

SEQ ID NO: 30999 - DNA, 2221 bp, Artificial sequence
  DNA replication origin
cggttgacttgtcctaggttatgcctctggtttagcctcagagaggtgcccttgtcaccacctcactgtcacattaaaattctccctggagggctctgctgtctcctgctctgaatgtccctgtccccatccagcagttctgtgatgagcagggctcacagctcaggatccacacgatgggaggccagatgtgggctgtgcccatctgccagccacggggtctctttgtctggtttgttcggagagctgaggcctgtgctggatgtggagccaccagccagcagagaggagctcttggtctgatgggagatggagctcctgccctcagggtgctccaaggatcattaattcatttattcaacaaatattgatgagcccttgcatgctgctgctgtaggccctgggatatggaaatgagaggacggacaagctccctgtccccaggacagcctgaggctgcagtaagttcttggaaaggatcaagctgatcagaagcgggagctgcattgagggaaaaatatggccagagaaggcctcactgaggaggtgacgttggtgatgctggagctcagatctgaaggggaagaaggaagcagccacatatagaagtgagggagggggcttaggcaaaaggaacagcaagcggagaggccctgagaaaggaaaggcttggctcgctcacctgcaagggccccctggcttgacatagtgagaaaggtgtgaagatgaatttggagaaaggcagggacagaccacaggagaccttagatttgattctgagggcgatgggatcccttgagaggatgctgagcaggggagagatgtgatctccttttcattctaacatgatcgctgcagctgctgctggagaatggttgcaggagcgagagtagagactgggaaggtctgtgcatcctctaagcaagaggcgttgatggcgtggaccgggtggtggcaggaaagacagagacgggatgttttggaggcagaatagttgtgacttcctgatggatgggatgtcaagggcgaggaaaagggaggagtcaagggcagctcccaggtttctgggcaactggatggattgactgggctggaaaagatgggggtggagagtggagaaggggtttgatggtaagaaatcacatggcctggcaagtattgtgcaaagtgcccatgggacctgcaaatgaagccactgagcagggtgggggtgccgggctgtggctgggagagacgctgggcttgggaatggccatcagcagatggacctagtttaaaggcacggcagaggtgacatccttgagggaggtgtgcagggagaggagaggagaggagagtcaggacaaagttctggagctccgcctcctttagggcggggtctcttaccctcagctctgctgacattttgggccagataattccttgttgggggaggctgtcctgtgcattgtgcaatgtttagccgcatccctcagatgccatagcacaccctccagctccctccacacaaatgtcccgtggggactagtctcctggctgtttaactacaggtgtagagggtgggggagggcaagtagagaagactaggaaggagccagtggcattaggaagaaagctgggaacgtggggtctcaggtgccgagatagggtctggagagggaaggaggggctggctgtgtcagatgccgctgaggggttaaggcaagttggggagaagcagccactggctttggccacatggcggttctgggtgtccctgagaaggagcttctgggcaagtggagtcttgggtgggcggcaggaaagtggggagaacaaccctctaagagtgcggacggcttctgagcaggtttgctgggatgaggggcagcctggggaggggcgtgggctgggaatggcatccccaggatttcatgtatggagggccatgctgggtgtctgagcattgccaccgctcggtgagtgttgatgctggtgtttagagggggagagggttggggtctgctggggggctttaggatgatgggtaggggtgtctaggcaggcaaggggctgagaaggcattggtgggctgtgggcaggaggctgcccaggtctagccgggtggagcagggggctcctggtaggcagcgtggggtccatcccctggctgtcctctgtctgctactctgagagcagtgggcaaaactggcctctcaccattcctgtctcccccaacccc

SEQ ID NO: 31000 - DNA, 863 bp, Artificial sequence
  DNA replication origin
tcctgtctcccccaaccccgtgtctccctgcagaaagcgggcagcggcctgcgccagtggaagcgggtgtacgccgcgctgcgggcgcgctcgctctcgctgagcaaggagcggcgggagcccgggccggcggcggcgggggctgcggcggccggcgcaggtgaggacgaggcggcgcccgtctgcatcggctcctgcctcgtggacatctcctacagcgagaccaagaggaggcacgtgttccggctgaccaccgctgacttctgtgaatatctctttcaggctgaggaccgggatgacatgctgggctggatcagagcgatccgggagaacagcagggccgagggcgaggtgagggcccggccagcccggcagccacagagggcgggcggggtggcctctcaccggctgtggacctgggatgcccgctctgagcctcacttccctctgctagaaaggggggctgacaggagtgcacctcgtgattgtgtcccccaaggtttcggggtgaggagggtgcacaggcagggctcacgggggacctggcgtcctcaggtgcggggaccggcagtcaccatcctgaccctaatgatgacagggatgattgtgactgtgttaggatcgccttgagcaggctccggtgtggagtggtcagctccaggccagtctcagcttttctcagcaggcgaggaaggcaggggcctcctatggagtgtgttagggcatgagtgtccccgcaccagaactgcactgggctggcctgtctgcagaaggatgagcacattgaccttgtgaggaggccgagaggcttggcctttggccacaggtgggcaggggtggagccaagggcctcggcagggatt

SEQ ID NO: 31001 - DNA, 1310 bp, Artificial sequence
  DNA replication origin
tcttggctgtccccaacaaggcttagtcaggggatcccaagtcaccatcactatggcagtagcagtccctcctggggcacctcctccatgcctgctcagtgtctgccaggacggtggcgagtgctgcatgattctgcacccggccctgagccttccctgttagccccccatgtttattaccgaggagactgaggctcagagaggctaagaggcttccccaaggcctcagctggtgagagggtgctggggagtccaggcctggtctttctcactccagggtctgggctgtccacctggcaggtggacaagaggggaagcagggctagggatgagccctggggtgggctggctgtgggcactgacatgatccgctctctcctctcctgcttcaggaccccggctgtgccaaccaagctctgatcagcaagaagcttaacgattatcgcaaagtgaggtgaggcccagccctcgtggagcagtctcctctgtgggggtggtagggggctgaaggcaaaggatgtcttcctggcccacctccagggctgccctctgctgggggaaggggtatccagggtctccaggctgcagttaggcatggaggcattgcctcagggtggaggggaggtcccgaggggcgggaggccagggtgggtggcctgcttggccaccccaaatgaagacctctcctctccccctttttcctacacagccatagctctgggcccaaagctgattcctcccccaaaggctctcgcggcctggggggcctcaagtctgagttcctcaagcagagtgcggcacgtggcctcaggactcaggacctgcccgcagggagcaagggtaggaaggtggccactgagacagggtggtgtgtgggggcagggggcatggggaggggagggcacgcgtgtgtgtgttgggctgtgtctgctcatgtgtgcctgactgtgtgccagggctaccggtatgtctgtctgcgtgtgcatgcctgtgagggtctaggggctctcagggtctcggggtggaagggcctggagcctgattcccgtccctgacatccctgctgggtggtcctctaatctttgctggtgtctctgcagggatgagaggcccaccctttccaagagcaacctttcccatttcactcacctttggctgttagaaagttcttacctggctgggcaaggtggctcacacgtgtaatcccagcactttgggaggccaaggcagggcagatcacctgaggtcaggagttcaagaccagcctgaccaacatggtgaaaccccaactctactaaaaatacaaaagg

SEQ ID NO: 31002 - DNA, 1139 bp, Artificial sequence
  DNA replication origin
ctagagcaaccctgctttgccctgtctgttgtactgggttttcatgtacaattttatttgcccaaaggggctctgataaaaaagatattttggaaaaccgtgaacgtgggcagtgatgtcccacgaatcacacacgtgaaggctcatggaatacacaagtcttcctgtccttggagaatgaggagctgagacaagtgtgtgtgaaattgtggacaagagaaaaagatgatctctcatcagggaccacactgtgatgaggaaggagagggtgctcaggctggagcaggtggtggctggagggtttgagtattggaggaatgaataggagggggcaggtggacgggaagcctttcggggtgtgagacgatggcattttccaaaaccccagcaagggccggggagggcttgagggttaggacagagagtggatctacctcctgggcttggaggtggggagggtgaggccccagggggacagagaaggcatttgatggcttcactgaagacttcgaccttgatctgatggacagtagggagcttctgatggttcttaagctggggaggcatcgtgagaacaaagttcaagaaacagtaatgctcctgctcatgtccattggatacgaatgcggagggcaggggtctggggagaagtcactgatctatggaagcgctaagtgtcgggaggacttggtggtctcaggggaagggggaggatgggagcaaccctaagagttgtctgcatgagagggaggaaggaggggcgaggaagagccgcatgtttgagctggggctggtggtatcttcccttggcagaaaccagggagtggggcagcgtgaggagaggcggaagggaggggccgtctcagggagtggctccattggatttggggtgtggaaagtcccttgcatggggtgagggcataaacaggcgctatattgagcctggactagagagtggcatgggtcctgctgcagctgaggcatgggatgaccaagggtgggccgcagaacagcaggggccacgctctgagtgggacagaaggagagggccgccagtgaggctggggtgagggcagacacttcactctggaggaaccaggaagcactggccagggcattgggtttggcagctgggagat

SEQ ID NO: 31003 - DNA, 2355 bp, Artificial sequence
  DNA replication origin
agaaagcagtactggccaccatatgctccaggctgatcctagcagtgcaaccacattgcacaactccagggggtgccttctggtgttgtgcattgtgggcaaccatggcccaggagccacatgcctgtgactcctgagtccctgacatgctctggttttctcagaactaattaatgtgagagcaaggacagtggctgcagtggccacaagaggcatctgggtctccattcattattacaccatggctgaaacaagaggtggtctgtgaggaggggttgaaagggcagcgtgaccttgtcaggtcattccagcccaagacaggaaccagtcccagcgtctgcttctacaaggcttcctgtgttaaggggacttcattcaccaattgtttgttcatttcatgtttattgagcacctgttatgtgccatgcagaaacaaccaagtcacagcctttgctcttaaggagctcagagtttgatgaggctgatgtgagaagagctaggagcatagtgagatgacaggaacatagagaagtgatctcccatctcaggcaaagggagggctgggaagtggctgtacagaggaagccatgttcgagctgggccttgtagggtgagtaggagctcatccagcaaatagggcagggggacattaagggctggcagcaatgtaacagtgtaggtcacatcaaaggaagggttggtagggctgtatttccacagtgagggctgtgttggggttggggtcagggcagagcagggcagtaggctgggaaagttggggctgggttatgaagagccccatgtgctgaactggggaacttgtgctttatcctggtgggtgctggggcatgcaagcttctgagcaaagctgggtgaggatcagattcctgcttcagaatggtggctctggaggagagacccgggctggggcaagggtggaggcaggaaaccctattaggaggggcaggagggcccagagagggcagaatgagggcctgccggaggaggaggaggagttggctttgggagccatttcaaaagaatccaggacttggctgtgggtggaggagagagggaggagtcacaagaccgccctaaggtgagcagtgtgaatggaggcagtttggggcaggggtaggtaggatgctgtggttccggataggtgagttttaagagcctacagacacccaggtagaaatggattctcaatgggaagaagagtcccggagctcaagtgagtgtggtgttggacagggaggcctggatagcagcgctgcttgggaatggtattttctagggaacacgaacagagaaggcaaaggggccaaaaacagtcctgggaacactgagtctcagtggggaaggcaggggaaggcaggggcggggcggggggcgggcaagaagaacctcccaagaggcagaggagaggccagaagggcggatgaaaaccagcttccagaaggccatgggcggcagcatgggccctcctgggaaagtgtgaaaggccaaggccccaaaacaccacagggtgtagcagtgagggctggttcaggtgagaacagcggcatgaagttgcccaacttggggttggaaatcacagtttgggagcggctccaatccaaaccatgacaccatacgggatctttcagccacttgcaggggcggagctggcggcgggattgacctgggattggggattggcggggtggggagctggtggggtccggcggaaaggggaggacgtgaacttgggcgggttgccctggagaggcctgtagatgctgggcaggtgggaaggcaggtttccaggtggcagcgggtggagaggaggtgggggacttgtggtcagagagcgcccctggcggggatttggggatcagcatgcaggaagctctggtgatgacaccccaggggcgtgtgtgaaacggattcaggctgccaagcgttattcactgtggagagattgtcatcaccagagccgtgtctaaaggatttagccagggctggatacggaaaacagaatggaagggggctttgggagaccagcccacctcacaagaaagagctgagagcctagatttgggccagcgggggtagtctctggacggagggcggcacggggctggaggaggagcgttttatgatgcggccgtgggtgctggccttggctggggcttgtggcgactgggtgccgtgacgtgggggtggaccgggtagagcggggtcggcagggggccgagtccgggcgccccccgcatcctgacctgtctcccacacagggttcgtgggcccccaagaaggagccgtacgcccgggagatgctggcgatctccttcatctcggccgtcaaccgca

SEQ ID NO: 31004 - DNA, 1082 bp, Artificial sequence
  DNA replication origin
ggggcggtccccgcgccccggagccgcccggctcggcgtcgtccagcagccaggagtcgctgcggcccccggcggcggcgctggcctcccggccctcgcgcatggaggcgctgcgtctaaggctccgcggcacggcggacgacatgctcgccgtgcgcctgcggcggccgctgtcgcccgagacccggcggcgccggagcagctggcgccgccacaccgtggtggtgcagagcccgctgactgacctcaacttcaacgagtggaaggagctgggcggagggggccccccggagcctgcgggcgcgcgggcgcacagtgacaacaaggactccggactcagcagcctggagtccaccaaggcgcgggccccgtcgtccgctgcctcgcagccgcccgcgcccggggacacggggtccctgcagagccagcccccgcgccgctcggccgcctcccgcctgcatcagtgtctgtgatccccacctcccgcgccgctcgggcgccacccctccctagagcccctttggaaccaggaggcttcaccagcctgcacctcctcttctgtggcccctgggtgcatggtgtgggtggagggcgcagcaggcagtgtctctagttggtgtgctggaactggcagggcagaggagaaggctggggccggactaattgaatggaagggggttccagaggtgatgagcagaagaggagggggcgtgggctgctggggtctgtgtccctgcacacatgcgcccgataggtccttctgagcctttctgtggctgcacttggggacccttgtggaccatggggtgtggctagggaacccctaagtttcagactaaaggaaagatcctgggtgatgctggctttttgcttctttcttctgccctcccacctcagcttgtaagcggggatgtgtgtatgtctggggagaggaggtgtagggtgcgtatgtccatggggggaggggcttgtgtgtgcagtcattgtcccaaggtgtttccagtagcgacttctgtccccctatccccaccctggtccccactttgcgcccccgggctccctgcctttggtgcacacaggat

SEQ ID NO: 31005 - DNA, 954 bp, Artificial sequence
  DNA replication origin
ctctcaaactccggcctcgtctccagcctgtccgtctctactccaggcccacttgggtgtgagtgggaggaggcagagcagccacagaggaagtcacagtcttgtcggagcttagacagggagtggggcatctccaaggccagtctccctaagccccgctctctggcttgatgtatgggttggtccgatgtccccgcgttcctccaggaaggtatcgagaaacgggagaggggtctcccactgctccaagtctccgtggttcagagtttgtttggagtattcttgggaagtgaggggaaggcgggaagggggtgcaggagcttcaggatggactgggggaaagagtggtgaaagagaagaaggagagatgtgacaggtgcggccagcgagaggccagctgggatcaaggaaggtggtgtgtttggtttttagttttactgtttaaaaaaagataattaaaagttaattgttaaaaaaaaaaaaaaaaacaaaaccaaaaacaccaacagatgatgggtaggggtcgctgaggagggccgcaccctcctcttcagggcacacccctcagggcgtctggagagtagggtggggtggggtggagatgaaggaagagaggggagaaatggcaggagtgagggagggggacaggcggggcagcggggtgaggggcttctagaaggagatggaagaattccttgccccaaaggaagtcaatacagggatagaggttctggaagccgagggcttttctgagactgggctcgaggtctcattcgacccgctcatctctttagatggtttagtggcctggaacaaaaacaggggtcaggggtcagagagcggaagggagcgcctccatgctggcccccagctgaagttttaaaagtggaaaacctccacaaatccaaggaaattaactgcaaaaggaagaagccagaggggcatctggagaga

SEQ ID NO: 31006 - DNA, 1417 bp, Artificial sequence
  DNA replication origin
ccaacagatgatgggtaggggtcgctgaggagggccgcaccctcctcttcagggcacacccctcagggcgtctggagagtagggtggggtggggtggagatgaaggaagagaggggagaaatggcaggagtgagggagggggacaggcggggcagcggggtgaggggcttctagaaggagatggaagaattccttgccccaaaggaagtcaatacagggatagaggttctggaagccgagggcttttctgagactgggctcgaggtctcattcgacccgctcatctctttagatggtttagtggcctggaacaaaaacaggggtcaggggtcagagagcggaagggagcgcctccatgctggcccccagctgaagttttaaaagtggaaaacctccacaaatccaaggaaattaactgcaaaaggaagaagccagaggggcatctggagagaggggtcccttgaatggtggaggggtgggggcagaaaaggggggggagggggcacgaggttggacaaagggcctgggtggtcagagggcaggcccatagttactgagagcagagagagaagcagagcgaccagagaagcacagaagaggccgcgcccaggatgggcagatggggaggtgggggtgggggagggcaggggaggggaggaagaagtgaaacattagctgggacaggggcacaagccctgcgggggacgggggtcagggtggggaaaggctcctagtcccaaatggcccgctgtacagccagagccccttccagcttcatcctggtggcaacagaggagggggcttatcctcccaggggggaataaacacttcaaagaccccgtccaccaccaccaccaccaccacctggaaatctgagaagaaggcgctgccgcaccagcctcccgcccagtgcaggaggccccactgcatgccctgcaagcacttgtcgccccagttggtaacaggaggctactccctcatgacttgtcctgccctcactggtcagttctagtggtcagaactgacccctcatcctcctcccaccttcggtggactcccgcaactccaccggtcctggaggcttttcctctgcagctgcggtctccaaagtgcggtttgagagctacgtgcattacctcatcacctccaggggccaccctctggcatgcatcgtgaatgcagattcctgggctcccctccagaatccatctcttgtgtgggctcatgaatgtgcattttaagcaggtgccccaggtgcctctgctgcacacttacctttgagatccactggattaaggctacacagacccaggtttctccttgtaattgtacccactgtccctcctggccttgcttagctactagtgtgagaactgaatcacccagatttaaaaaaagatccaaaagataagacagg

SEQ ID NO: 31007 - DNA, 1191 bp, Artificial sequence
  DNA replication origin
tcacgcctgtaatcccagcactttgggaggctgaggtgggaggatcacctgagctcaggagtttgagaccagcctggccaacatggtgaaaccccgtctctactaaaaatacaaaaattagccagtgtggtaattagcctgtagtctcagctgctcgggaggctgaggcacgagaatcacttgaacccaggaggcggaggctgcagtgagctgagatcacaccactggactccagcctgggagacagagcaagactccgtctcaaaaaatagagggagtcacccagaaaggagcccagaggctccaggtggaggctggggagaggatgctgaggaacagagggtctgcacagccctatgcaggtgtggggggggtctacaaggccacatgctgcagagcagtgggggaggggggtgaaaagagcccatctcgatgtcactggagacccaggcaaccccggagatggggtggaggctgggccataaaggcatgaggctgacaccacagcggaggagctgggctctggggagggagggactagggtgggaaacagtgcaacatcattagagctgagggaaggggctgctggagaggctgaagcactttgtggtggggagggaggcagtctggacttgtgtcctgccccccacttgctagccgtgtggccttggattaagcctcagtttccgcccccgtcacatgggggtaatagaccttcctcagtgtggtgagtgtgagatgagataatgcgcatgcctggccccagcgaaagctctgtcagtgtcagctgctctgctgggcacccaggagggtccagcccggacaggacaaggggaactcatccctggcagtggcaggaaaaagatctggaggtggggctcgcagggtgtctgggggccatgaggaggcaggtgggagctgtggagaggctgcggggggctggagggctgctttttgagaaattctcctgggagccagtagggaggcagggccttgggtgcccagggctgtcccagggccagtgcagggaagggttccaagattcctaggtcccgatcctggctgtgatgccaccttgctgtgcacctttgggaagcccctctcctcctctgagctgccccctcatctgaaaaagagatggactcacccatctctaacctcttgcctctgagtctagaaccttctctaacg

SEQ ID NO: 31008 - DNA, 937 bp, Artificial sequence
  DNA replication origin
gacacaaggggccaccagacacccaggctgctggagtctcagggagccccccagcaagcagcggggaggaagggttatgcgcctgtccttggagtgggggaggggtgagtccacatgtaatgctgtggcagtggctgtggccatggtgggacttgggatggtgactggcgttttagcgggttagcgtgggaggtgaggagaggaagctgtgggggcacaggcagagagagagctgtgagaagtggcagcagccccgttaccttccgtgtagggcctggggctgagcccccggggggccccaggtcctggggggacagcaaggtggggatcagctggcggcggggcgtgggggggagggaagacactgagcttctctcaaacacctggggagcagaaggtgggggcaggtttggaggagggggcactagggaggatgggggtgctggcctgtggccccggcacccttggggagggtggcctgggatggcatcggcccccagcctcaccccttggtcccttgccatagccgccagccctctctgccctcatctggtcacctcagagccctggtagtccaggtctcccgcactggagctgggggtggctgagaacgcttgagtgtggtgactgacactgctgggagagtcgaggcatggggtatgagagtctcagagctccgtcctcagaatactcaagtatgggggtctcaagcatgagctgatctcagaacactgggggatggggatctccaaactcggtgatctcagaatcttcggatacgggactttcagagtgcaggaggtctggggatacttggggggactcagagactatagttaaaaaactcaaacctgcaaggagagaagactttagacccccacccctcatttcacagtggagaagaaatggaggcaaaaggctggggtctgaacagcca

SEQ ID NO: 31009 - DNA, 991 bp, Artificial sequence
  DNA replication origin
ccggtcaaaagtttgtgggtcacagtgaaatcaggccagaggagaatgaaatcaggcttcagaacagaccaacgccacctgtgactcagagggaagggagctgcgcctcccagggaaaccaggttgcgggtcactccagccgcacccccacccctccctccgccgcgggcccagcctcacttgagctgctgggtaataagctcctcgtcgttgagatagcgcagccgttcctcttccaccagggtgcgctgccgctgcagcgggtcctcctgccgccgcgccgcctccgacacgcgcatgctcagctctgcctccgtgcgcttcagcagcgcgcgcaccgactcctggttctgtagctgcgggacgcacggacggatggacccgggtggggggagcggagccgcgaggcaggggaagggccgggagaaggcgggtagaggactgcccaatccagggcggggctctgcagaagaagcggctgcttggctccgcctcaggcagcagcgaaggggtgggatggcgaagggcaggggcgggatggcgaagggcaggggcagagggctaagttctggggaagaacagaggcaggaggagaacggatggggatcgtggagaggggagcgttaaaatgggccatgcaaagggggagctgcatggctgtggccgcgagcaggggtggtattgcagggggaggagggcaaggttaagttctggggaatatgaggcaggagaaggggttgggaatatttgcgggacagggtgtagccctatgtaggtccctgccgacagtgcggccgcatggctatggcttccatcatcccggaatggggacgggactggaatgaaggactcaagcgctggcatttgatagagcttctatggctgggacaggaagactaagttgatgatcgatccaaccctgttccaagcctgaatggcgggggtgggcaagatcttacccgttgcccagatggcaattctctgccccctc

SEQ ID NO: 31010 - DNA, 905 bp, Artificial sequence
  DNA replication origin
gccatgcaaagggggagctgcatggctgtggccgcgagcaggggtggtattgcagggggaggagggcaaggttaagttctggggaatatgaggcaggagaaggggttgggaatatttgcgggacagggtgtagccctatgtaggtccctgccgacagtgcggccgcatggctatggcttccatcatcccggaatggggacgggactggaatgaaggactcaagcgctggcatttgatagagcttctatggctgggacaggaagactaagttgatgatcgatccaaccctgttccaagcctgaatggcgggggtgggcaagatcttacccgttgcccagatggcaattctctgccccctccccagcctgtctctgctaattatcctcacctgacggcccctgggcctgcttgaggagcggactcggcgatgccaagctcctgacaggtgggaccatctgccaagcagggccggggagactgttggggctcaggagggaggagctgagaggacttgggggaagggctctcgctgactcagggaaagggatgcagggcaggaaggaactggaactgccccgagggatactgacgacggaggggctcagtgggtgactggggctccaggagggcgatggggactcagggaaggagaaggagggctcaatgagggggtcacgggcgagggataaggccttggtgaggaagtggaggttcagcgagggagcggaagctcaagaaaggggaaggggagaaagggttcggagagaggccagtgagcggcgaaggactcgggcgtggaagctctgggaaaaggatgaggtagtaggggatggggcgggacttgcggcaagggacttctaccagtaggtgggcgttggtggggcggggcccaggacggggcggta

SEQ ID NO: 31011 - DNA, 2150 bp, Artificial sequence
  DNA replication origin
cctctatgctgacccctacgggctgctgcacgagggccgtctgagcctggccgcggccgccggcgacccgttcgcctacccgggcgccggcggcctctacaagcgcggctcggtgcgctcgctcagcacctactcggccgccgcgctgcagtccgatctggaggactccctgtacaaggcggcgggcggcggcggcccgctgtacggcgacggctacggcttccgcctgccgccttcgtcaccgcagaagctggccgacgtggcagcaccccccggaggtcccccgccaccgcacagcccctactcggggccgcccagccgcggctcgccagtgcgccagtccttccgcaaggactcgggctcctcgtccgtctttgccgagagtcctggagggaagacccgcagcgcggggagcgcctcgacggccggagctcccccttcggagctcttccctgggcctggggaacgctcgctggttgggttcgggccgccagtgccagccaaggacacggagaccaggtgagggacgttaaccaggcctcagggactgggggtggggggtgcgctgcggagagggttcacagcagagtccgtggcaggtgtgtgtcctggactgagatcctggagtcctttggagaccttgagtagtcttgaagggtcgccagagagcatcttggatgtggcagagagggcattggagagaccagcttgccattttcctcccatccgcaagactggagggggtggttgagaggtccccagacgaggactctggagacttgggtttgcatccattttctaagcctcggtttccccaactgtaaaattgaggggttgaaccacttttagtggctttccagcttaagagtttgcagcagtgagagctgtccagcaccgggacagctgaagtccactggggaggagggtgctgttgaaaaatggtgacgaggaaaggagcacattcgggtacctagcctccaggctgaggagcccctgcccatcgctcagtcccctcctaagggtgcagggctggaggaggtaaccagggcagtaggtaatctgcaccctcaggcagcgctgctgagcagtgaagagaagccattggccttcacacagctcttacgtggcctgtgtggcaggcgctgcacagggtactgtcaatgccaagctgagcaaacccagttcctgtcctggtctagtggggagacactcagcatacctccacttcccttgggtggtatggaaggaggcgttcctcggggcccctggggtctgtggaatggtttgggggaggggtcaggagaaaggcagagcaggcaggggaaagcattgccaggcatggagagatcagcgtgcagcctttagggagggaatgaaaggtgagatgggaggctgtgggcttgatccttaggcattggggccctttgcgttgtctgtgttttggcagccagggatgggacggtgtttcttctggttaccaatcttaggaatggggggctgggcaggagagaccctatgctcagaggcgaggttgcccagacccccttcctccccagggagcgcatggaggccatggagaagcagattgccagcctcacaggcctggtgcagagcgccttactgcgaggctctgagcctgagacccccaggtgaggcccctctcccaacaccactgccagggcctaggggtggagcaggaggaaggggaaatgggcatcggctctgccagtgtctcactgggtgaccctgggtgaatcccttcccttctctgggactccatcctgagatcggagagctggaggagatgacatccaaggttccacccagctctgaaggtctggggctggcctggaccccctgatggcttttttccctgtgccacagcgagaagattgaaggctccaatggagcagccaccccctcagcacgtgagtgaacctccccctcccccatccttgttctctccgagcctgttttctaatctataaagtggggattaagcaatagctacatcactggccttagcccaagaggtctttttcctggcactttggtccccaccgttagggctgaccacttggggcaggtagagccacgggcttctctggctactgtgtggggtcggagagtagggaggactttgtcccagc

SEQ ID NO: 31012 - DNA, 1305 bp, Artificial sequence
  DNA replication origin
cgggccgccgccgcccgccgccttgtacagggagtcctccagatcggactgcagcgcggcggccgagtaggtgctgagcgagcgcaccgagccgcgcttgtagaggccgccggcgcccgggtaggcgaacgggtcgccggcggccgcggccaggctcagacggccctcgtgcagcagcccgtaggggtcagcatagaggccctcgcctttcaccagcaccatgccgcccgccttgctcgccaggtcctcgtccggcttcacgtcgcgccgctccaggatggcgctggggctggggctgacgccctgggcggccggggcgcctcccagcctctcggccgcgtggtgcaccgggctgccggcgtacgaaggcgggcgccccccggcgtacgataggcgcgaacgcgacggcgaaccggactgcagcccggacggcagccccgacggcagcccgggcggcggcgagccggatgccaggtgcggcgctggtgacaggttgttgaggcgccgcgtgggcgaggactcccgcgatgcgtacaccatctctctctgcgcagaagacagcccggaaccccacggggctggtcaccaaggacacccctgtcccttgcttgaggagccagcatctcctccctgacgcttaggaagtcccttctgctctctgccctccctccatcctgctgcgtctagggtccctttcccatcagggttcctagcatggaggaaaaggtggccgatgaagaggcaccagaggggtaaccctcagctcagctaccgtgaggggtgggaagtagaaggggaaggggtggctccggctcctgagagagggcttagaatatctggaggcaagttagcaaaatcccgagtggacaggcccggaatggaggggaaagtggcaggtgggacaggggctcttccctaacccctcagcccctatgctgtcttctccaaagctggccctggttccagatgacaactgcccagaccctgctcccctggaccccatgtgcccagcctccccaatgccctgggcatgcccagccatacccggaggtccccgttggtgagatgtgagccagggaaggcagcgtagaggggctcctttctgtagatcttgataatactgcggtcctggatgtccctgggagaggcggggagacgggggtcaccacccatcccccagctgtgcacaatgagaagggatggctactccaggcctagagaagaggggtggccagaggcaccgggagccccatctcaggctgcctgcacacacgcccagcagcctccaccccggcctcttcctgg

SEQ ID NO: 31013 - DNA, 863 bp, Artificial sequence
  DNA replication origin
gggacaggggctcttccctaacccctcagcccctatgctgtcttctccaaagctggccctggttccagatgacaactgcccagaccctgctcccctggaccccatgtgcccagcctccccaatgccctgggcatgcccagccatacccggaggtccccgttggtgagatgtgagccagggaaggcagcgtagaggggctcctttctgtagatcttgataatactgcggtcctggatgtccctgggagaggcggggagacgggggtcaccacccatcccccagctgtgcacaatgagaagggatggctactccaggcctagagaagaggggtggccagaggcaccgggagccccatctcaggctgcctgcacacacgcccagcagcctccaccccggcctcttcctggcctccggcgccattttcaggttagctcaaagcaaagggaaccagcaggggtggacgatttagggggtgggggctgagatggccgaggaagggggcggggcggtagggctctgggaggggaggggaaaggctgaggtcgggtcaggaaggagctggggaagggccggcggggtccagcaccctgcagaggaggagcgtggggaagcccacccaaatcccccccggtccacgcccaccggacgtcctccagctcgtagaagacgttgcgagcctcgtctttgatgaggatggcggtattgggcgacttaagcatgcccatggtgagcttctgcgggaacatgtgcgcgatgagtgcgtgcagcgtgtccaggctgctgacctcgtgcgtgatgtgcacgcgccgagtctcctccccgaactgcaggaacagcacccctgcgaaggagacgccgccctc

SEQ ID NO: 31014 - DNA, 943 bp, Artificial sequence
  DNA replication origin
tcgggtcaggaaggagctggggaagggccggcggggtccagcaccctgcagaggaggagcgtggggaagcccacccaaatcccccccggtccacgcccaccggacgtcctccagctcgtagaagacgttgcgagcctcgtctttgatgaggatggcggtattgggcgacttaagcatgcccatggtgagcttctgcgggaacatgtgcgcgatgagtgcgtgcagcgtgtccaggctgctgacctcgtgcgtgatgtgcacgcgccgagtctcctccccgaactgcaggaacagcacccctgcgaaggagacgccgccctcgctgtcactgctgccgtctccacgccgccctccaggagagcgcggggagcttttcggagctgcgccagccccgcagcggcagggtctgaggctagacgccgcccccgagtgcagatgcacccaggcacctctcatgctgccggcgggggcgccaggccggctctccagcctctcaaggcacccactggactccaggcagttgaaggaacttggacaaggaaatggaagtgggggcagagcaggtggggcggaaactgaggggaagtgagctgagggagagagaggttggagagagttagagaagggagatgggagagaagggagggatgaaagaaagggacagaaaaggaagcaagagggagagaggaggcttggagggaaaggggtcgggtggggatgctgagggcgagagagagatggagagagctggggttgcttggggagaaggggctgtgggaaagagagcagagcttgaggcgagctggcgtgctgtaggggaggagggggctccagggagtgaagagcagagggaggagcctgtgtggggagggagggtggactgggcgggcagtacctggggagcgcagcttggtctggctggccgagcgggagagaggcaggc

SEQ ID NO: 31015 - DNA, 1193 bp, Artificial sequence
  DNA replication origin
ctcctactccatccacaagcccctgacaggcgaacccagactctcccaaagcagcagccacagcctgcagccccgaggcccaccgcccataccagaaggtgtccgtgcagatgcgcaccccggtgcaaagcctgtgcaagggagaggcaggggcaggggagggagagcacatgcagttgtcatgggagcagaggcatcacacactgaccttgaaactccagtagtttggctgctgatggaaataagagaagagatggttatgagggggcccaggaggggaaaagaggggcaggggcaggttagagacccttggaactcagcactcagccctaggacaagggccctccaccctcccaggagcaggaatgaagtcatgcctggtacatccattctctactgagacctggaacaccatggtgtacccaggatggccctgagcaggcgctacagcgactcctcgcagagttactggtgggaaaaggcacagaggatggtgatagagcgaacccatgaggcagtcacaagagaggcagcgacaaagctgagctgtggggtcagagaaatggcaggccagggaacagtgcttggaagaggtggcatttgagttgggtctggaaaaacgagcagctggagactggaaggagaggcctgctgggcagaggggaagtgcccaggggcagacaagtggaggggggttgaggcaagtcactagtccacattggctggggcgcagctgggaaagtagcagattaggctgcaaagggtgggaagtgggaggctgaggccagatgatgagtggtcataactgctgagagaaagtatttagacttaactgggtggacaagcagaaagtgtctgaatggagcagagtgggatcagaactagaccccggggcagaggtggatggggtggatcaggatggatggggcaggggtcggaggaggggggctggggcccaaggccaagagagagaggcctatgcagcatggtggatctagtttacagagcagagtggccaggtgccaggaacctcactcactgggcaatcaatggctggggagctgggggcagtgaagggagttggggagactggggactgtggctggctggctgattgaggagggctcctcgtatccctcttagcatccctagaatgggaagccagagagtcctcctcatttgcagtaacccag

SEQ ID NO: 31016 - DNA, 1634 bp, Artificial sequence
  DNA replication origin
agcaaagggcaccggcggcggcggccgcggctgcggaggcggccgggggagagaagagcccgggcgggtgggagtaggggccctccctccccagccggacgcaggacctggggctggggaccccgcacgtacacctgtggccgcaggtaagggggagcgactgtgggggccgggatcgccgcctcgggttgggcggggggcggggacacggagatgggggcccgctccgcggcaccgagagccatccaggggtgggggacgtccaggccattgcaggttcccgatccctgagaaacgcctcctcccctcccccaccgcattaggtgccttcggcgtgggccggcccccactccaaaatcaggctggcgccccctcccccagcgtcggaaagtcatgaccttcccggggtgcgccctcttccccagcgtcccacagcacccccacccacccacccacacacacactctgcattgggaaggagatgagggtgtcatccacacatctggaagagagggtcatgcatgtacatcgcggtgggggcaggcgcccgaggaggggcgagtggcttagccccagcccgggggacgagtgtttacgctgactcgtgttcatgggagttgagaggtgggtgtgtgcaccggtgcagcacagccaggggattaaggagccggtgtggacccgtgggttgccctccctccttggaaggtgcgtggtcagggcttgaggtcaaggaggggtcatttgctcactgaacctgctggggatgcctgcccaggggaggaaagagacctcagctggctgggccaagcctccccaggggccctagcccctcccctcccagggcatgagggccgagggggggaaaaccagcagcaggggaagtaggaacccctctaccagtggctaggatggaggagagaggaagggagttaactccttagctcccagagagaagaagctgtttcctcttctcaccaggagtttgaggactccctggcctggcttccttgggccttgagagacactcctttcccccgtttctcacagcgtggtccctagggtcctatgcttccatcttaccttcttagaacacctctcattttgccccagctcctttaagattcttccccacaagtggttgcccctgccggggtctcccctactcacccctttctttatttccccctttcactgtcttttgggaaggtgagaccccctccctgactatgggggagggagacagctttggcactggaagatttggcttgaggtggacagccagacctctcctggcccttcctgccctctgccctcctaactggggggtttctggtgttgggaaattcccagggaaaaggcccagaaggctgagcagtgctgggtgccaggagatggagggagtggtgccagaccagagtattcagagatcccaccctccacccatggctcggtcctattttattgacattcattcattgtcacatacttgctgagtgcctgctatccaccaggtactgtactgggcacagcaggaggaacagacaccctggaaaggggtgaggaggtacagggtgctggaagttggaaggggagtgactgggaatgtcccaccttagagaacactagaggagccc

SEQ ID NO: 31017 - DNA, 704 bp, Artificial sequence
  DNA replication origin
ggagggcaccagaggttggactccaagccaaagcccctcccccggcttccaccaggctgtctaacctccctccctcctgctgcaacccgagtcccgggcgccaggccggcgtatcgggtgaccgcggcgacgcagccaccagcctccgccgctcctctgcggggctgcgccggcggggccgcgccgagggagggggccgcgagaggggatgtgcacggcggcgcgcagcgccgcgccaggtggagtcgcggttaccggggcgactggggcccgggccggcacggcggcggccgcggcggctctcgcattgcagcaaagggcaccggcggcggcggccgcggctgcggaggcggccgggggagagaagagcccgggcgggtgggagtaggggccctccctccccagccggacgcaggacctggggctggggaccccgcacgtacacctgtggccgcaggtaagggggagcgactgtgggggccgggatcgccgcctcgggttgggcggggggcggggacacggagatgggggcccgctccgcggcaccgagagccatccaggggtgggggacgtccaggccattgcaggttcccgatccctgagaaacgcctcctcccctcccccaccgcattaggtgccttcggcgtgggccggcccccactccaaaatcaggctggcgccccctcccccagcgtcggaaagtc

SEQ ID NO: 31018 - DNA, 1595 bp, Artificial sequence
  DNA replication origin
gatactcaggatttttaaaaaagtttttgtatccctttctcctttaaacagaagtcccctgaccttgctctgtgggttttatgccctcctcccactgaggactatcttattcccctctccacaccctccccttccgtttctgagcagatccagccttccccagatgtcccaccatcaggaagttctgcatgaagtctctctctcacccctcttgctaagttcatggcttagtctctaatttttaagaagacttgggcatcaagccatctattctgaacttattcccctcttcctcatcaggcttcagtgtccgttatgggaagatagatcttagcttagacagggacacatgtaggcaggataccaggggcctgggctcccagctaggcctggacattgctatgggagaaaaataggcatctgaggcccaaaataggcatcagagttgcaatgggaaggggacagcccaggggaggtcttgacttgaggatattcagctgtaggaggcggaggaggggtagtggcagggaatccagtgggaacagggtgctcaggtccttacacaccctgcttcccccagaggacaaaaagtcttggctttttcaaggagaattaagagaaagaaaattgtgaccacctaggaaatgacaggccttcagagggaggatgttttagccgagtgtaactcaagtctagtaacagattggcatgcttgtcatcactcacagggcattcagcccaatttctttcccagttcccaagccccatcttggctgaactttggggaacaggaatgtgtctgcccccaaggctggatggcaagtgggacagacttgtcctgaatggccaagtgcatggcggagaccaaagtggggctaggacagggatggtgataggacagaggacgatgtgatatgcatgggtagggttgtggtgccttgtctgcccagaggtcctccccagatggagcatcttggggctgtgataggggttggatgatggacaggagtgaggctggactgggtgagctcagttgtcccaagtcaggggcttgggggagctggggattttggcctgtccacatctgggatctgctctgatggaggaaaggggagcgcttgagcagaccttcctcctggggctctgtaattaaccaggaaagtgtctgtgcataggatcttttcatcacttgatacttatcacactccctgcccctaaggctgagtctgaggttcccttttgttaagtgcaggaccagagactttggaaaggccagaaccacacagcagggcaggatgagaggccatctaggaaacttaggcatcctaggcctcccagacttggctaaggattaagtcacgggagagttaaaggccaaaggtgcacagcaaagaccccggtggggagaggctgtgggctctgaagtttgagcaggaggcagaacactgtcccctccctgatcctccaccaggcgggacctttagggatgggggcagtgaagaggatcctgggagggcaccagaggttggactccaagccaaagcccctcccccggcttccaccaggctgtctaacctccctccctcctgctgcaa

SEQ ID NO: 31019 - DNA, 1666 bp, Artificial sequence
  DNA replication origin
gctttctgggtctagcatcctgtgtacagttctgcattggtgaggcgcttgcatggttgctgcatattggcttctgagactcagccattgtacccctgggtgaagggactgaggggagggatgcacatcccatcagcagcctttcagtcaagcctgggggtgtgtcagtccctgtctcccttttccgggttctactggatgtagctggggatggggaggagtgtccccactcccatcctcactgcagggaacaagacacattggcacatttctgctaccttatctgccctctagtgccacctccagttccgtctggcttttgccttttcccagctctgaagtccttctgggagcaggatgcagatcaggattagagagagttgaagaagatgttgccgtcaccctcaaggagcccctctcattgggttcctcctgtgtgcactggcttgaggagaagggcaggggcatttgtcatctagctggggaggggaacagtcagttgggacggggtttagaggagggaagatcataggcaggcctgatcggggaaggcttcctgcaggaggaggtatctaaatcaggcttagaaagatgaaaagggtttgcatagccctaaaggaaagaatgttgttttaggagtggtgggggtgtatggcatgggcataggcctgagttggtttgggaactggcacagaggtccacctggccggcgagaaggctcaggtgggaggtagtgggatgtgtgggagctgactgaaaaagtggggcagatggtggtggctaaggtggctgtgtttgcttttggatggtgaataggaggggagaagcgggactggaggcaggggaaggagaagaggaagagtgtatcagggatgatgaaggggaaaggatggatggatgggggttggaagaagaccaagtgtaggtctaaggctaagctgcctggacctagaaggcaatgacagaaacacctgggcgacagggagatgttggtgccttggagagaaataggagggttggagggaaatgtttgggggtgagggagaggaatatacagagacgggtttgagcagtgggtagggcattcttggggatgctcttaaggcaccatatgcaccactcaggactccagagaggctgcagcttcaggagaagagttgagcacggtcacagcagatacaaagtggacctgggatgcggagtggccatcagggcacagtggggtctaagaagggagaaagcccatgatgtttggggaaaggggaccaggaatgttctacatccatgaggaagtcccaggggaaaaaaggcccctggacaaggggccagcaggagggtgaccagagcttcagaagtccaaaggatggggagagagaaacagacatcgcgactggccgggatttgtgggcgcagagggtattgagagcttgtgtctcgtggtgtggtaaagtaatggccaatttcatgggttagggagtttgggattggtgaaggatcaggagccccagccacagacttattttggggagattgggccaggaaaaggatgaaaacagctgggtggagcttccaggggtagcaggcctgggagagaaggcataggcatgtctaagggcctcctatgttctagcatgttcaccagcacagagtttggaactcagtaaat

SEQ ID NO: 31020 - DNA, 1499 bp, Artificial sequence
  DNA replication origin
gcctctccactctccttaggcccaggccccgccccttcccgcagggacccccttgggggatgggcagccccaggccgggcgcgccgtgacccagccgtgcccctctcacctctcgcagatccggagcggagcagcccccccatgctgtctgcggacgatgcggagtacccgcgggagtaccggaccctggggggcgggggcggcgggggcagcgggggccggcgcttctccaacgtggggctggtgcacacgtccgagcggcggcacacggtgatcgcggcccagagtctggaggcgctcagcgggctccagaaggcggacgccgaccgcaagcgtgatgccttcatggaccacctgaagagcaagtacccacagcacgccctggccctgcgaggccagcaggacaggatgcgagagcaggtgagtgggctcccggctgcggctgcggctgcggccgcggccagcgggcaggggaggaggtctgaccccgtgctccgtgtccccaggctcattccaactctgggaggcatctggagcagagagggaagaaggggaggagttggggagttgtccctccagggcagtggctctggttggccttttctggagcctggggaggaagggggtgggggcttggcccccagacctctgcctgcagtccggaaatcgagagcgtgtgacggggcagagagagcccagcctctttaactcaggctgtttgggcagaactcttctgggaggaaaggagaggaggacagccttggggactgttgttctgtgcctgagagtccatcctgtggtgaagttgagatgctggggtcgtcggcacctctgtgatatggactctaagagagagtcgggccttgagagcctcagtaggctgggtccgatgtgtccccagttcctgcagcctgcaagaatggagcccagaacgggagcctttgacctctttcctccctgttccaccccgtggcgtgctgggtgacttggagctggaggcctcctctctctgtacctgggtatctctcctgccatcagtagggcttagagaggagacacagcgcctgtgtctagaccaggacccgtctccttctatagcgagtgggatggttcctttttaaacctcccccagaacctcggggtcctgaatgcatctctccacccaagtatgagcttcttgtctgtaagaacatgctttctgggtctagcatcctgtgtacagttctgcattggtgaggcgcttgcatggttgctgcatattggcttctgagactcagccattgtacccctgggtgaagggactgaggggagggatgcacatcccatcagcagcctttcagtcaagcctgggggtgtgtcagtccctgtctcccttttccgggttctactggatgtagctggggatggggaggagtgtccccactcccatcctcactgcagggaacaagacacattggcacatttctgctaccttatctgccctctagtgccacctccag

SEQ ID NO: 31021 - DNA, 1591 bp, Artificial sequence
  DNA replication origin
ttctctgagtctcagtagccatttctgaaatggggaccatgataacacccacctgatggggtgtagggaaggaagcatgcagccatgaggcaggtggtcaggccctggtgagctgcggctctcatgcccatgggagcccttcttcccttggttcggtgggaggtgctgggtcctcgcaggctctgtgcccctaatggacacaacccaaccattgcccagggaggggtgtgtatgtgtgtatgtgtgtgtgtgtgtgtgttgggggcaggtggcttttcttgaaacctggctgaatctcctctttcctctgtggctgggcaggggatggcagacctggcagctgtccatagacctcctgacagtggatgcttggcgggaggaggcttgtagcaaacctggctggtttccagcgtttccagccgcgtcccctgttgccctgggctgcccttggaggagccctatgagtcaggccacacgggggcgggagtgcatgtgtctgctgcagcgcctgatgccccagtcctaggccacacttggagggctgctttggggctggtggattgtggggctggggtgtgcaggagaggctgtgcttgtctccctatggactgacttctgaggggcacaaatctatgttttatgcccaggaatatggctgaggtaggcccccagcaacttcttccacccccaggggcatgcgtgacctctggaacccctggccactggtcactgaagctggagagtgcgggccagcagggctgggcctggggaggccaggagctcagggctggagagcatttgggaaggggattcagagttccgcgtgggacctcaacccccggccttctctttcttttgcttctgtgctgtcctttgtcccctgtacgtctcttatgggtcttgatcttgtgtgtgtgtcgggaggagagactgaagaagggaggggagaggtggggggaaagcccctgggaaggacttcagctgttctgtctgctttctttccctttaagtttgttccaaatccatctctcactgtcctctctgtgcccagcctctcctgtctgtctatctgtctgtctctggggagggaagggaaaaggggtcccactgccccagacgctgggcttccatctccatgggaaacctgagagcgatttttgccctcattctccccatgtcttcctgccctggcccttttcccagccggcgcccagccttgaggataagtatgtcctggacatatgctagtctgagggaggaggcagggctccccgcccccaacctcaaaggaagactacgagctcattttcacgtcttttagggagcatctaaaaagcacccctccttccctcacctgctggcaccagctttaggaggggagggggttgtgtggctggagagggtctcaggataccttctacccctttcatccaaacccccaacccttggcctcaaagggctgcacccccgcggtcattatcgctccaaacccacggaggaacagggagtatccagcccttgttcctcacccctccctaggggccgtaggcgcgctttccacgccatccacgcacttcccccttcagtccct

SEQ ID NO: 31022 - DNA, 797 bp, Artificial sequence
  DNA replication origin
ctgctcttcctatgacacccaatctctatcctgtctgccctggggggccccaaagggagagctcctaaggctctgccttgctctgtacctgcttcacctcccccaaccccatggcccatggccctgcccctgacctagcccactttgggagcccctgccccggccccctcctctctccagctcctctgcagccgggcctttctgggcattcattcacgactttcctcctttcctgtccctcacccagggctccagcgtgcggcgggagggaagcctccaggactctgttccctctgtttaaagtctccaggttagtaagccaggaggagggaggccccccacgattcctcctcctgccagctctccagctctccgtagtcagatgctcctccccagcctggagggccagaaacggagagggggctatccctggtgggcccagcctttgccaggggagggggcagcagatacctgactctggggggggcactttggctggtagagaacatgtctgtatgtgcacgtgtgtgcatgtcagtgagtgtgcgtgtacaagcacgcgtgcatgtacatgtgtgtgcaggctgcaaagccgccatgtaagctagggctggggtgaagagaagaggcgggaatcctctgctgagggggcttgtggcctggggagaggggtcaggagcaaggggcacctcttatggggggaagcccatgttccagtgatgcccagagggtgggggatgggagaagatgggaccattttgtttagcttacagtcacatgcaaacttgtgatctcgt

SEQ ID NO: 31023 - DNA, 794 bp, Artificial sequence
  DNA replication origin
tctgggccgggtgtgggcggcaccctcccccttcaagcaggcaccattaatatatgcaaagcatatgcaaatcacccagaagagagacacaacaccgctggaatgtcacaagaaaccttggagatcagccagcccacgccccctcatttcacaggtgaggaaagaggcccgcgctgggatgggacttgctcaaggtcacgcagacatctgggcactgaggaaggataagaatgagctctcttgacttagtgcagtgctttttccaccagggtcttgtctttctgctggggggtttataacattgcaaaggggccccagggcgtggatggggctccaggcaggcccatcagagacatgggtgggagatggagctgagaggcttcttggatgcctcccttaccgcctctgcacctggagatggtctggtgggtgtgaggggcagtgcaagggcagcatagcacctggggggccgcgcggttggaggggcgggaggctggaggtaggcaaagagaaatatgaggggcagggcagaagagcagggaacctggggtgtttgaggcaggggaggaagagcccaatgtcagggcaaggtgcctgctgtggtgtggggagggggatggcgccctcaacacatacacacacacgcacacacacacacacgctcgcgcgcacacacacacacacacacatcgctaagtgctctgcagcccttcctggactctgacaattatggcacctgacagaccataatagttaacccaggcccatcccttctgaggccacttccccgcccc

SEQ ID NO: 31024 - DNA, 927 bp, Artificial sequence
  DNA replication origin
ctgtctaattccttgcctcagtttctcttattcccatccctttccctcttgttgatctttaaaaattgatgatgcatttgatggagattgtgaggctgtcgccactggtggcagctgtgatggtggtggtttctggtgtggttgtatgtggggagcagctatggtgcatttgaggggttttgctggttctggttggtgatgggccactccatacaggtgtcagggacatgggaaggaacattcacacaggaaggagtgctccaggcaagctgagagttgctggggacagagacttagctggtggcctggggtagaagcaagggatggggtgagggctctgggcataaggggagggtttccaagaataagatgcaccccccctccaccccgctgtccccacccagactgcctggcacccaggcaccactggcagcaagtgcaaaggctttgccctggcttcctgccaccctgccttggggacaagagggtctttgtccagtccccccacaacaattcctgcttcttctgccctttccacgatggctggttctctgtgatgaccctcaaggctgggatggaggcacaaatcccccttctggctcccactgtctgtgccctggagctctatctggaagaggcaactgtggtcctcggggagtgctgagtggagagggatgctccactaggggaagggtcgctcgaatgaacccctcaaagagctacccccaccccaggctttcccctgcccctctacttgcctccttgcctaatgcggagggtctggggtcttcgtggcctcatccctgctgggttccaggcgtcttaaagatgtgcaggatactgggttgggcactgggatgcagggcctctctgatgcactctcgcgctctctctctctctttctctctctctccccctctcccccct

SEQ ID NO: 31025 - DNA, 1299 bp, Artificial sequence
  DNA replication origin
gttgcagaaactggggaccagctccccgctctaccagcgggtagggagggccacgagagggaggggtttagggaggggctatttgatcttaacccctccccctgcagaggccagggggcaggggagggcgcccccagctggggagggcatctagggtgagtgagaagatagggaaggcaggcggctgaggggtggagggtggggctgggaaggggacgcaccgtggccccccctcccctcccacgcacccccctgctacgtcagaagctcccgggccagctccgagtcctgtcggtgggggcagcaggatgctggtggaagcagaggggacaggccgggtgcctccgcagctcagctgtcagggcccggcggggcgtgtgcggctgctggtgctcgtcccccagccccacgcgtccccatgcagccctggcagtgcctccggcgctttgccctggcctggtgggagaggacggcggagggcagagcccgctctcccagggaggaggctggaccgagggaccctgggggccgaggggagccaggtgagcaggcgcggggaagtatgcaaggagggggatcttcccagcccccctcctcaaatgttgtgggacaaggaggtcctgcagcaccccaactttaaggaaagtgggctccccgagctgggggtgggggtttctggcagcagcctttcaaaaggagatggaggagctgctgtctgttttggggaagggagaaacaggtgaggcttgggagtgagggaagctgaccagacttccaggtttgtgggcctgaatgttcctttgggtggggtttgagcacttttggggggtcgtcaggataccttcttcccgactcttggtatcttggtctgggtgaccttgagccaactgctttgctgtctaattccttgcctcagtttctcttattcccatccctttccctcttgttgatctttaaaaattgatgatgcatttgatggagattgtgaggctgtcgccactggtggcagctgtgatggtggtggtttctggtgtggttgtatgtggggagcagctatggtgcatttgaggggttttgctggttctggttggtgatgggccactccatacaggtgtcagggacatgggaaggaacattcacacaggaaggagtgctccaggcaagctgagagttgctggggacagagacttagctggtggcctggggtagaagcaagggatggggtgagggctctgggcataaggggagggtttccaagaataagatgcaccccccctccaccccgctgtccccacccag

SEQ ID NO: 31026 - DNA, 1214 bp, Artificial sequence
  DNA replication origin
cgcgcccgcgccgcgcgcgcgcccgcccgcagtgacacacccgcgccggcccgcgcgcgcgcagacacacactcaaacacacacacactcgctctcgcacactcggtgacacgcccgcgcgcgcgctcacccacacgcccggccgccggcgccctcccagctggtccaccccggcggggcccgcgcccccggcccgcccgcctggcaccgcgccccggggctggggccgagcgaggagcccgcgaggcggcgagagggcgagcgccaggcaggccggcccggggcccccgccccccgcgcccccgcccgatggggaacgctccgtcccaaggcatgtccctgtctctctcctccctaatgtgcctccatgcttaagtggaaggtatttctgttttctttgtgtgttttccccctcggccgggggcgggggcggcggccgggccggggaggcggtggccggcggggcgagggatgctggggcgcaggtgtgtgggggcaggggaccgctgtgcgccgggcttgggagaaggacccgggcgagaggagtgctgggaccagagaagggggcagggtggcgaggcaggagactgggtggggagggcctcactacgccccggggtgggggccagaggggttcaactgtaaaggggcttgtgtggaagggggaggggtgaggagaagaagggggatggatggtgaggagggtggggggagaagggcgtccctccgaggtgggggaagtggaggatgcaggggaggggaaggggatggagaagtgaggggtgcatcaaaggcctccctcccccagctcccagaatggggtgcacgggctaggatggtggtggtgggccctttgcgccagcctccagggagggaaggggatgagtgcgttctggggttggccgcgttgccaggatacaagcctgtattccacacaccccccctccccgcacctcgaggccctagccctggagacctctgagcctcagcagcagttgcagaaactggggaccagctccccgctctaccagcgggtagggagggccacgagagggaggggtttagggaggggctatttgatcttaacccctccccctgcagaggccagggggcaggggagggcgcccccagctggggagggcatctagggtgagtgagaagatagggaaggcaggcggctgaggggtggagggtggggctgggaaggggacgca

SEQ ID NO: 31027 - DNA, 1278 bp, Artificial sequence
  DNA replication origin
tgacataaggcagatgtgggtttgaatttcaactttgctgctcttacattgggcaattggctatatctctctgatagggggttgaaaatgctcacttccatcaggctgtcgaaagggtaaaattagagattatggtagagcacctgctaattttcttccccttaggcacaaagtgggggagggaagaaatcttgtcccttggggggaatctgagttgggggcaggtgaagggcaggagtcctgtgcagtcagtgggtgaggaatctgaacggaggagcgacctgtgccagagctctgggctcccagccgcttgggaggtggtgtccgtgtgctgaggggaagctacccttgcctcccctgagcctcccccacacagagcctgctgcctcccatgcccatcctgggcaggcagccaggcagggcactggatggatgcccactgtgcgctcagaggccaaaagatgggcaccatccagttggcagagggagaggcagttggcccaggagggaagaagtcagggtgcctgccgctggggtcgtgtgcccagactgtgtgtccaggacacagctcttggctgtcctcctgatctgtcccactggagctgggaagggcctctcctctggtcctggccctggcatctgagttactgcaattggttatttatctctaaggggaatctgggaccttgtccctagctgggcatgtggttggctcaggggcaggcctgggggtggataggaaattgggagagcccagattaaggttgcaactgggtagaccaggaagtggggaaaccggtttgtcatttgggccacttggggtggggtctcctctcctgggctctctgcctgcctgccactctgcctgatggcccacagtgaatagaagtactgtgtccactctcttgctcacctaaactgcttttggaaactccagaagtaaataaaagggacaggggactcagcccaccttctcctccgcaagaaagcttgagagagaagggactggccagagcatcggagcgagggagggagggggccgctggaatcacgaggtgtcggcgcgggcctgggtctgggtctgggtccgggtcagcgctggagaagtctgcggagccaacaggtaggccaacgaaggtgggacgcggaggggcgggggacggcagggtggagccgagctagtgctctgcgggctgaagtagaggcggcagtgacgccgccaagcgaggcgtgagcagggaccgtcgctggagcgtcctacggtggggtctcactggc

SEQ ID NO: 31028 - DNA, 910 bp, Artificial sequence
  DNA replication origin
agaatcacttgaacctgggaggcagaggttgcagtgagctgagatcgcgccattgcactccagcttgggcaacaaaagtgaaactccatctcaaaaaaaaaaaaaaaaaggaattgtcggggtggggccgggcgaggtggctcatgctaggcgaggtggctcacgctgtaatcccagcactttgggaggccaaggcaggtggatcacctgaggtcaggagttgagaccagcctggtcaacatggagaaacgccatctctactaaaaatacaaatattagccgggcgtggtggcacgcgcctgtaagcctagctactcgggaggctgaggcacgagaatcacttgaactcaggaggcggaggttacagtgagccgagatcacaccactgcactccagcctgggtgacagagcaagactttttctcaaaaaacaaacaaacaaaaaagaattgcccgggtgggtgggtgagtgaactgcaaccttagtgctctagttgggggaggagggagacaggagactggagctggagtgaagagatggagggtgaggggagggggcaaacagaattgggatgaagagaagatgagaggtggagaaaaacagaagaaaagggaagaagaggggaagcaggagggagggaggggaggaaagagagaagaagagagggagggatgtatggagagatggaaagagtgaaagaaggcctttgacagggaaagggaaaagacaagaaagatgaggccagggcagggaggaggagaaggaaggtacagtctgtatctgtccttaacaggacatattatgagccactgaggcccaggtagaccacaagcccaactcctgcagggccacacccagcttgactttaaggctctagatttcaccatctgattcacatgtcttggggaaa

SEQ ID NO: 31029 - DNA, 1196 bp, Artificial sequence
  DNA replication origin
tcccggacggggcggctggccgggcggggggctgaccttcccacctccctcccggacggggcggctggccgggcggggggctgacccccccacctccctcccggacggggcggctggccgggcagaggggctcctctcttcccagtaggggcggccgggcagaggcgcccctcacctcccggacggggcggctggccgggcggggggctgacccccccacctccttcccggatggggcggctggccgggcagaggggctcctcacttcccagtaggggcggccgggcagaggcgcccctcacctcccggacggggcggctggccgggcggggggctgaccccccccacctccctcccggacggggcggctggccgggcgcggggctaacccccccacctcccttccggagggggcggctggccgggcggggggctgacccccacctccctcccggacggggtggctgccgggcggagaggctcctcacttcccagacggggtggctgctgggcggaggggctcctcacttctcagacggtgtggctgccgggcggaggggctcctcacttctcaaacggggcggttgccaggcagagggtctcctcacttctcagacggggtggccgggcagagacgctcctcacatcccagacggggcggcagggcagaggcgctccccacatctcagacgatgggcggccgggcagagacgctcctcactttccagactgggcagccagacagagaggctactcacatcccagacgatgggcggccaggcagagacgctcctcacttcccagacggggtggcggccgggcagaggctgcaatctcggcactttggggggccaaggcaggcagctgggaggtggaggttgtagcgagccgagatcacgccactgcactccagcctgggcaccattgagcactgagtgaacgcgactccgtctgccatcctggcacctcgggaggccgaggctggcggatcactcgcggttaggagctggagaccagccccgccaacacagcgaaaccctgtctccaccaaaaaaatacgaaaaccagtcaggcgtggcggcgcgcgcctgcaatcgcaggcactcggcaggctgaggcaggagaatcaggcagggaggttgcagtgagccgagatggcagcagtacagtccagcttcggctcagcatcagaggga

SEQ ID NO: 31030 - DNA, 970 bp, Artificial sequence
  DNA replication origin
ggaaggaggtgggggggtcagccccccgcccggccagccgccccgtccgggaggtgaggggcgcctctgcccggccgcccctactgggaagagaggagcccctctgcccggccagccgccccgtccgggagggaggtgggggggtcagccccccgcccggccagccgccccgtccgggagggaggtgggaaggtcagccccccgcccggccagccgccccgtccgggagggaggtggggggtatcagccccccgcccggccagccaccccgtccaggagggaggtgggggggtcagccccccacccggccagccgccacgtccgggaggtgaggggcgcctctgcccggccgcccctactgggaagtgaggagcccctctgcccggccagccgccctgtccgggagggaggtgggggggtcagccccccgcccggccagccgccacgtccgggaggtgaggggcgcctctgcccggccgcccctactgggaagtgaggagcccctctgcccggccaccaccccgtctgggaggtgtactcaacagctcattgagaacgggccatgatgacaatggcggctttgtggaatagaaaggcgggaaaggtggggaaaagattgagaaatcggatggttgccgtgtctgtgtagaaagaggtagacatgggagacttttcattttgttctgtactaagaaaaattcttctgccttgggatcctgttgatctgtgaccttacccccaaccctgtgctctctgaaacatgtgctgtgtccactcagggttgaatggattaagggtggtgcaagatgtgctttgttaaacagatgcttgaaggcagcatgctcgttaagagtcatcaccactccctaatctcaagtacccagggacacaaacactgcggaaggccgcagggtcctttacctaggaaaaccagagacctttgttcacttgtttatctgctgaccttccc

SEQ ID NO: 31031 - DNA, 1067 bp, Artificial sequence
  DNA replication origin
acctagcaggggagagaggtaagtgagcaatcaggacaagacaggcatagaggtggagactggtgaggttgagggaacagtggagcatgtgggaagagcatcagggcatcagagggggcttctcagagaaggagctctctgaattgagtcttcaaggatataggaatccctgaagtgaaggccgggaggcactggggcagagcacacacaaaagtgccaagatttgagtggctggagcacagggtacatgtgacaagagatgaagtagaccgaggtcagatcacaaaaggtcttatatgttagggtaaggagttgattctgaagacaagagggagcccctgaagggtgacccaatcagactgtgagagaagagggctcaggaacaggcagggtgaatactcacatttcatgattcatgggaggctggtgtggagtccctgggggtagaggcaggggggcaggggtggaggctgtgagaacccattcgggggcggggtcggcggggagaaggagaggacagtctcggtgagggggtccttacaaggtagactcaccagctttggtgacagattgaatgtggggtgaggcagaggaggagtgtggcttgagtcccagatttggccctgttgcctgcgtgggtttgtggctgagagaggcctgagctggaggtagggaggctttagggcatcagacaggattggacgggaatggccaaggcatgcatgtggggtgagaaaagggccaagaacagagccctggggcacatttacaaaggggagccaagtgccgtggcagctcacgcctgtaatcccagcactttgggagggcaaggagtacggatcacttgagcccaggagtttgagaccagcctggtcaacatagtcagattttgtctctactaaaaattaaaaaaaaaaaaaaaattagctgggcatggtggttcgtgcctgtagtcccagctttgtgggaggttgaggtggatcacttgagcccaggaggtcgaggaagcagtgagccatgatcatgccactgcactccagcctgtggtgggcaaaagagggaggctt

SEQ ID NO: 31032 - DNA, 1161 bp, Artificial sequence
  DNA replication origin
tgaaggtaaagaaagcagggaggggcatgctgggggcgctggggaaggaagtgcattccagcctagtagaccaggtataccttcactggtataaagcgaagtaatgggaaccaagttggttgagggagctgggggttaaggccaaatcacagagggctccaaatgacaggccaaggaggctgcatttaatactatcaggggacccactcagtaagaaggtaaactgatctgagggcatcagagaaaaaccagacacccagaaactattaatagttaggtggctactgtcatagtccagcctagaggtaggggacactgcaccatgatggagtggagattagagacagaattgtgagatccttgggaggggagaagcagggggaggcttggaaatagatagctgtgggtcaaatgggaggacccagctgagaattcaaggtgctgagtccaggggaagtaatggggagaaaagcagagctgtaaccagaatgtggacttgaccagggggactgctgtgggcagggagctgtgggcagggaccaggagcttggtctttgacaggggcaaatgagttgccattgtccctgtggagatgcgggaccaaggctcaggaggggtgctggagggagaggaggcagggacagtcaagtgggagtcatttacccatataggtgcaagctgatgacctaggggaggaaaacagaatcctgcgggcagatagggtggagggcaggcgccaccggacttcatcggactttgtctttttaaagcttctgggggaggggggcaagagaaggaggagatggaagaagacagaggcgggacctttggggacagagacccttgtgagtgtccagcagtgtcacaggctatgcagaagtccaggagtggtggcagggaggcaactgttgaatttgaggttgggggctctcctggctgaccttggcaaaagcggtttcagggacagaagtcaggctgcagaggtctaagaggtgagaggcagaggagctggaggcggctgatgctcccgggaggagggaggagacggtaagcagggctgggataggggaaggtgagcgaggggttactctgggggtcctgccagaccctgaagaggagggtagagacccagaggcacatggagaggagaccctctgagac

SEQ ID NO: 31033 - DNA, 943 bp, Artificial sequence
  DNA replication origin
gtttggggtcagaggttctgttttccaggggaggggtgagataggcctggatcatgccctctgccatgccctccagctaggaggatcttgagtcagagaggattggaagtgctttctcctccacccaggtgaggtcaggggagcttaggtcttagggagatggcaagttgaggtatgaagggaagctggggcttttggagctgccgaacaactgagggacccagtgcgccttccatcccgcactagtgaatagcgccccctcttcccccgaaaacgaggtgcgagaggaacaattcccacgctggggaaggacttgtctccttttctgtgaaaatgctttgtaaaaagttgttattgtttgcatagagcagattcttgagaaaaactgttttggaccataaaagttttgtttgttttaaaaactgtctcctttcatttttctttccttgggggtgagggtgggggtggggtgggtgggcacttctctctttttccttaacatctggcctctgtgaaccctgctgacctcccctccccctccagctgtgttgtgggaggaggaggaagaaggggtgggggagtgccttccaccctgtgcttcgggagtctccatcttattttgccccccaagaatggagaacgggaggaagaagacacaaggggtggggagagaatcgctgtgaagaggggggctgtcagaagtctggaaaggcagactccctgattttcaaagaccccttggttttagtaacgcgctccgggtcagcgtctgccccacccgcctgcctggagccgggcacgggatgatggtgtgagctctgggtgaaggaggaagggctggtgggcatgaaatactcttcttggactttcctcctcttcggggcaggaggagatgctgttaatttaggttctttcctccctgcatcacctgcccccaccctca

SEQ ID NO: 31034 - DNA, 2029 bp, Artificial sequence
  DNA replication origin
ggccagcctgccgaagtcgatggaaaccccccgccggccgcccccgaggctccagcggccagcccctcgacggccagcccggctccggccgcacccggagatctccgccaggaacatttcgatcgtctgatccgccggtcgaaactttggtgttacgcgaagggcttcgccttggacactccgagtttgcgccgggggccagagcggccgcctgcgaaagggccggctcggggagccgccaagaaacgccggctgccggcgccccctccgcgcaccgcgcagccccgccgccctgcaccgacgctccccaccacgagcaccttcagcctcctcaactgcttcccctgccccccggccctggtggtgggggaagacggagacctaaagccggcatcctcgcttcgcctccagggagactctaagcccccgcccgcccacccgctgtggaggtggcagatggggggtcccgctgtccctgagccccctggcctcaaattctgggggatcaacatggatgaaagctgaccgtgggacttctgccaaaggggaaaagttgggaccatggccaaaccgcgggcttgaggagggagccccgtttctcacatttgtccccttcctttacattttaggagctgtgggcagagggacctaaataacagtgatcttcattcaagcacctaagttttcggggtgacagtccctccccctcatcctttgcagaggaacccagggctggagtcgggagaaggctgatgacatagattccaatccctgcctccttccatctcggaccgttggaggcagggcctgcaccccagtgggagcaaaggaggccaccgctcaaagacacccccccacccaaaaaaaaggggagaagagagagacctcggtgatggacaaaccggttgttactgtgtctgtgggcgagcctggggtgcggggctgtggtgggggtggggagatgattggcagctccctgggggcatcccccacccccactgtccaggcctttaaccctttgctcccctcaggccttccctaacgctccaagcaccgctggagcctttaatgggtgagggaacttgggtaagaggaagatcacccccttcctgtcccctttctaggccccctcaagtgcaggtgacccttaattggtgagatcttcagcctcagccgccgacctttcccttttgtccagttttggagttcccgttttttccttgtttgctttccgagtgtaaggtctggccggtgagaaagatttcccccaaccttgattaatcagccccctcccccaacttacttcccttaggacgggtagggctgagggacctcctctcctggaaagtgcttactttgcctggggaaggggctagacactgtcccagggaaagtaatagaaggtggaagaaatcaataaaatcagaccaaacaagtcgcctttcgagggcctccaccgatttatggatgagagggggtggaggtggaaggcaggcccaagtccattctttggacacccaaactcagcccccttaaagagtggaaacaaaacaagctgcactttgcagaggtggtaaatgaaaggactcttggcctaacttcaagagtcccctggggtttgaaggggcaaagtttgagtctggatggaacctgggctgaggtaccttaagcttccccccgcaacaccccagcctcagggattgcgggagttgtcagagatctgatggatccgaaaggggcagggccaggggattaggtttggggtcagaggttctgttttccaggggaggggtgagataggcctggatcatgccctctgccatgccctccagctaggaggatcttgagtcagagaggattggaagtgctttctcctccacccaggtgaggtcaggggagcttaggtcttagggagatggcaagttgaggtatgaagggaagctggggcttttggagctgccgaacaactgagggacccagtgcgccttccatcccgcactagtgaatagcgccccctcttcccccgaaa

SEQ ID NO: 31035 - DNA, 938 bp, Artificial sequence
  DNA replication origin
gccgcccttctgccgccgcgtccccttcgcaaccccggcgggagaccctctcgagtcgcccgaagcgcagaggcaggggaaacaaagcggccggcggccgcgggaggcgggaaggaccccgggcccggcacccggtgcccgggcccaggcggcggggagggcgccttccgcccgctcggtttctttcttccccgctggctcccggagaccgcgttatagagaactgccccctcgctgccccaataccagcgccggggccgcgagcccgccgctgattgggccgcaccgcccgtgacgttagcccggaccccacccctccggcggcaccgcccccgtccccattccgcacacagacacacacacgtggacccggcgcggcggcggctgggagggagcgcgggagggagcgtgcgcgggtgggatcgcgagcggccagatgcgccgccgcacgtggcccggtggcgtcctgggatttcgtcgtcgcaaagccactcgttttttcccgagcagtcacggttttgcatctgtaaaatgggacggttcatatctgccctcttgggactaaaagagctatgtgaatcaacgtagatgaatctcagaaataatgtttaggggaaagatgaaatgaggcaatggttgtttacaagctttgcacagcagggattctagcgggccgtgaatggcccctaaaacagtgcgtggcacacagtaggctcaaaaatgctgtaatgtataagtagttaataattcagtacttgtatgcaagatgaacaaaaaaaataaatttggaagggtgggagtgttattacatccatggaagccgataaataggctgtctcggtatctatttccatttctctgatgcagtatctaaatactccgcctcaactaaattccgagggctgactctgcaacccctgacccccaatcccaggatg

SEQ ID NO: 31036 - DNA, 1150 bp, Artificial sequence
  DNA replication origin
ctccgccgccctatgcgtgccagggccgcgcgctcccgctcctgcttcccgcttcccgcaccttctcccgtctcgcgcgtcccgcggcgaagggactggggcagagacgaccaaacagaaaattatttccgcccgctcgccccgccccgcccgtccccggagccagaaggggattgtggggccgccgcggccgccgccggagccgagcggggcggaagcgcgcgtcgcgctgctgctcgggcccgaccgcgccggcccgcacctcccggcccggagctgcgggctgcggtcagggcgatcccggggccctaggcggctgccgccgggcaagtttccgcgaagcctggctcgccggttccgggaaccaagcgggggaggctggagggtgttgaggtttcgtttctgccagccgaccgggcgcttggtttcgcaggtgccaggggtcgggggtgcgacctctccctctgggccattagacagacccaggctcggggaagaggctgcgccgacgcccgagggtttgcgtttccttcgcgtctcgtttgcacaccattttctcccccaaaagcaaagcttctgaccttctgggggttcgaagaggttaagtcattttcccccaggtaatctagtcagcgaaaggcttcagctgggagggcctcccgcctgggcggggacccgctggagtcaggcaaacctaagttcgagtcccagccctgccactttcttgctttgaccatggattagtagtgacttatctgggaccctccgtttccccatcgcagactgtagtactaaccttagggctgatgtgagcagtgacgatgtcaagtgcctggcacaaagaagggtgatttccccattaaagggtatgactcggaggtgatctatctagtaggcctgggtggcttaggagggtgggtgtacagtttgtttcctaagtcagacaccctgtgcaagatggagggaggctctgtttcaggaggaactggtgggagtgaggggatttccctgacattaggaagtcagcagtcatgattattgtgaatagtgactctgcatatgtgggagtttgggcttctcaggtctttctacaggaggaacacagtactcaatatcaaatcttgccctctgcggttagctagctgcctca

SEQ ID NO: 31037 - DNA, 1220 bp, Artificial sequence
  DNA replication origin
gtcggcgcagcctcttccccgagcctgggtctgtctaatggcccagagggagaggtcgcacccccgacccctggcacctgcgaaaccaagcgcccggtcggctggcagaaacgaaacctcaacaccctccagcctcccccgcttggttcccggaaccggcgagccaggcttcgcggaaacttgcccggcggcagccgcctagggccccgggatcgccctgaccgcagcccgcagctccgggccgggaggtgcgggccggcgcggtcgggcccgagcagcagcgcgacgcgcgcttccgccccgctcggctccggcggcggccgcggcggccccacaatccccttctggctccggggacgggcggggcggggcgagcgggcggaaataattttctgtttggtcgtctctgccccagtcccttcgccgcgggacgcgcgagacgggagaaggtgcgggaagcgggaagcaggagcgggagcgcgcggccctggcacgcatagggcggcggagagggcacgagcagggattgagcacctactgtgtgccttcacgctttacaaaaggattttcgttcgatgttcactacagcccctgcccgggggtactgatgccccatttacagagggacaagccggatttcggagaggtgaagtcactcgccgaaagtcgcaccgccagggtctgcgtgacaccctaaagcagtgttcagttaccccggggagagcgcgatgaacttgaaccacttgttggctggttcctgctcttgctcgttttttgcggatcgacacatagtgggcgctcaggaaaataaatgttggaagcttgagattgaacttgacagctcgaccctaggtacccgccacgaatccagcccagcccgcggggcaccgggtttctccagacctcgcagggaacatttgcggatgggctggtagaggaggctcggacatcccagttccgcacccgcactcgaccaacgcgtggtagcggaacccctgtcgtagcgaggcacagactgggttcaagtcccgactctgccgatttcagcctgagtgactttgagcgagtcactttttcccgtcgaaacctcagttgctccatccacaaaatgggaaatatgaacagccaccctaaaacggtgtggggaggattaaacgaaacaacgttcccaaaactctaaacttacaaatgttgtctcccgtccatcccataaacttagg

SEQ ID NO: 31038 - DNA, 921 bp, Artificial sequence
  DNA replication origin
tccctgacgccaaagaccaggtcaaggacaagttctcccccgccctactcccccctcctgggcggggattcatctcccttccggatgaaaggtactaaagagccgacggggggccgcggcgggccccaggcccttgatgttccggttgaacaggtgctggtgaaaaggaggcggacccggcggaagagtctgccagggggcagtgcgccgaaggggaggcggcctcctccacccccagtcccccggcccgtcttcccttctcctctctgtttgcccctcccccgcaggaagcgttcccggccgcgaggtctttgaagtgtcgttgaagcccccagggctgccttctcccctacgccacccgaactcccgctgtggggggcgggtgacctttagtccccacgagtcgtccccctttaggaagtttttgggggtcagatctcacccccccttgcccacacaggttgggaagaagactttgggccgacgcccctcacttctcccccagacccaattgcagggactttagtcctctggagtgctgcgtgtgagttaccttgtgtgtctgtgtgcgtgcctagaggtcaagtgtaactggtgttcgtgagcacctcgtggttgcgggtctctaactctcgtgggtctctaagcgcacccgcggggctggagcggaggttcgtgtctctgggagggtcagtggtgtgactgaagctgggagttagctcgtgtctgtgggtgcctcggtgtgtgtctctggggctctgagtccctgtgcgtgcgtgtgtgtctgtgaacccgacaggaagctccccgagggcaggaatatgttttgctctctactcgatcccagcgactggcaacgagcgtttaataaatatctgttgaatgaataaatgtctgcgtgtgagagcgtctaccctccag

SEQ ID NO: 31039 - DNA, 1599 bp, Artificial sequence
  DNA replication origin
tcagcagatgagcccgcctcacctccattatcagtcctcttcaatgccccgtctttgtgtgggcacagctcacacctctgccaatgcaagagtgcacaggggttgggggatctgctgagctggaccctccctgaacacgttcaaggggtcccaggctgaaatgctaagctctagggtggatggatggggctacagtggaaacaggattggccatgagttggtaactgttgaaaatgaggaaggggacatgagattcattatagttttccctttactttcatatgagtaggaaacttcccataataaaaaagttcaaacagacaaaaaccaaagccccatgcctgaggtggggcagagggagggatgagcgtgaggcagagatgaggttggaggtaggtgtgcaggaaacaggaagtctgtgtgacagagctaaatcccaccctagcctcggcctcagagtcccctagctcaacctgagacgctcaggtgtgtgggaggggcaggggagtggagaggggcagtctggaactcaccaccctggctgctcgctcctgagattcacatttccggcagaaccagggtcccgttggcacctgaacgatgccatagcaagctgagggtggggaggacagtcgctgagcaaagctgtcagccagtggctttttcccagggtaactgggggaaggcggtgactccaaaggactagagccagttccagcagtgggggctgctccccagtctacgggtcactcactctacagcaggactgcccaaccgcccaacaccagccttcaaccacacaattaagcacttcaaacagggcgggaagtctgagtctttgaccttaaacttctagaagatcctccccccacgccctttctggacttgtttcccagcttcttcctcggaccagccatcagcatcagaaatagagaaaaccagaggggacaacagtcacgaccgtcaaacacgttttgttgttgtgggcggggggatttcttaaagggccagtgagggacgaggcggagaagtagggggtctagggacctcatcttctacctctaagtattccagaatcaggttaaaagtcaaggctgagggcaggtgcggtgctgggaaccgagaggagcgtggcgggaagagccccgggccacagcattcagggatgtcccaggaagggggggcccggctgcctgtgccaggcaggcgggagatgccagcctgcgccctcggcaagattcctcaaggagttaactcccgaaccatgtgctgctgggggaaactccaagcctccctcttctcgattccggccccctgcacaacctctctcctatccttagctcttccccggcggattttaggagtcccttctcccctgggacccttctcttccctttccaagtccgctcctcccattatccggaagcgaggggggatgacgccccccccttgacctcttcctccaggagccgggaccaaaataaccgggcgggaggggacacctcgcaggtaaacattccccaggcagccccgacacccgcggtgtggggcgtggggagttcactcattgctccctagactctccccaaactccctcaa

SEQ ID NO: 31040 - DNA, 3328 bp, Artificial sequence
  DNA replication origin
ttagcctggcttggggaccccatacagaatgaatctgaactgccctctcctgtggctggtcaggtgcccccagcccacagagaggttaaaatctggagcaggaggcagcacgtgggcctcatagcagtgactgcaggactaccagtctggttgggcaggcttgtttttgccatcttccccatcagcaaacattgaaccagggcccactcccgcctgccccagactggagacttttaggttataaggaataattcttccttcatgagccagcagtgggtaccagagtctcttgggctcagcacctgtttcctttcccacagaagggggtgcctgtcagaggcctggagccaaggccacctgtggctggacagcagcagccccctcagagtggggagcccacttctgccttctgcacgcgctcactcctgtgggtgccatcgcagtacgggggcctctgagtggccttgcaggtacagagtgccaccatgcgggtctcttgggccttgaacttgagtggagataggccagtgcgttggaagaagtgggagccgtcacagaagggctggtgggggaaagacaggagtcaaagacctgaccccacctgctggggcagggcagggcaggctgcaggagctcagggggagtggagcacagtggttagggtacaggctccagagcaagactgccaaggctcactgagtgacctctcttatctgtaatgtgggggtgataagagtagagttgtatgaggaaataaaatatgatcgtgatgcactttgcctatagtaagtgtctggtaagtatttacagagtctttatagcattagtctctgggacacccagagggccaggacactaatagagtgtgagtgtgtgtgtgtgtgtgtgtgtgtgtgtgtctctgagtctccactggatcatgaaattcatttacttcccatgttcctgggttaaaacttctttgggctggagagtacactgtggtagcaattttgtttggctccagggaataactgggcacgtgacagggagtgaaggttacaaggaggaggggatgccccatagcaaactggctggctggcacagaagtgtactccccatcccagaagccgctcaagcagagactgggtaatggaaacaggcccagaaaggtgacatgccttgctagctgaaggcagagctggtgccaaggcctttttttttgacagggtctcactctgttgcccaggctggagtgcagtgatgcaaacacggctcactgtagcctcaacctcctggggtcaagcggtcctccttcctcagcctccagtatggctgggaacacaggcctgcctccatgctagtctttggtgggggtagaggcatttgtagaagcggggtctcaactttgttgcccagactgttcttgaactcctggactcaaaagagcctcctgccttggcctcgcaaagtgctgggattacaggtgagccacctcgcctggctgaaccaaggcctcttgacattggagttagggtgggatggaaaggagatgagagaagcgtgcaaatagaaaccagcaacttgtcttagagggcttgaggtgcatggacctaagtgggactcaaggaccctgggctgctgacaccatgccacatagcttgaaggaataccagtcagagctctgctcaggaaggaaaggggccagggaggcaaacaatatgggcaggttcctgctgggacgaaaggctcctgggcagaaggggaagcaagtggggcaggcagtgaagctgagaagacagcaaactgtggcaagcggccaggaagtcccataaactgagaaggaagagttttctggaagaagagtagagaggggcacaggggaaggctgggaggctttggaggcaggagagcctgagcagaatctcttcccaatgtgtctatggccataccaccctgaatgcgcccaatctcatctgatctcggaagctaagcagggtcaggcctggttagtacttggatggaagaccgccaggaaataccaggtgctgtaggcttttggggttcaaggcctgggaatctgtggcccaggcgcttcctggaaggagacagggaagggccaggtgagcttcgccatgcagtgcacctctgagaaacaaacagctccagaagagcccactggaagcctggccacaccaggctggctgcgtgactgagtttctgtctctctggcttcattgcaaggggtagatgcagtgagcttaaggttgctggtggcactggccttttgttcccaagcccccttggtgtccctcaggtatgtgtgggaagaataagatcatcctgggtgggaactcactggagacaccaggctgttcctagccagaggtatcagtaggaaggcagacaggggtctcacctgcttcttgctgcggccacacacacaccacctgtaggttttccctgccaccagctccaccttgatgggggtcttcagggccaccacggacctggctggggttctagggaaccactgggcctgtggccagggaagatgaggggctcagggttagctcaagccctggaagcaccgtccggcctgcgacccttcctagtttcccactggcctgtgtgtgtggcaggtttcctctacaagaggctgatctgatgccacccaacaagaccgttccccaggacaccataggaccgtgagctttggacagggagatttcaaagccatgcaggcactcaggtttcagggtccagctgccttccctcaaacgctggctcccacctgcgtgctagggaaggcgggctgggatccttccagcctacggcagggccacccacactggggcttggttcattaggtgctgctgtcctcagtacagaagactggcgccctgcccagtgccctctggtccgccccacctccctgagagccacgggctaactccagggaataggcctgtactcttcctagctccatttcctgtttctgcctttgagatctccgtgcctgggggtcttgtgcgaggaggaggggaggatggggggactcaccagccaggaggagatgtcccgccgcgggttcaggtcctgcaaggtacgcaagcatggcaggcatcacaagacggtggtttggaaacggaaaaataaaatcagtggaaagggaaggacacgggaggccatctaggaaggaggaggtgacagggctgaaggggcgagggaggaatgagagggtaagaaaaaggtcgcaagagaaggtgctggctgcggaggtcctggcagggactggcgctcgggaaaagcctgtgagctgaggcaagccagacaccggcgggacggg

SEQ ID NO: 31041 - DNA, 974 bp, Artificial sequence
  DNA replication origin
ttgtttcctgtggcatttaaattaatctggttggtccatagaaaataagtatgtatatttggtttttcctatgtacatatatatatatatttatttataaaacccgccccccacccccaaggtgggaagagctggggaaagtagaagaggtggaaaaaagggcccagaaaaagtggaaggagtggagaggcttggctggaagaagggagagggtccctggcctcaagttaaggggggcacgggagcgccgttgacagtcatcttgcgccccctgctggtggaggatggtgtctgcaggcagttcaagctacccccgttggcagctgtggtggccccactggctgtcgaagggggagtgggggaggtagggtgggtggctggaggcccatgggaactgggagagccatgggatggggtggctgggctgggcagggaggaggaggtggctggcagggtggcagggctgggagccttgtcgctgactgactcacactcggacgccccgctggtgttggtgccctcggagggggtgggcaccgtggctagggtgagccgcttgcaggctggctggacacggtacttgagggggagaggcccgttctgcggggagagtggggaggagagacacagggaaggggaaggtatcaggagacagagtccaactaaagggccaccatctccaccccacagtgtccaaactcgaaaaaagggatgggatggggccttggagaggagagagacaaggatacagggtgcatgaagacccagagagggaaaaggtctaagagcagagactccgtcagagaggagacgggagagagggaggcaaacacacggcagctgccagcacctatttctgcccccaaatctggggacaccgtctgcccagggagccttgtctcctgagcggaaagtcatccgcaagagatggcccagaggctgacctgctgtagcaagccaccctggacatgcag

SEQ ID NO: 31042 - DNA, 1371 bp, Artificial sequence
  DNA replication origin
gggcccgggctgcccctcgccctcccccactgcccctgtctgcccataatcgctccggttggcttgaggtgggaggaggcggcatggaggcgggtggatttgccagtgaatattgtggaagtgttacccagcgcttcccgagatctttgtccctcagtgtcccccatgctgcctcagtctccccagaggtctgtctcgaggggagggctgtctcctggttgtcccctccccgctctgttctgatgcctcctcctctgggacctctggcagtttctgttcctgaaactctttaatttctctcctccctccccccttcactctggtccaaggtgttattactgggagcataaagccagctctgttgcagctttttggtgggaaggttttcccacgggctcccctggttgggggttgggggattgaggctttagaactgactttggaatgaagcaggaaaccaaccccaggatccagaccatgtgtagctaggtagggttcaagttgaagtcttgggggttgggcaggaagggggactctgctgcccctggccttgcctgagagatcttggttgatggagctgttgtcatgggaatggagagagcccgaacaggaagagggtacagctttgtgcaggtcacatgcccactgcagccctccagcctctggtccccagagcggactttggaagctgaactgcttttgttgctggaagacttatgttataatttaccctgggtggaccagggtcgtacaaaaggttagtgtgtgtttgcagggtctgtttccaggcagggatgtcaggctgtgtgcttctaggtggggggtggatgtggatggcttctgcatgtagcgagggtgggcctggctctggtctggctgtgattgtgtgtgtgtgtggcgcagggtgggggagggttgtggcgtgtctatctggccttgtgtgtagtgagtgtgagaggtggaggggggtgtgtcttgctgtatgtgtgtgtatctggcaatgtgtatattttggggttttgcctttgtttgatcttagggagttgagaggtgggagagggaggaagggagggttgagtaagcccagcttcaggaggcccttttcaatgcatggtggggacaggggagcagatctttgtgccattgtcaaggattggggaaagttgggaggttcacagtgtccctaggcagaccctcacggccccaaacacaaatacaaggggcttgcgcagttggacccacgaagctgggagaggaacagagtcataaaacccctggtctgagtcttgatgctgtactctggctggctgtgcttccctgcagcctctgtttccctatgtgtaggaagtggggtaaggcaattaacatgtg

SEQ ID NO: 31043 - DNA, 698 bp, Artificial sequence
  DNA replication origin
gaggccgggggagggcgcccttccccgccggggtccgggtcctctcgggcacctccccccgccggtccccgctccccgtcccggcgccggcgccccgccccctccccgaaccacctcagcagagcctccctccggaacacccctcccggggccccgcagaaagtttggctctagggaaggtgggagcggccacccggtaactggggtccctgatccttggacatgggctcctggggaagcccgggcgctgggggtagaatggggatggagggaaatttatcgcaatatttcccatcgccagcggaagcagggggatctgctaaactggccccccttcccctgggacgcccagccaccccaccctgcgcacgccctcctactgctagctctgagggcgtgggacccccgggcaagcagacaccccctgcctgtctccacggtgggcccgggctgcccctcgccctcccccactgcccctgtctgcccataatcgctccggttggcttgaggtgggaggaggcggcatggaggcgggtggatttgccagtgaatattgtggaagtgttacccagcgcttcccgagatctttgtccctcagtgtcccccatgctgcctcagtctccccagaggtctgtctcgaggggagggctgtctcctggttgtcccctccccgctctgttctgatgcctcctcctctg

SEQ ID NO: 31044 - DNA, 781 bp, Artificial sequence
  DNA replication origin
cgctggccccgaaaagcggcgcaccaggatccagcctgggcgcctggcagggagcaatcgcgagaggggagtggaggtgcggggtgaggccgggtggggggcctcgccgcggggggatcgggtagctctggcggaggctgcgcccccggcgtgctcgggcagagaagaacggaggcccgctgaggatgggaactcaggctccgggtctgggacacaataatccggccgaaggcgagcggccacactggactaggaaacgaggcgccgggctgtaaggtgggcccgcgccttttctcctgcctggcgctgattcccgcatttttcgctcgcgccctgcgctgcgcgctgcctgtgcgcctccctgggcgcgcgggcgggagagtcgggcgagcgccaagacggctgggcccgactcccactggcgccccggctccacctggcgctggggctccggtccgcagtggctccggcaggagggagagaacgaggagggaggcttggaaacgccgggagtagcggtgaggccgacgccggggaagcgaatcgatactgcgttactggacgcccgtgggcctcatgaggatggtcgattccctcattcgttattcacgatttattagggatggcggccgcgtctgtccctccagagagctcgattatccatccggccagcagcgccattaagcgcactgacggtgggaggctcgagttagaaattaggataggaatcttcgcccagttttggagcgcctgcctcctcttccctcgttgctcgcagcca

SEQ ID NO: 31045 - DNA, 1138 bp, Artificial sequence
  DNA replication origin
tgggcccgactcccactggcgccccggctccacctggcgctggggctccggtccgcagtggctccggcaggagggagagaacgaggagggaggcttggaaacgccgggagtagcggtgaggccgacgccggggaagcgaatcgatactgcgttactggacgcccgtgggcctcatgaggatggtcgattccctcattcgttattcacgatttattagggatggcggccgcgtctgtccctccagagagctcgattatccatccggccagcagcgccattaagcgcactgacggtgggaggctcgagttagaaattaggataggaatcttcgcccagttttggagcgcctgcctcctcttccctcgttgctcgcagccaaggcagccgcgaagctgggggcctcgggtgaatgctttcgccctctggccggcgaccaggagacctgcgcacactggccgccgagtgaccccagctcgagcctgcagccacaccagcgggacgggggcggggaggaagaggaagggcggagagacttccttccagagggagtggtccgagaaccggcgggagaagggccaagggaagatccggtcacctgctccggagcctgcaggcggagaggcgagtagttcaccggccccggaggaaaggggaccctcccactgttcccaggcaaatgtgtcgccggcatcctgcactctgccggggaagacgcgcatccactcgctctgcagggaggggaacgcgggaaggactcccagtcagccgcccctctctggctacaagaccccgaacaagagaaacctgtaacaggggctctgcggagatctggatcccacccaccaaccacatgggcacctggggggctgcccctcggggcattatcagccagtgggaagggggttgacgttcctctgcggcccatgaatcctggagggctgcccgaggggccaccggggtccatccacttattcttcggttgttaagcgccagacaggagagaaccgctagagaggagtgtgctaagaccctattacccactaaaactccattttcatcttttgcgtcctggatgactagtctccacattcctggcctttctggtttctcaggagaaccttctgacccaactcttccc

SEQ ID NO: 31046 - DNA, 1897 bp, Artificial sequence
  DNA replication origin
agcgagggggcgttccttggctttctaggctggactttctcttccccttgctgcgtccctcctctcccccggggtgggcatggtacgtcccgccctcctcgcattcccgtccctccttcccttccggagcggtggcatcgccgccatcttggcattcgggttgcgggaaagagccaaaccctggcgttggggggcccgggcggggagcccctcccgcggtccacagcgacgcctgcccagccctcctccccttccggctccggcacggggccccgaggcgttcggaggccaggcgggtttctgtcaggcccggggaggaggggcgggcggggcggccgctgcctccccgggacgggccgtaccacgcggacggggaggacggggccaggggactgcagggcggctgcaccgcccgggggcggggtgcggagcgggccggcgggctccccggggcggggcgggagggcggggcgtggggcggacggaaccaccggggcggggtgggaggtaacgggacgggcgcgaccatggcgcggtgagggagcgggggtggggatcggtccgggggaggcctgaggccgctggcttgtgcgctgtctccgccgcccccctctttcgccgccgccgccgccgccccgggcatgtcgtccaactgcaccagcaccacggcggtggcggtggcgccgctcagcgccagcaagaccaagaccaagaagaagcatttcgtgtgccagaaagtgaagctattccgggccagcgagccgatcctcagcgtcctgatgtggggggtgaaccacacggtaaccagctcctgcgcgcccctctgagcgcggccccgcgcgctcccacgccccctgcagccctgggcccttgccccgcaggccctgccggtgacgcctgccacccctcgccaagccacttgcacgcccaccccacccttgcacgcctttcggccccgtgtgcactccccgcacgccacgcgaggcctggtgtctctgtggtctgccgtcgccacctccccttccctccagcccttctggcttcctgcgtgtggcgtgctcgcttggggcagcccatggagcgcaaaggcaaggcctcagtgcagtggagtcgctttcatccctgcttctcctcctcccccctcatcctgtttgtgagggtgtatattcccccttgttccttacagccggctgccagctctgtcaagtagcagtggtctgcccaaatagtcctctctttctgatcgtttggttgttgtggctgctcaaattcttccatcctccaggcctccttacctttgaatgtagaactccaccctgggtttccttttttttccctcttgaacaagatgtatcaactggagaagcacaggcttccttgaaccagacacttcacctgggtctctctgggttagggagaagaaagaatggctattaaccatttgagagaagaggatgcctggttataaggagggactattcatagtagaaataatatgtcttcccatagtttttgaaggtgatcattttaaagatgttgacttatctgttgtgtggctgcaatgttgtgatgatgcatagtgattatggtcctagataggagagataggtcccctgggtccttagggtgctttgagattgttcaacagcccctgccaggaagttggatcctgacagtttaagctggaagactgtttatgtggtgtttgttcagggtctttattctccctcttccaaccacttgctctttgccttctgaccatttctttatgaatccccacactaggaatgagcagaggaagtaaaaggacccgaaacaccaacttcactaactagaattttggaataaggaggatcaagcttgggtttcctgtggatttcagttctttaggttcact

SEQ ID NO: 31047 - DNA, 942 bp, Artificial sequence
  DNA replication origin
ggtagaaagtccccgaatgcggtgaatcagttccagcgttcaggaggatccaaccccaccctcgacgggcttgaggggttagcccgcctcccgcagcccgggcgccccagatgtgcagcctgctcgcctctgcgccgcctccggctggggaagggccctgggcaccgggcgcagtcagcctgagagcgctgaggcgccagcaccgcgggccccgccgtccccccaggaacccgcccccgcgcagccccacgtcgcccggagagcgcgcctcgctgcgcgtgcccttgcccgcgcccgaggcgcgtgcccgccccagtgcagcccctcctccccgctgtgtttattaggggaaggagggcggaggcggaggccagttccccagctccagccgccgtcgctgctgcctgtgtagttgcagccgcggccgcctcccgccagctcgcctcggggaacaggacgcgcgtgagctcaggcgtccccgccccagcttttctcggaaccatgaaccccaactgcgcccggtgcggcaagatcgtgtatcccacggagaaggtgaactgtctggataaggtgagcccgggaccgggagacgcgtctttgcaatcccccgcagtgctccgaatccagggaggagagaagggccgggtctttgccgccttatccccgcgatcccaggagaatggagggagggcgagcgggcggtgtcatggggtgtggggacacatcccagtctgaaaaccaggagatctggggcgaggcgggaagtccacgcgtagcgggcagccgctgctggagaggggtgggctctgtgtcccggggttgggaggacgggagaggagcagggaagtcaggcgccggggtgtgttgggggaaggttaggggtgcagtcccgccccctacggcctggagagtgagaagagacggccgctccctctccgctct

SEQ ID NO: 31048 - DNA, 2029 bp, Artificial sequence
  DNA replication origin
gaactgtctggataaggtgagcccgggaccgggagacgcgtctttgcaatcccccgcagtgctccgaatccagggaggagagaagggccgggtctttgccgccttatccccgcgatcccaggagaatggagggagggcgagcgggcggtgtcatggggtgtggggacacatcccagtctgaaaaccaggagatctggggcgaggcgggaagtccacgcgtagcgggcagccgctgctggagaggggtgggctctgtgtcccggggttgggaggacgggagaggagcagggaagtcaggcgccggggtgtgttgggggaaggttaggggtgcagtcccgccccctacggcctggagagtgagaagagacggccgctccctctccgctctgcgccgagcgccaagtaggcggaagcgcggggcgctggtggagggggcgggggggcggggcagaggctggggggccctgcaaaaccgtccgctccggcgggggtggcctggcttcctggcctggcggggcgggggctatcagcctgcgagtgtgtggcatctgatgcggggggttttgggtaaggacccgggctctgccgcaagagccccgtttttgaacgacctgcacccccttggattcagtcgttaaaggactcgcagacctcctccacagcttcccaacccccacctccaattaaaagccaactcccggtgctgggccgtccagcctgagccgggtggggttgggtggcagagtagggtgggtggagggtgcttagctgagatctcctgaaattgtgctcagagccaggagaccgtgtggaagaacaaagagctaacttttcaaagcaggtttctccaatggagggtggggttggctgagttctggggaagccgaggaaagggggaggtattggggggaggggagggtggccttgtggagattcagtgtcccctgggggccctgtctccccaatgctggacttgttcatctggttgccattagacttttggaggggggttggagagtagaactgggtgtttcccgtacagtttagggtaggatcctgttctcttgtaagctccgtaagatcctaaggtaaaacctgcccctctgcatcccctccccagtctggaggggaggcctctgtgattttgtgcccttcctcaccgcgtctttcatccaccacccaaagctggctccaagtccaagtattctgtcctttccatctgaactgggagggctgggaggactggatggaagagaggtgcaagggtgggaacactagatgaaagaggggtatagagccctggggccaagttcattactgacctggagccaggttttgttcaggagaggatagtttattggacaccttatctctcccctcccccttggtgtgtgagcttcctcagtgacctttggcctctgagtcagcgtgaggaggtggggttggaggttctgaaagatatttgaacttgctcttggggagtgtgggcatatggggccgctgctgtgtcactgttcctcctggtcctgggcttgactgggcaggaggagaggagggggtatattgtgggcacgaggaaagttgttgatctccccatgaccatgccagccgctgttgggcaggacttgagcttagagctatcagataatgaagtctccccttgagaatgtacctgtccttgcacactggggtttcgcccgcccctcgtggcagagattttggcctctgcatcttgagttccctgtggtccccttcttctccacagtcatgaattgggaagaggcagtgggcacttgacccgtataaggaaaaagcaaaacatgaaggcaggattgccactccaggagttgggaaactgggtccttgttccaggtctgctcccaccagttttatgaatgtctctaggcctcagtattcaccatctgtcagatgggtatgatgatgtcatttccttaaaggtggggcagtgcactaaagtccctgagtgctaaagagggtgctgtatagactatgccctccctacctctct

SEQ ID NO: 31049 - DNA, 970 bp, Artificial sequence
  DNA replication origin
gcccggccacggccccgtctgggaggtgaggagcgtctctgcccagccgccccgtctgagaagtgaggagaccctctgcctggcaaccgccccgtctgagaagtgaggagcccctccgcccggcagccgccccgtcagagaagtgaggagcccttccgcccagcagccaccccgtctgggaagtgaggagcgtctccgcccggcagccaccccgtccgggagggaggtgggggggtcagcccccccgcccggccagccgccccgtccgggagggaggtgggggggtcagccccccacccggccagccgccccgtccgggaggtgaggggcgcctctgcccggccgcccctactgggaagtgaggagcccctctgcctggccagccgccctgtccgggagggaggtagggggggtcaaccccctgcccggccagccgccccgtccaggaggtgaggggcgcctctgcccggccgcccctgctgggaagtgaggagcccctctgcccggccaccaccccgtctgggaggtgtgcccagcggctcattgagaacgggccatgatgacagtggcggttttgtggaatagaaaggggggaaaggtggggaaaagattgagaaatcgtatggttgccgtgtctgtctagaaagaggtagacatgggagacttttcattttgttctgtactaagaaaaattcttctgccttgggatcctgttgatctgtgaccttacccccaaccctgtgctctctgaaacatgtgctgtgtccactcagggttgaatggattaagggcggtgcaagatgtgctttgttaaacagatgcttgaaggcagcatgctcgttaagagtcatcaccactccctaatctcaagtacccagggacacaaacactgcggaaggccgcagggtcctctgcctaggaaaaccagagacctttgttcacttgtttatctgctgaccttccctccact

SEQ ID NO: 31050 - DNA, 1443 bp, Artificial sequence
  DNA replication origin
gacagacacggcaaccatacgatttctcaatcttttccccacctttcccccctttctattccacaaaaccgccactgtcatcatggcccgttctcaatgagccgctgggcacacctcccagacggggtggtggccgggcagaggggctcctcacttcccagcaggggcggccgggcagaggcgcccctcacctcctggacggggcggctggccgggcagggggttgaccccccctacctccctcccggacagggcggctggccaggcagaggggctcctcacttcccagtaggggcggccgggcagaggcgcccctcacctcccggacggggcggctggccgggtggggggctgacccccccacctccctcccggacggggcggctggccgggcgggggggctgacccccccacctccctcccggacggggtggctgccgggcggagacgctcctcacttcccagacggggtggctgctgggcggaagggctcctcacttctctgacggggcggctgccgggcggaggggctcctcacttctcagacggggcggttgccaggcagagggtctcctcacttctcagacggggcggctgggcagagacgctcctcacctcccagacggggccgtggccgggcagaggcgctcctcacatcccagacggggcggcggggcagaggcgctccccacatctcagacgatgggcggccgggcagagacgctcctcacttcctagatgggatggcggccgggaagaggcgctcctcacttcctagatgggatggccgccgggcagagacgctcctcactttccagactgggcagccaggcagaggggctcctcacatcccagacgatgggcggtagagtggcctcttctaagtcagttttgtgcccatctattttaaacaaaaataaaaccaaagtcatatattaacaggggaacagaaaaagccattgacacaacttccattataaaatcaaacacaccaaggcagatacattagaaatgtttaagaacatctttgtacttaaaatttaaactgtgagactgccaggtgtggtggtggctcacgtctgtaatcccagcactttggaaggccgaagcaggtaggtcacttgaggtcaggagttggagaccagactggccaacatggtgaaaccccatctctactgaaaatacaaaattagccgggcaaggtggcacatgcctgtaatcccagctactcaggaggctgaggcaggagcatcacttgaacccggaaggtggaggttgtagtgggccgagattgcgccactgcactccagcctggacgacagagagagattcggtcttaacaaaacaaaacaaaacaaaacacaaaacacaggctgggagcagtggctcatgcctgtaatcccagcactttgggaggctgagctgggtggatcacgaggtcag

SEQ ID NO: 31051 - DNA, 841 bp, Artificial sequence
  DNA replication origin
gtgcgtggaataatgaaggatcttttataattgcctttccttttcatatttgttagggtctttatgggtaactgatactttaaaaaaatcaaggtaaacaggagagagttggatatgttatgaataatttctgggctcctttgaatcctcaacctggtgtgatcttctgaactctgggtgtaacagagtttatgaggggaggatctgaacctttggctggattgtgtgaaccacggagagggctggggaagggggaattgggaggtaacaaggatgggctgggagatagtggccagacccgggcctggctgagggcggccccttcagagtagggttggggtagtagacggttgaggagaccaggaagagtggggcaggcagagacttgaatcacttctctaagtagaggctatcctgtcttcttggctttgacagagattgagccaggagaaatgcactttttctgcagcaggagggatagaggttagacttaaggaatctgtaagaagccagaggcggcagctgttgactcccagtccggtgcccttttcacaggccaggtgggatttcacaggcaggaggacctatgaggaggaagcgggtgtctggggaggccagatgtaggagaaggacgttctgggggagagttgctaaggaggggcagcctgacctgattgatggcggagttgttgtgaccagtggaagggcagctgggagcaggacctgaagagatgctagcatccttccccaaggctctgggtttgtggggctggtggggggccttgggaagtagctgagatctcccctcgctcctgatggacaggcttgtttggtagagcct

SEQ ID NO: 31052 - DNA, 2269 bp, Artificial sequence
  DNA replication origin
ctactctgcaccccttgccttgggagcggctgcagagctctaggggagcgctccgttagggctgagggcaggcgccgggagagcccccaacgacgccgcgccccccgccccgccccctgccccagctcccccccacccccaccgacccagcggcccccccagctccccgcctgctcccggaggccgcagcctccagctccgctcgcgctctcgccgctcctgccggctcgcccggccccgcgctccgccgtctcctcgccgcccgcccctccgccagccccggggaccgcgcggccgcagcctgagccagggccccctccctcgtcaggaccggggcagcaagcaggccgggggcaggtccgggcacccaccatgcgaggcgagctctggctcctggtgctggtgctcagggaggctgcccgggcgctgagcccccagcccggagcaggtaggactggcgggagccggcccgggtgggccgggggcggggagggacgggcagtcaggtgtgggcatgggcaggtgtggacggcctggcgatgtccgcgaggggggcattgtccgcaggaggccaggagagctgtgggctgtgggcaggtggatagggaccccactttcccaaacacatagggtgtgtgagtgacggtggagacaccgatgcccggacctctccttctctcctggaaggatactggagggaccttaggagagggggctctatgtggccatgggctctgaaaggggacagcgggagagtcatcaggacccctgatcaccccaggcaaggctgaattctgatgagatgggagcctggggaggcccctgccccagccatgccttcttttcctcttctctgccacacccccgaccccaaagctgatccaggctagggataggtgggagcagccagggggatggtggggacacagcgtctctgcctgggaaggcagcagccattcggtcaccttcccttgcctatttggtgtcagtagagaggcagtgggcccaggaagaagcaacttgctgcttctgcacccccagcctcaagagtccccctcctcacacctgctcccatttgccctggcagcctttggctttcagctactctggctctagatggggcactggggtagggggtggagggaggcgtcccattctgcacactcctcttcccccctaccagttctccaaactcatctctcccacctggaagtcctttctgagatctacctggaatccctcatggtataattttcatagtctctgttctcccctaagcacctagactttctctggggttggggagatgggtaatttgcagcctggcccctcagcagagatgattaagaagatagatacctgtgcatcattggcatgggtgcccctcaggtggggtgagggaggcgctgttgaggtgagtgctgtggttgacctgctgtgtctcaggagtgtgctggcaccaggcacagtgtcagtggcaatgttcttgactttaatggtcccagcatgtagctgagacagacctgggtccctattgagaagaagagtatgttgggggtgggaggggaaggaggctgacagtgggaagtatgggcagagggcagtggagctgacgaaccgagaagctgctggtgagaaccaccaattttcagggagaccacacagagggtggccagagacgtggcttctagtcccgccatctcacttgctgtgtgactttagacaagttactttctctctctggacctatttttgcatttataaagtgaggctgttggcaaaatctttgactcttgtgcgtggaataatgaaggatcttttataattgcctttccttttcatatttgttagggtctttatgggtaactgatactttaaaaaaatcaaggtaaacaggagagagttggatatgttatgaataatttctgggctcctttgaatcctcaacctggtgtgatcttctgaactctgggtgtaacagagtttatgaggggaggatctgaacctttggctggattgtgtgaaccacggagagggctggggaagggggaattgggaggtaacaaggatgggctgggagatagtggccagacccgggcctggctgagggcggccccttcagagtagggttggggtagtagacggttgaggagaccaggaagagtggggcaggcagagacttgaatcacttctctaagtagaggctatcctgtcttcttggctttgacagagattgagccaggagaaatgcactttttctgcagcagga

SEQ ID NO: 31053 - DNA, 1094 bp, Artificial sequence
  DNA replication origin
gccaggccgtccacacctgcccatgcccacacctgactgcccgtccctccccgcccccggcccacccgggccggctcccgccagtcctacctgctccgggctgggggctcagcgcccgggcagcctccctgagcaccagcaccaggagccagagctcgcctcgcatggtgggtgcccggacctgcccccggcctgcttgctgccccggtcctgacgagggagggggccctggctcaggctgcggccgcgcggtccccggggctggcggaggggcgggcggcgaggagacggcggagcgcggggccgggcgagccggcaggagcggcgagagcgcgagcggagctggaggctgcggcctccgggagcaggcggggagctgggggggccgctgggtcggtgggggtgggggggagctggggcagggggcggggcggggggcgcggcgtcgttgggggctctcccggcgcctgccctcagccctaacggagcgctcccctagagctctgcagccgctcccaaggcaaggggtgcagagtaggggacagggcgggagcccctcgggctgagagaacccctagaagcatcagccgccccgcgctcctcactgagctcctggctccctttccctcctccgttccgccgggaaagctgcagagagaaggcccgaggactggacccctggaagggacaggcgccccatccctgggtcacgggcccctgactgttccccgcccccagctcctccaagctctgcgacttcctgagctgttcttcggaattctgtgcgtctctgatgctttgtcctccagcccccacccccagaaatctccccctgcagcaaagacccccagcttttctccccaagaggggcctgaatcccaccccccttccatgactccaccttatccctccaccccccatttccagcaccgatttgccccccaagcctagcagacgtgagggtggagggggcctggctaccccttactctgcaacagtctggacccctccccacgagtaggtaacccaggcctcctgcctctctggggcctccaggcctactcagggccagacccaatcaatcttcagagcca

SEQ ID NO: 31054 - DNA, 1090 bp, Artificial sequence
  DNA replication origin
ccagcagcattacctgggtacgctcgggcctcatcccagacctaatgaattagaaacttgagggtggagtccagaaatctgtgttttcatatacgctccccatcgcttgagtccaggagttggaagctgcagtgagctatgatcgcagcactgcactccagcctaggcaacgtgcgagaacctgtctcaaaaaacaaacaaaatacacacacacacacacacacacacacacacacacacacacacacaccctgcaggtgattacgatctcaagttctagaggcttacgttaaaatttacacatttgcttctactatttacaagtttatgtttcagcctgagctcttcttgtaagacagaccacgaggtaccccagatggaggaatgtgcaaagacgccggggctggagctggaatccgtcccgagacttctcaccttgacctcgaggaaggcaggaggtcggagacagggggtgggcaggctggggaaagaggaaacccgcaggacaagagggttgtggctcgtcacgtggccacttgagggcagcaagtagctgcagctggaggtagctgcctatctgattctgtttgagagtccgccaagttgggatttaaattagacatcaagaagaatttacagaccggccttgccttgttccacggtaaggggacattgggtttagggctggaggaggtagtctctgggactctgggcccggcggaaggaggaaccggcgttctaagagattagagagcctttagttgtttcctttcttaggtgtttttttttcttttcttttcttttttttttttttaacctcagtgccacggaatccgtctcttccagcccacagtgtaccttctcctgtccccgcccatatccctcctcctggaaaatttctccaatggcgctcagcgttcgcacccttcctctccgcggttttctagtccctaggccccagcccactagaagccaggatgccccctcaccccgtctcccactctccagcgccccagctccttgccgtcacaagaacgaagtaggtcaggggagggaagaggcatcttcgtgtcctgacctgattccttgc

SEQ ID NO: 31055 - DNA, 893 bp, Artificial sequence
  DNA replication origin
agggggagtgaagacagcaggagtaggctcacccaggctggagcgtgtgttggagcgctcaatgatgatgtgtttgctggggttgttgagaactgagcgcttagccagggaaatatctgccgtcacacgagtgatggagatcctggggaatggggcaagaggggagtcaggggtcagggtgggctggaatgccctgcccactccccagttccaggcccgccttctgttcctcagtccgagtcccaggattgtgattcgaggcatcctgcccatccccagcagcagagagcaacggcaggtgcgaggagcagctcccaggatcttacctgccatcaaaccgatgcttcaagaagtcaaataaagctttctgcatcatgtctgtaacctgggggtgggggtttgtggggagggagggaggagaaggcaggcatttaaagccgctcagactctgagtcgctgggtatttgtaccctcacgttccactttcttctggacaggcctttacggcgggcgggggtctgagtctgaggggcctccactggggtctctggttccaaggtccctgtaagtggcatctctgggagggctcttctgagggtttctttgggggacggggctcctctgagtgggtctttctgtggattgggccccctgggggttgtctctgaaagtctgtagccctcctgggaggatgccttgggatcgggcccttctaggggatctctctggggtctgaagatctttctaaggcccctctgcatccactcccctctaggaagtcctacctcgtagcccttgagcgacggtcccaccaggatgatgggcctcatggaaggcaccacgtcataggggggcacatgctctgtctggggggggaagcagggaggggaaac

SEQ ID NO: 31056 - DNA, 920 bp, Artificial sequence
  DNA replication origin
cctgtaagtggcatctctgggagggctcttctgagggtttctttgggggacggggctcctctgagtgggtctttctgtggattgggccccctgggggttgtctctgaaagtctgtagccctcctgggaggatgccttgggatcgggcccttctaggggatctctctggggtctgaagatctttctaaggcccctctgcatccactcccctctaggaagtcctacctcgtagcccttgagcgacggtcccaccaggatgatgggcctcatggaaggcaccacgtcataggggggcacatgctctgtctggggggggaagcagggaggggaaaccccagagtggagatgacattagatcctctcccccagactccaggctcccccatgcagccttcccccaccctggtcccagagcccagatgtagggatcagggtgggggtggggagggatggccagggagaaccaggaagggtgggggaaatgggggacagatgtgggaatgggtgttagaaggtccccctagctcatcccagggagtggggaggaggacacagaaagctgtgatactcaccgacttctgcttctgtttggctgggtccagagattgccaagagagggaagggggaggagagagggaaggggacccaggcaggggcagagggcaaggcaggagccaggacaagagagggagggagagccgggcagacgaggagagataacagggcatgcgtgttagtgacagacagagccagagacggggaacgggaccccacgccaagggggagccagaggtggccctggatcagggctgggagcaggactgacagtcagtccagtggatgtgggaatattcagacatatcctaccctcttctgggtcttggaaaagagctggagagggtgacagcccctatcttgttg

SEQ ID NO: 31057 - DNA, 1021 bp, Artificial sequence
  DNA replication origin
ctccttatctcccccgcgtcaaggttcctgccgcttgggcaccagcttcagtgggctgagcgtgggggtgctggtggagggggatctgggccttgagaaggggaggttgaaagaggctagaaagcgagccaggcaaggggggcgacgcagagcacgctcgggggcgccaggcgggtgtgggtggggcgggggtggcacgaggaggtggccgaggcgatggtcagagggcggtgccaaatgccaacaggccttcaaagccgcagacactggttctcgagggtggggaaagagccaaccccggtcgaggtcccctcccagccacctgggctccatctctatgtcggacctgctcccctccccccacacccacgttgacttaccccacccccacccccgccccaaaaacgcctccaaagtttggaaagttggatggatgccaactcataggagggggggaagctgttttacctgggggaggggtctacttctccatccccacccgcacacttttcctacacccctggttactcccaggaagtggcattcttgggcgcggtgggttctcatggggtgaccagcaggctctgggatggtcgcgccaggggatttctttgggagtgtccttctccaaggatagcattaactcttctgttactgtggccaccagctgtaaccaccatgataatgtgactgatgggtatgtagaggggtcaagtcagacctaaaaataccttcctccaccccaggcccctttgagcctgggaggcagctgactggggccttcctttcagctgtcccctgtccctctgagtgccactccctttgcccagcctggcagtggtgggggagggtggtgtctgggattcactgggtgatcctcctaggtttgtagggagcatcacaacttgagttggggtatatgtctggtttgagagaagggcggggaggggaggatcttggaaaggtccccaggggccctcctctcccattttccatcctctttcttgtaccctgatcccag

SEQ ID NO: 31058 - DNA, 914 bp, Artificial sequence
  DNA replication origin
gagatgctgagcctacgggggaggcggcggcggcagtggagagagcgggaggagcgagggaaggcaggaaggaggcagccgaaggccgagctgggtggctggaccgggtgctggctgcgccgcgctgctttcggctcccacggcctctcccatgcgctgagggagcccggctgggccgggccggcggcgggaggggaggctcctctccatggtccagaagaccagcatgtcccggggcccttacccaccctcccaggagatccccatggaggtcttcgaccccagcccgcaggtgaggcgtggtggcccggcccaacgggagggggtcgctcccgcggaccgtgttaaggtcggctcgagaggcgcgggagaggaaggggttatatgccgggcgcggaggagagagggatgcctgcgcgccccccatccttgcaggttgtgattgatgggcgctgggcctggggctgggtggcgatgctgcggagcggggagggggcgggtgggctgcctgtcaccctcgcctccttatctcccccgcgtcaaggttcctgccgcttgggcaccagcttcagtgggctgagcgtgggggtgctggtggagggggatctgggccttgagaaggggaggttgaaagaggctagaaagcgagccaggcaaggggggcgacgcagagcacgctcgggggcgccaggcgggtgtgggtggggcgggggtggcacgaggaggtggccgaggcgatggtcagagggcggtgccaaatgccaacaggccttcaaagccgcagacactggttctcgagggtggggaaagagccaaccccggtcgaggtcccctcccagccacctgggctccatctctatgtcggacctgctcccctccccccacacccacgttgacttaccccacccccaccc

SEQ ID NO: 31059 - DNA, 1313 bp, Artificial sequence
  DNA replication origin
ggggtcgaagacctccatggggatctcctgggagggtgggtaagggccccgggacatgctggtcttctggaccatggagaggagcctcccctcccgccgccggcccggcccagccgggctccctcagcgcatgggagaggccgtgggagccgaaagcagcgcggcgcagccagcacccggtccagccacccagctcggccttcggctgcctccttcctgccttccctcgctcctcccgctctctccactgccgccgccgcctcccccgtaggctcagcatctccccgcgcccctccctcgctccctccctccgcccgcccggccccgcccctcgcagcccctccgccggctcggcgcacacaatgggcgtgcggcagcagggaggcaagcccctctcggctctaggtggccgcaggtgggcctctgactggccgtggggtgcaggcggcccgctggggcgggaaggcagaaactaggcgtggaacttgggggaggggtgggggggcggtctaccagtggatgccgagcgctgatggggattggcatggctggcaccaccccccttttgtcccaaacctctcttcctgcgggtccccccaacccactcctgtttggaccaccggaacttcccggtcccggtgatcctgggacctggctttaactcctttctccccagtgtggggcccaggctgcctcaaaccaaacagaaaagcctctccctccaacatggctctggggctgccggtgggaggctgaggctgagatggggagggtgtccaatagagacagcaaaataaatcccaggggtccaggagttctgccctaatcagtcactaggatacaccgcccccccaacccctgttcttccaaaaggccaggaatggggctgggtgaggtccctgctcttggatgagaaaagaggaagaaatatggagctgagagaggagaagctggtaaaatcagatctcatgacctttgacctagaattgcgccacctttacccctgatttagggagaaacatccaagatctggatgccacccaccatgactggtggagagaagaggaataggagattctgggcaatagactctggcgccaatttggctcaggctgtttctggttgtatagccccggacaaatcacctctctgagcatcagtttcctcctctcctataaaatggggttgctggtactgtggagtctgtgtcacctggtattattgggaggatgagggagaattaaatgaattgctggggtgtttggagaagctgtaagtttcaatgaaggggtcactcatgacaggaggaccca

SEQ ID NO: 31060 - DNA, 957 bp, Artificial sequence
  DNA replication origin
cccatctctacaaaaaatattttaaaattagctgggcatggtagtgtgtgcctgcagtcccagctactacagaggctgaggcaggaggatcccttgagccagggaagtggaggttgcagtgaaccaagattgcatcactgcactccagcctgggagacagagcaagactctgtctcaaaaaaaaaaagaggcacagaggcacaattagtattggggctcctgaacagcaagagcccaataatattgggcgcaacatgagcccactccccagtacccacgctggcccctccccgtggccgcctcagtgcccaggcacctacctacgatgagctggtggcacagctcacaagggctagctcgcttgaagacatgttcctggaagctgtgcagcctcactggtttgagcgctgccagggggcgtgggactgggcatggggagggggatggggtagccaggcccctgtccgaggctgtgggtggtggggagggagggggcagtggggttgggggcgtcagcagcacctcggtggggcacttgagctcagagcccgagcgaaggaagaagttctccaagctcttacttcggaggatggtcttgagggagagggagcgcttgaatcgctggagctgggagaaaaagagggagctgtgagtgggagcctagagggggctggccagggcgggcttcccttcagggtgtctctggcggtaggggcggcagcagcagcagcagcagcagcgtgggggctgagggccagagcgaaatgaaacagcaacagagaggctccccaggtcccgacgacacttcgcaatctcaggtgccacaaaagccaggtggttgacctccatggagaaaggagttctggccaggtgggcagcaatcaagagccgtggggactgtggcaaactggatggccagggagtagctgcaggtctcctcaagccaattgaggctgt

SEQ ID NO: 31061 - DNA, 1413 bp, Artificial sequence
  DNA replication origin
gccatcgcgaccttctggggaggcggccactggtcttcgttggagagatgggcgcagcgaggccggagggcgcgcgtggagcggtgcgggcggggtacgcgcccggctgtgcgtgcgaggcgcaccctccagcggccgccgggtcccagtcccgggctcagtccgcgcctctatcctcgctcgtgtctctgaatttgtctctacaacctgcgtgtctgtgtcttggtgtctctgtgtgcgtctctccccgtctctcccggcgtctccgggtgtttatctccgcgtctcagggcgtctctccctgcccctccgcagtcctgcattccccgctcctagccctgttgggctcggggacgcgaggccgcggccgggggtgcgcagctgcggagtccgcgagggggcctgcagcagcgccggccgtcggtcacgggcgaggacgggggcctgcggttgtggctccagaccagaaagacaggcagccccgcgccccaccacgggagcgggaccagaggagggggagcgggtagaagcaaaaagagaagtcatcgtaattaatgaatgtcatcattaaccctaattatggatgattgttactcctgagggagtcaccatgaataaattactccccgcgaaggcaggcggagcccagactcctggcgctgaaaggggtgtggggaggccgccgctcacactcagcactcccccgacctctaatccgtctgctcccttcccaagttctaggtgctggcgactggcccgcgagaagttctgtttctgcgggatcaacctgagcgggcctggggttgggatagaaagggctgtgccaagggcgcgccctgccacctcccagacttcaggccaagacctcctccctcccccttcacccggtattttgttcccatcctgctcctgttctccagaggcgaaaggggacagtgaggaccagaaatgatgggagcctgggctccggaggcgtcctgggttcgctaggcttctttccactgtcccccttcctccttcttccatcttgaccatcccgcaggagctgaggttaattcaaggtcaaggtcatcaagggagtgaccggaggaggaggccgtagggtcagggtggagtctggcagaggcaccccagggagcccccatcctgcaccaggggacccagcaggtctccacattcaagtcttcacatgcacacctgactctctcttgcccccttctaaaaatgagactctggtctgtgaggccagagctgactcccctttagagagccaagtctcagtctctcctgggaaaggactaagatgtttgggtgggaggatattgcttggaatatttgtgacaacttctgtcaagcagaaggtctaggagctgaacctcccctgagttccaatgcccctgatttcggttgccc

SEQ ID NO: 31062 - DNA, 1188 bp, Artificial sequence
  DNA replication origin
cgttctccttctcgctcatctcggtcatggttcggggagaggggaggagagggtgccgagatccgacggcaggcccaccgcgggcaggctgcgggtggcgggcgtctccgggactctgaagccgttctccagaggctgcccccagttagcccccggcacggcagcccccaacccgcgggagcgggcagagaaagttgccggggtggcgggcgaggggaggccaccacgctgagccgcaggagcgggacgaccccgggcgcgaggaccgagggtctgcagaggatgctgctcgcagcgcggggaggagggaagtggggccgcggggatgagccgagggagggagccaaggagctgtccgtgtccagccggctccgccgtccgctgcgcccgccccccatcccctcccctcccccgccggccccagcccggcacccggcggcccctccgcccagtcctcgccgcccaactttgatttaggaggtcgcctggtcccgccccctgccctacgccgctcccccgcgcagccctgcaaatcaggctctcagctattggctgcctcggtggccaggagggcgaactgggcggagtcttggggggctcgacacgatggggcggggcttggcggggaaagaagcggaggagggagtttcacactgaaaaacccgggatggaggggcgtgaccagattgagggaagcttggggagatcatagtagcgtctggatgggttgcagggaatagaaataggttggggccgcagcaagatagcggagagtgagatcgaagctaggacttccaaagagcgaagattgatagatgccagaggttggtgaaggaagaatggggacccatctgtgccattaattggatgcctttataccctgaaaaggctctctccaaatatacacacaactggactatggtgtatgtgtcaaaggccaggccggacaattcctccttgtgatggaaagccggatgactctatccccttccagtcttggcgtctgaacttcagcagagatgggggctcagtcctcacacccaaagtccccaaacttctctgagacacgctcccctcctaaagatcctaccacaactggagttagatcaggggataatacagagaggtgggggaagaggtcctcaccatcaccttccaaggtgcccctctctccacaataaccttcta

SEQ ID NO: 31063 - DNA, 849 bp, Artificial sequence
  DNA replication origin
catggagccaccctcccactgcccgtggcactgtccctaactcgccctgggtgagctgttcccgcgctctgcaccccaggcctcctggaggggaacaacatgggctctgtgtatgcaatccctcacgccctcgctcctgctgccccctctccctaccacaaagccaggatctctgggagagttgttctgaagggataatgaggttatagctgtttccttttcctcaatgaagaaaacccctctctcgaggaacacgtcctcttctgttctgtttcttttctccttgaggctggggacacggggctgacagcagccatggtggggtgggggtggggcgtcctagcccttggctgcccctccccagccctgtgccagtttgtctacactgagcccccacccctgtgcttccaacagtgtcctgaagccactgctcctgtcctctagtctattccccttacccacccacaaagcatctgttaccaaggtaacagcaagagcataactttggggtaagcaagggggtggagccctgcggaggaggggcatggttgagggttagaattttggagagatgagcactgtggacccccgaattcttcatggaggatcttttgctggagaggaggccccacgcaggctggggaggggctgtggctgagagcgtatggaaaggagggaggatgaagtctggtcgcagctggattgggtgttagcggtgagggtgcccatggcttactgtgtgggacaagcgtgagtgtggtgatgccgaggagacttcgaggcagaaagattgagcctgcctttaactgctcccttggggttaacgcctggggagagatcctgtggcgg

SEQ ID NO: 31064 - DNA, 1114 bp, Artificial sequence
  DNA replication origin
tcccatgtctacttccttctacacagacacggcaaccatccgatttctcaatcttttccccacctttcccccctttctattccacaaaagcgccattgtcatcatggcccgttctcaatgagctgttgggtacagctcccagacggggtggtggccgggcagaggggctcctcacttcccagtaggggcggccgggcagaggcgcccctcacctcccggacggggcagctggccgggcggggggctgacccccccacctccctcccggatagggtggctggccgggcggggcctgaccccctcctccctcctggacggggcggctggcctggcgggggctgaccccccacctccctcctggacggggcagctggcctggcgggggctgacccccacctccctcccggatggggtggctgcccgtcggagacgctcctcccttctcagacggggcaactgccgggcggaggggctcctcacttctcagacggggcggttgccaggcagagggtctcctcatttctcagacggggcggccgggcagagacgctcctcacctcccagacggggtcgcggccgggcagaggcgctcctcacatcccagacggggcggcggggcagaggcgctccccacatctcagacgatgggcggccgggcagagacgctcctcactttccagactgggcagccaggcagaggggctcctcacatcccagacgatgggctgccaggcagagacgctcctcacttcccagatggggtggcggccgggcagaggctgcaatctcggcactttgggaagccaaggcaggcggctgggaggtggaggttgtagcgagccgagatcacaccactgcactccagcctgggcaccattgagcactgagtgaacgagactccgtctgcaatcccggcaccttgggaggccgaggctggcggatcactcgtggttaggagctggagaccagcccggccaacacagcgaaaccccgtctccaccagaaaaatacgaaaaccagtcaggcgtggcggcgcgcgcctgcaatcccaggcactcggcaggctgaggcaggagaatcaggcagggaggttgcagtgagccgagatggcagc

SEQ ID NO: 31065 - DNA, 925 bp, Artificial sequence
  DNA replication origin
cgccgccccgtctgggatgtgaggagcgcctctgcccggccgcgaccccgtctgggaggtgaggagcgtctctgcccggccgccccgtctgagaaatgaggagaccctctgcctggcaaccgccccgtctgagaagtgaggagcccctccgcccggcagttgccccgtctgagaagggaggagcgtctccgacgggcagccaccccatccgggagggaggtgggggtcagcccccgccaggccagctgccccgtccaggagggaggtggggggtcagcccccgccaggccagccgccccgtccaggagggaggagggggtcaggccccgcccggccagccaccctatccgggagggaggtgggggggtcagccccccgcccggccagctgccccgtccgggaggtgaggggcgcctctgcccggccgcccctactgggaagtgaggagcccctctgcccggccaccaccccgtctgggagctgtacccaacagctcattgagaacgggccatgatgacaatggcgcttttgtggaatagaaaggggggaaaggtggggaaaagattgagaaatcggatggttgccgtgtctgtgtagaaggaagtagacatgggagacttttcattttgttctgtactaagaaaagttcttctgccttgggatcctgttgatctgtgaccttacccccaaccctgtgctctctgaaacatgtgctgtgtccactcagggttaaatggattaagggtggtgcaagatgtttttgttaaacagatgcttgaaggcagcatgctcattaagagtcatcaccactccctaatctcaagtacccagggacacaaacactgcggaaggccgcagggtcctctgcctaggaaaaccagagacctttgttcacttgtttatctgctgaccttccctccactat

SEQ ID NO: 31066 - DNA, 898 bp, Artificial sequence
  DNA replication origin
agcagtcgttgcggccgccggcgccgcgggaggtggtggaggcctagccggagccgagaggtctcttgttcccgtcccacggtcccggcgtcacccctccggcgcccagtccccgtcccggaactcccgggcctgtcctgggcccccggtctgtgcactccgctcgccgcagcgcccggcccgggccgcacccgccggccccatgaggagggacgtgaacggagtgaccaagagcaggtttgaggtgtgagcttggggggctcgggcggcgtgaggagggcgggtcgcgcgctctaatcccaaaacgtccgctccgcacggagcctcctccctggcaggcgccgtcacccacccactggcggggctgccagactccgctcccctttcttgcgacccagaagcccagcgcagcccggtgcccccagtcccctcgccggttcgccccccgtctcttcccaccagcgggcccccgcgggggattagctcgggcgccctaattccaccctcctccaggatcgctcagctttccattctttacacaacccttggcttgcctccttccacccagccatcacggctccggtccaccagagcctgctgcttttctcgctgctaccttcatgacgcgtttgttgtctgttgagggaggaaattaggggatgggtaccatttctccgagtttgagaccttggtgaaactagggaagtggggacggtagtttgggatgatagaggctaccacgggttttcggtgctgtgtttggtttgggtattgttctgatacttcctctgctttcccgtttagtctgtacttctgtagctcattgttccttgggaacccttggatgtctacatgctttgagattgggacgaaagttcagcaaatccattccggtctg

SEQ ID NO: 31067 - DNA, 881 bp, Artificial sequence
  DNA replication origin
cccgggagtctgatgaagtgtttccatcgggaaaacgcccccgcctactcgctcacacacgcttgtttctcccgccaaagtgacgtcaggccgaagctctcaccaaacagcgccctgattggcggacaggcaggcgctgcagcccattgggcgccggcggcggccgagcaaggaaaaccaaaggctcttcggtctcgcccgccccacccccacggacgcgcgccccgaccccggccaaaggaagggttgcccggctccagccctgcacccccgacccccggcctcaggtgcagctccgcagccatccccggaccagggcgggcacttggcctgttgctcagcgcaaccaccctcgccctcccgagccatgcacagggagacaagcgtccggccccggccccccaggcctccctgcagcaccccgtaatgtaatgcactggggcgggggaggcgggggaggcggcggcggcggcaaccgcggaggcgcggcggcagccgcactgccccaatctagacacatccagaagaggaggaaaatggctccgagcagggaccgcctgctgcactttgggttcaaggcgacagtgagtgacaggggaagggagctgggtggccgggaaggatgcgggtgccttacaggatcctggggaacaagtgacgaggggcgacgggcgcgggcagaggctgaggttctgtgcaggcaggtgcgtgcctgtttgcccgcggagggaggagagggggacacggggcagaagaggggcccccgcgcagagtgcggtactgctctactctccctcgctggtccgcgagcacgcgcgcactcgcatccgccccacagacccccttttccacacgcacaggcacttccctgcctcgccttc

SEQ ID NO: 31068 - DNA, 768 bp, Artificial sequence
  DNA replication origin
acctttggcggtttgaggcctatgtactcttcacttctcgaattctgggttaaggggagacagattcacacactggaatgactagccaacagcaaagtgttctagtcaatgatgaacactgcgggcttccagacaatgttaacacgctgaatgccaattcctcgcaacccaccctaaatgaggaaggactgttagacaaatagctcacctggggagtggactccgactcagagaccgcttgctcaggaaagggctgctggaccgccttcgaccatagggactgggcgatcgcccgctgtaagagccacttctttcgtagctggacgaccgtctcctgctatagggactgacagatctctgtcgcctactgtaggggctcggtgaccgggtgctggactggtaggccgaaggctccttgtaagggggactgaccgactgccttctcgaggtacttccaggacttttcttgtaggagtcataattgctcgaggtatgagatcgtgagggactaaggtcataatcttggccataagaagctcccgaggggctatcatcttgtttggagctgtcagaccacttcctgtgggggctcctggatctccgttttgggctgtccactgttttgtaacttttgggtgtttccctttttcgatgacttttactccggtctttgtgcccagacttcagctcccgttctttcctggtcttctccttgtggagcttggatgacctggattccttgctgctgcttttggctacctgcgcctt

SEQ ID NO: 31069 - DNA, 897 bp, Artificial sequence
  DNA replication origin
ccgaaggccgcgcgctaaagcaggacgcagctccgcgcagggcgctggcaaccgcgccttggcaaccgggacgcccgagagaaatcttaaagctgcagtggcctctttcccctccattgcggtcgccgccaggaccccaggggaaatggtcgtgcgggcaaaggttgctggtgggggtcaagctctgagcctctcaggacttgggaggccgactcatacactcgctcacttatttattttattttattttattttattttgagacggcgtctcgctctattgggtaagctggagtgcattggcgcgacctcggctcgctgcaacctccgcctcccgggttcaagcgattctcctgcctcagcctcccgagtagctgggattacaggcgcccgccaccacgcccggttaatttttttggactttaagtagagacggggtttcaccatgttggccaggctggttttgaactcctgacctcaagtgatctgcccgcctcggcctcccaaagtgctagcattacaggcgtgagccaccgcgcctggccgtatttattaaatgtgtgttgaacttacgtacccgagcacaggctagacactagggaggggaacgggcggtgattagaaatgaacaagatcctgccaagaggaattcacagtctagcgcgcgaggcagaccagaatggctgaggtgagcagagccttgtgttacccaggataaaggggcttggctggagggctgacggggggtgttataaaatattcctgcagcacctgccttgctccaggccgtgggttggatgcttctttcctgggctgtgttattatcccaaaggccctgtgagttgggtattattattacccctattatcgatcccattttaaagatgaagaattagag

SEQ ID NO: 31070 - DNA, 1049 bp, Artificial sequence
  DNA replication origin
tttgcccgcacgaccatttcccctggggtcctggcggcgaccgcaatggaggggaaagaggccactgcagctttaagatttctctcgggcgtcccggttgccaaggcgcggttgccagcgccctgcgcggagctgcgtcctgctttagcgcgcggccttcgggtttccgccatcgccgccgccgccgccgccgccgccgggccgcgccgggctccgctcctccgaaccgtctggcggacttggcaccggcccccgctcctcagtgcccccgcagtgcgtggcaggctgcggcttcattatcctgattgattcctcctgctccccgacaccatgggggccccggacaaggaagggaggcggaggcggcatctgcaggccccttccccggccctcgcccccagccgctcctcaggccaccctgctgtggctggccaggcagggcggggatggaggaccggccccgcctctgctctcttggtgggcggggaggggagggccccaagggagagcggagcagtgtccggtcggtgctcttccaaggttccagctctgggccgcgtacaccctgcctcggcccgccctcagcaaagattttgcgccttctgaaccgggaggatatggaaaggttggggtggggaaagaacacagtggaggactgagaacttcaggaaaacaagccctggtaaaacgggaaaggtgacatctctgaggagcgttggtcacgtgtgtcaaggcctggtgacgcgtgtcttatgtgcctccctgggcatcttctcagtacagttctcagtagaagcaggggcagggtctggacccaaccaacacaggacaccccgcaaggatctaagcttaaaggaaggccaggagtctgtgtgagggagaggaccttttccccagaatccagcatggtgtgcccaccccacgcccaaaccaagtactgacaccttaaaaagagcatctgggccgggtgcggtggctcccgcctgtaatcccaacactttgggaggccgaggcgggcggatcatgaggtcaggagttcgagaccagtc

SEQ ID NO: 31071 - DNA, 865 bp, Artificial sequence
  DNA replication origin
ccctcccgccaaaattaaaatcgcaaaacgcggagactggaggttgggggtgagggcgttccaggcccgggctccggcgccctaacttctaccctcttcaagaaagagggagcgcctggctcctttttgcctcggcagctgggtgtctgtttttaaaataataatgagagggggaaacgcgttccattgctcagctgcccccttaccaacgccttgggcctgcagggaggagggggaggaggaaacctcagcgaagatattgggaatgggggaggggtgcctccagggagcccccggagagaggtccctggagaagcactccttgggagagaggaggagggaaccccttggggagagagaaggcgagtcccctgggggaagcgaggcccctgggacaggccacccacaggtaacaggactgcgctgccccaggagagcggcaggaccggtggcccgctccccgcgcccggcgccggggtaggatgggggtgtccctgcgctctgggggctggggacaggggggcgggcaaaggcaaaagaaaaagaagggagccggcgcgaagtctcagttatgaaaaaacgcattgagctcctcgtacatggggccccggtcgtggtgaaggtgcatatcgtaagacaagagattctccgagtggacgcccccgcgcacagccgacgagccgaagactagcccgtggcccgtgggccgcgaaccgggcagcgccgagtagtgcatagagtagtggtagcttttctcgtggtcgggcgaggagtcctgcttgagtgagaagttgccattgagacagagcggggggctgagcgggccctcgtactcggagctgttgtagtccgggctcgcgccgcc

SEQ ID NO: 31072 - DNA, 709 bp, Artificial sequence
  DNA replication origin
aaaaaaaaaaaaaaattaaataaataaaggaaataaataaatatttctgccgccctcccctccccgcccaacgcagggaaagcagggattgagaggaaggtgggaggagttgccccctgtatatagagaccccctcacgggaacaatggggtggcaaggctggacactgggggctcgtggtggccaattctatgctccctcagggtcccgctctgtccatttcctcccctgcaggcccccaaggtgggtcagggaccagaccccgggttggggagaaaggacctctgtgcttgcccccactccccaggagggtccccttggccacaaagggacagctgagaccccctcccaggatggctgtaaggggcgtccctggcccgagccccataggtagatgttggcaccatgccatccctcatccctgtctgcccctcccccacccaccctcacgcacacacaacatatgtggctaaacgaaattcaaaccaagggaaagacagagaaagggaaagatgtgcctggatgtctgtgcctctgcatgggcgtgtgtgtgtctgtggggacatgtgtgtatctgtggagtcagccgatgggagatctttccttggttgttgggggcgtatccatgttagggtggagtggggaggggccgcgagatgagcctgtgcaccacccatctgggggtggaggggagggtctaagtctggat

SEQ ID NO: 31073 - DNA, 1019 bp, Artificial sequence
  DNA replication origin
tggatcaaacccaggtgtccagcccctggcctcagccacacatctatccacctcctggggcctctctgggctgagtggggccagcaggtgagaacccagcgagcttgggagcacggggagggaaggggccacctgtcttctcacccccctcctcagatttgaggggaagggcaggaatttggagatccttgagggacctgtgttcctgccattagccgtgctatggggggaggaggaaagggagggggcaggctggcactgcccagcagtgttccagcagttcaggatgctcgaagattcctcctaaagcatcggagcacctgccacctccctccccagcccctgcctcacatcaagtccaaaggatgctgggggagggggacctgcagcttcttcctggctctggggtgggcacctgccccactgccccctcctccccgcccgccgcagtatgccggggagcggcgggcacgccagatggcgtggctgagaatgcggcgacgttgccgggaggtgagggctggcacgggtgatatgcggctgcgtgccttgtggtgccatgggggaggggagggcagggccagtgaggtgtagccccctcctccgtgctgacctcctgtcctgacctccactcaccgccaggattctcttcaacttcctccgcctgctccctgggctcccactgtgggcctagaccccacccaaagatgggtgggaccagcctgatgctgagagaccgaggtcagacctctgttgcatccttgtccccctgtcccacccccaatcagggacaaaggatggatagaggagacccaccagtcctgcaccaaagccagccccctccgaattgtttccttgctctaaaggtggcgtgacctttgctcccgtaacctttgacttctggcctctgaaccctgtttttctgagaagagctctttccctgatgggcactggtctctgagtttccctttggtcaaatgcattctcattcctcactaagatgcttcctggacacctcc

SEQ ID NO: 31074 - DNA, 1746 bp, Artificial sequence
  DNA replication origin
gggcacagggcggccccgcccgggagcatggggcaggactcccctgcgggcccaggacgcaggtcgggggccgagaccccggagcccccgccccgcccggcgcgcggccccgccccgcccccgccgcgtggcatggctccaagcgcgcgcctgattgttatgcattgtgtttcttgtagcgaacggagccgggcggaatggggctggcacaagctgtttccctgccacgcggcggtggcaccttaaaggggcagcgtccccttcccgccgccgcggccggcccgcccggcccccgccgaccccacctccgagccggggcgacccgctcccccaagcccggctcccccaagcgggaggccgcggggaggccgccccgggagggcgcgcggtcccatggggcgcggggcacgtgccgagggagcccggcgggcaggaagtcagggctgcgagccgggattgggcggctggggcgcgccgggcgccgtgccaggcgcggggcgggggtggcgaggagagaaccgggagcaagccaggagaaggacaaggaggagaaggagcgagtggcgggggctcaccgggcgccaggtgcttgctcctaggacgccgctgctcctccttgcaaagattttgtgaggcagggcttcttattcccattttacagacaggagggcagacgggggcgggggctgcaggtagctggtgagcaagtggtgaagctggggctcctgaagctggtctgtccatccccaaatgttcaacgcggtgccaagggccagaggctggagcgccatcaggggacatcagggaggacttcctggtggaggcagcacctcactgagtctgcaagggctaggagggagtcttctgaagaagctgaggaaagtggtatatacagggtggaaaaactccatggttaatgtgactgctccctctctgtgtttagaagcagcctccacccacctacccacccatgagcagaacttgatagatccaggccagggcatcatggctcctgtgacttggggacctggccagaggccagttgccagagggcaaaccctgggcacaagtccttcccagggcaccctcctttccctctccattgcggggtctgctggtcctacggtgtggagaccacagcggtttcagagaaagggacacactttataatagtaagagcatgagccctggagtcaagtcaaacttggttcaaatcccagctctgccactttctagctatgtgaccttgacacatcagccttgacggcaacctctctgtgcttcagcatcctggtctttaagtggtggtactaggaatccctcccacagatgtcttgtcaagaataaaatgattcctgtgaaggccagtgcctggcacagatagcactcaccattgtcattattacattaataagtatgttatcacacagagtgctgaggctctgggaatgagaggaccccaaagtggcaacagagtcctggtttccagtcccagctctgccactcacttattgtgtgacacaaggcaggttgcttcccctctctgtggcttcttcatctgtaaaatggggagtgagcccatgagaccctacctctctagactattcccttccctccctgtggaccccaattaaaaagtcaggcagggcacagtggtgtgggcctgtagtcccagctacttgggaggctcaggtgggaggattgcttgaagccaggtatttgagtccagtctgggcaacatagcaa

SEQ ID NO: 31075 - DNA, 2793 bp, Artificial sequence
  DNA replication origin
gactcggggctcgccccccgcgctcgctgagccaggtctgtgcctcgctccctcgcgctccccggcctgggtgtctctgcgtctcggtgtctctcccctcctgagtgtctctgcgtctcggtgtctctcccctcctgagtgtctctgcgtgtctcctctctctgcctctcccgtccttctccacctccctccctcagcctctcctcctctccgcgtgtgtctctgcctctgccgggctcaccctccggtcccagctttggggtccccagcccgtcccctccgcctgggactggcgcccgggtgctcggagggagggtttaggggaaactggccaatgagcatggagaatcgtgttctcctggggctgggaggagggtgggagttagagccaaggcctggggagccagctggggggccccctgcggtctccccagaacttgaagctgcattattgatggagtccagcagagaggataaagggggagggagggggagaggggcagcggggaggcaggactctggctttaaccccttcgtggtcctggtactgggagtttcagagaggcctgcgaggtcgtggggagagtaccagcctgtcacgctgtgaatgggggtgtcctggaaagggagcgagtgtgaccgagttgtgtgtgggaggacacgtgtcagtcatcgtggcagggagagtgtgcaggggtgtgccggggccctgtggtgcccatagccagggagtgtgttttggggggtccggtgtggtgtgagtgtgtctgtgtaagtgtgtcagagtgtcaaagatgcaggtgtgagtggcagggtgtgggaggactgcgtgtgtgcgggggagggtgtgggtgtgggggaggatgtcagaggctgtcaaggtgatgggcaggcgtgtgccagcttgcagggggtgggggactgtatccacagctccgctgtgcagttgctggggtatgaggttgtggatgtgtgagcgctcctgtgagggagaaggggaatgtgccctgccatgatgtactgtagattcacgtggctcctgtctttcctctccggatctaatggggtggggaggacagggccggcccagagttggggtgggtttgggggctgcctgtacacgtgccatcacgtgcatgaatttggtgcattcagaagcagggttgggggagacaggtgtgagcctctctctctccagaggtatttgtgtgtgtctctggagcgggagcgggaggagctggccctgtgggtggaatgtccctgtctatttggtctatttgtccgggccttgggtgcctttgcaggagctgctgtttccctccttggagctgtgcagagggtctgaatgcttctgtctagcactgagagggtgtgtgtagacgtgtacatgcatgttttcctggggctctgtttgtgttggcgtcctctctcctggtcactctcaggcctgaaacccccaatcctcctgcagcttttccactcccagccccagcatctgggtcctgggtggagtgaaaggccagaggaatcttctggaattggggtcagggcccactctgggggtgagggaaagggtggcaggaggtccagagtgttgctcataggagtgggatgtcctggccatccagctccacatcagcccaccccaggcctggctcaagtccctgtatgtttgttgacttatatacttgttgggaaacagctggatgataagttgttggcccaggggtgtaggcatctctggcagcccctaggcttggcccagaacctctgtcgaagatggggtgtggtggggagtggcaaagacctgtttggcagtgccttcggagggtaaataaggaggtcctgaaaggaagaaggggtatgggaagggcatggcccaggcagtggcccggacagccactgggtgggcagaggtggggaaggggcttgtggcttccagtgctggcagtgtggggaaggatcgtggggatgaaggggacagaggatagctgggagggtgatgagagggtggagacagggaggcatcagcaccagttgcacctcagagcccataggagctgaaaaggcctcagggaacatggcagctgagccccatttgagcaggagggcttatttacggaggctctgctgaacttattggagctctgggagaccccagatcaggaaacattccccggatcccaggctggggcagctgagaagggagatgagggcagagaagcctccctctcagctaggcctggaagatgaggtctttgggagcggagggagggtttttgcccatctcccccagcctgtggccaggctggcatctaaatcctggggccaagaagggtggggaagactggctgacagagggacagacatgaaggaggaggaagagactgcacagagacaggacgtgagagagagattggggggagagaggagaaagcaaagagagacagaaaacatggttgagagatggagagacaaagggaggcagagagagagacagcgaacctcacaacagagaaaggcagaagacagagatggagagagagtaaaaatagctcagcattaagataattgcagctcgcagctctgccctccgttaggaattaaatgaggttttattactttgatttttctctcctggatcctacgcgacttctcaagaacttggggaaaagtttttcaggtgggcggccaggtggtgggggctgtgtgggcgacagaggaggaagggaatgggactcctgagagctggaggaggggtgggcaggggcaaggagtggggaggggctgctg

SEQ ID NO: 31076 - DNA, 705 bp, Artificial sequence
  DNA replication origin
cttcacacgcggccccgcgccccgtcctgaccgaggcagagcccggctctccttgcgcccccacccccaggccagtccggccggggcagcgccttgggagggcgaagaagccccgcggggtgtgtcgggtacgctgccggggtggggcacgggccccttaccatctccacctggcgggggtcgagctggctagggggcgcgggcaccgagaactggatcttcttgcggtccttggggtccatggcgcgcggggtgggcggtggggctggggtgcgcgactcggggtcccggcggcggtctgtgctgggctcccccgcgcaggcggcgggctgtgcggcgagaggaggaggagggctgttcgcgcacggataaaaataccgtgcccgccgaggggagggcgcgggagcgggaggagggtcggcgcccgggctgggcgcgcccccaggctctcgggactcggggctcgccccccgcgctcgctgagccaggtctgtgcctcgctccctcgcgctccccggcctgggtgtctctgcgtctcggtgtctctcccctcctgagtgtctctgcgtctcggtgtctctcccctcctgagtgtctctgcgtgtctcctctctctgcctctcccgtccttctccacctccctccctcagcctctcctcctctccgcgtgtgtctctgcctctgccgggctcaccctccggtccc

SEQ ID NO: 31077 - DNA, 1302 bp, Artificial sequence
  DNA replication origin
agacctggctcagcgagcgcggggggcgagccccgagtcccgagagcctgggggcgcgcccagcccgggcgccgaccctcctcccgctcccgcgccctcccctcggcgggcacggtatttttatccgtgcgcgaacagccctcctcctcctctcgccgcacagcccgccgcctgcgcgggggagcccagcacagaccgccgccgggaccccgagtcgcgcaccccagccccaccgcccaccccgcgcgccatggaccccaaggaccgcaagaagatccagttctcggtgcccgcgccccctagccagctcgacccccgccaggtggagatggtaaggggcccgtgccccaccccggcagcgtacccgacacaccccgcggggcttcttcgccctcccaaggcgctgccccggccggactggcctgggggtgggggcgcaaggagagccgggctctgcctcggtcaggacggggcgcggggccgcgtgtgaagttagctggagactcgtgcaacttttccccgcggctttggtcctgatcccggggcaagagagttcctggcagtgaggctgggggtgcgggggtggggggacaggccgattccagaccgcccaggagtggggtgggggcgtcctttggtcccagcacagtccccaaagggtagtcagtctcctaggctaccaccgggaccgctccgcctggctctgtcccagagctggtcagatgtgagcagcggtggacactgaccttgtcacccagggcaggagtatgaggctgccaccgggtgaatccactaccctgcccctctctaatcccgcgtgtgtgcctgggctggggtctccagaacctggctctggcctcctgctgtcaggccccagagccccaaccccaaggagggagaggtggggagtcatcacaaagccagacctcttcccacagactactgagtcctcctgagggccttcttgggggttgaggggcttccaaaggctggcgggtgctgtgacagagagctccacttcccatccctagtggagcaggggtcacttgttgctgagctgagatgcagctggctccccactgagcagtgatgagggggccaagtcattatggggggagatagagggcagggggtacagtcctgggcctaagcagctttgggtcatgagggtgtcatggggagcttggctggggaggtggcagtttcagcttaactcacctggttctctttgtgcatttccctggagctcaacagggacctaattaactgacagttggtctgattgccaagctgaggggcggg

SEQ ID NO: 31078 - DNA, 845 bp, Artificial sequence
  DNA replication origin
tggggaggtggcagtttcagcttaactcacctggttctctttgtgcatttccctggagctcaacagggacctaattaactgacagttggtctgattgccaagctgaggggcggggcggggaggggggcggtcagttgctgcttggctcacgtagcaaggagggcaacttttcatttctcacaaggactgggtgaagagttctgcagccttacagagactggaaaagaagcccaaaccaaggcccccagagaggtcccccaggcccctttgggtccctgagcctcagctggaggtggggggtgcctgcagtgcgctggctcagtctccttctgaaaagctggatccagcttgtttgaagcccttgagctgatcttaggtgggcagggccacatgggtgccatggcccgtggggcatcttccccagagggcccagccgtggcagctggagctgtagccagctttggcttccgaggtctgatgttttcagaaactggagagaggaagggccttggtgggagaagataggaagggagatgtctgttctggagtagccatggagtgggacaggcatgggctgggagtcagtgactggggtttttctcgtcctttggacttgttgtgctgtgtggccttaagcacattgccaaatctctctgagccctgctttttcacctctgtaaaatgagggggttaggtgagctacagagttccttttggctctgacagactttgattcaaaggttccctggggactccaaagcactgtttgttccctgctgcctgggggtgggggagggctgcaggtgtccatccagtcacccctccctccatctccttagatccgg

SEQ ID NO: 31079 - DNA, 1697 bp, Artificial sequence
  DNA replication origin
cccaggataggcggggtcgccaagagtcattgctggagaccccaacccgcgcggggcggcgcgaggccagacagaggaagggggcggaacctgagacgcagcgggtgtgggaagggtcggacggaacccagcacggacagcgggcggcgaagcgggttcgaccggcggaagacggccctcgcacgccacccgctcccagcgaccgctccgggacccacctgctccatgtcagccacggccccggctcttcccgccccaaccgcagtccggctccgcggcctcagtagcgcctcagagcggaagaagatcttccggcagcgccacttccgccgctgagtccgcccccgagagcgaagcgggacttgcgttcgcctgcggccccgccccttcgccccgcctccagccccggccctgcgcagaagcggactcaaaggccggagtctaagggcctacctaagggtaggggagtgggaagaagaccagggccgtcgttattaggccacacaggcctggcactgagggaaaaaggggaatttcccgaggggagtcctgtggggatggggaaatctttggaggaatccagttattcgagaaggacttccccaccccacctgcctccttcagccatcccaagcagcagctagaacttctgtagttcttcctctgagtgccccgagcctgctgtctgccagaaagactcctagactagaggattggacagtagggtcaaaaccctaacccttggttgaccaccggccttccctatcaggacgccccattacctcccttttcctcctgcttcccctgaaagaggagtctcagcagttatttacaaagatttattacagcacgggaggggttcaggcctggagtcagggaagaaggggaaaggggcagagcagctgggggacaaggaaaacctggcgccccccgctgtgtgccccaccggggacataaactaggcggcattcctggcatcaaagcacaaaacgcaacaaagaggtctctgccagtccatcttccaggcacccaggaggagcaagggtgattaagggaagattcccaaaatgttgaggctatggagaaaaacgccttagtcctggaccctggtagaagccggtgagagaagtggtgacttggaatcctccataggaaagtgggtagaaaaggatctaagggtacctcaaggttctcaggacctcctttccccagatcttagggtcctgccctgtgggtctcctgtgtccaggggagaggatctggggagtagaattgtgaagggcaaatccctgttcccggttttctggattttccaatgtgggctgtctcacatcccacctcccgctgggtgaatggaggaatgactggcaggggtgggcatcaggcagcaagtgcccaggttctctgggtatcagccaaaggtgggcaaacaagcaaacacagaccagccttagtcttctagaagtcagaagccgcagccctagcaggcgaggggaagagcacaaaacagggtgaggatagagtgggtttctggggaacagcgatgtcccctccacttcctcctgggagatgcaggctgggtgcctatgtgccaggctcagagggggaagggcgctgaggttcctccccaggctctgaaaggcaagcagagagggactcagggcctggccccacccaccaagatcccagcccctcct

SEQ ID NO: 31080 - DNA, 878 bp, Artificial sequence
  DNA replication origin
cagagggtggagtccagctccaggagaggcagcctgggcagggaggggctgctctcccggctgggcgtgagtgtccatgtgcacttgtgcatgtgctgctgtagggaagggtgtaaatggccgttcagtgcatttcctggaaacccactctgagcctggtacagttctggcactgggcatgcagcagggagcaaagcacaggaagtccttactttcatggagttcgcatgccagtgggagacgatgggcagtaaacacagaccagtgaatgtatcatatgtcaggggtgacaagtgctgtgaagaaaaatacagcagggtaagggatggagggtgggggctaaatagaggttcaggaatggtctctacaaagggacatttgcatagggacctcattggaatgagagagcaagtcatgcaaagacctggggaggagctcccgacagagcagcaggtgcaagggccctggggtaggagcatgcttgatgtgtccgtggacagcgagggaccagtgtggctggagtagagggctcaaggggaagaggaaaggggaagaggaggacttgtaggctagggtggggacttacgcctttattctggggaagccattggaggttggggcactggggagatgtgatctggcttttaacaggatccctgtggctgctgtgttgagaacaggctgaaggggtgaagacaagaaagagtggcaggtagaggtgatagcctggacagggtgacatagtggtaggtgagcagtgggcagatactggccagattttgcaggaagagacaacaggatttgctcatggtttggatgtggaagggaggtgtgaccagatgaatgctaagcccaaagagggcctcttgacacactgt

SEQ ID NO: 31081 - DNA, 954 bp, Artificial sequence
  DNA replication origin
aagaggaaccgtccctgccctgagtggacgtgaacgtgggtgtggatctgtgggcatggggtggggggcggtagagcactgggctggcctccagagtggctgcttcctactctctttagggtttgccctgttcctgtctgttatgtagcatggagctgagggccaggagacctactgagcattcatttattcaacaatcaattacaaagcacctattgcatgccaggcattgtgctgggcaccagggagacagcagtgaccatgtcagataaagcccgtgaggccatggagtttacagtctagtgagagaagggtaaacagtgaaataaaacaataaagatcgtttcagatagtgacccacttcactgaagaaaggaaggcagcttactatcatgttatgctgtgatttggagcaggagggtgggaggctttctgaggagaggacttttgagctgcctgttgaagggtctgtgggagaacattccaggcatggggagagccagatcgaaggtcccaaggcaggacagggcagctgtattgagggatgtaaaaaaggccagagtggcggtggcagcaagacagagagaagggctgggcagaggccacctgcaggcctggactgagagggcctggtgaggagactgttagcctgagaagggtgggaaaccgtgggagggcattgcaacgcattctctaggccggctatgtgaagagcaggagggtgagagaggcagcctggaggcccacccgtgagaagcagattgccatggtccaggcagagatggtggtggttggacctaggcagggcaaggggtggtggagctgagagggaccaagatgcctgctctccatagctccaagcacacagacactgctctaggaaggccctcccagttgccatggattagggggtgggaggggaagactggctgctgggagggaatgtggctttgt

SEQ ID NO: 31082 - DNA, 1091 bp, Artificial sequence
  DNA replication origin
tgtgcccagagagcaacagctcccaggagctcactgcccctcccctctccccagctgctccctgcatgaggaggacacccagagacatgagacctaccaccagcaggggcagtgccaggtgctggtgcagcgctcgccctggctgatgatgcggatgggcatcctcggccgtgggctgcaggagtaccagctgccctaccagcgggtactgccgctgcccatcttcacccctgccaagatgggcgccaccaaggaggagcgtgaggacacccccatccagcttcaggagctgctggcgctggagacagccctgggtggccagtgtgtggaccgccaggaggtggctgagatcacaaagcagctgccccctgtggtgcctgtcagcaagcccggtgcacttcgtcgctccctgtcccgctccatgtcccaggaagcacagagaggctgagagggactgtgacttgggctccgctgtgcccgccctgggctgggcccttcctggctaggactgtggaggggagctgctggccatggctgctttgtagtttgcccagagttgggggctaggggaggggggagccagaggccaggatgcctgagccccctgagttcccaaagggagggtggcagagacagtgggcactaagggtggagagttgggggccagcacagctgaggaccctcagccccaggagaagggacaaaaggtactggtgagggcaagaggtgcctgggaggagtggccctgatccaggaaaatgtgaggggaatctggaacgctctaggcagaagaagctgggagggagggggaggtgaaaagggcagaggcaaggatggtggggcccccagcaccctctgttagtgccgcaataaatgctcaatcatgtgccagagttgcatctctttccttgtggttgggggggctggcccatgggtgtcccctcaatgcccacttctgggaccaggctccgcatctgagctaaatatggcagagctaatgggtacaccccatacttggggtgggggtgggggcaggacagagctgtaaacagggtgctgtctccagtctccttcccgtaccctgaccgctg

SEQ ID NO: 31083 - DNA, 1180 bp, Artificial sequence
  DNA replication origin
agagttgggggccagcacagctgaggaccctcagccccaggagaagggacaaaaggtactggtgagggcaagaggtgcctgggaggagtggccctgatccaggaaaatgtgaggggaatctggaacgctctaggcagaagaagctgggagggagggggaggtgaaaagggcagaggcaaggatggtggggcccccagcaccctctgttagtgccgcaataaatgctcaatcatgtgccagagttgcatctctttccttgtggttgggggggctggcccatgggtgtcccctcaatgcccacttctgggaccaggctccgcatctgagctaaatatggcagagctaatgggtacaccccatacttggggtgggggtgggggcaggacagagctgtaaacagggtgctgtctccagtctccttcccgtaccctgaccgctgcccagtcctggcttctgtgtccagccccctggcactgggtggtaaccagcaagccagctggcatccgcatccagggtttgtttcaatgatgtctcgtggagaatatggaggggctggtgccaggactgtccttggctttgcctcggggtgtgaacggggtcagtgacctctaaaactaacctgcctctcagttctgaatccagacagaatcaatcctcagctgtgtctcgctccacaccccctgccctggaagccagggaaggttggaggtgctagggggtcaggctcccctctgtgacccctgcagctgttgtggtgactcatgtcccaacctagctgcctctcccaaggagactttcccctggggacaagggggagggaatggcatggaggaggcccacatcaagcggggccaggaacccacggtggcaggagctgggctggtgacctacccagggcagaagggcccgggactcatccagaggggaaggaaggggtcttcaggaagaccacggagatgccacaggcagaattggcttcccatctgggagataggtggggagaccctggcattttgacagccagaacctggggtgctgagcagaatcttcatgcctggcctggccgctccttcggagggaagctggagggtgggctgcgagaggagtggggtcagagcccctacatccgcaggaccccaaatcggctgggccccaaggcccggactgcgctccccggtgg

SEQ ID NO: 31084 - DNA, 802 bp, Artificial sequence
  DNA replication origin
agaatcttcatgcctggcctggccgctccttcggagggaagctggagggtgggctgcgagaggagtggggtcagagcccctacatccgcaggaccccaaatcggctgggccccaaggcccggactgcgctccccggtggccccggcggccctccgcgaatgcgtcctgcccctcccctgcccaagccctctgccctcacccgggtccggcgccgcccccgaagtggcgggaacaacccgaacccgaaccttctgtcctcgggagcccccagataagcggctgggaacccgcggggcccgcaggggaggcccggctgttccgcccgctaagtgcattagcacagctcacctcccctatcgcgcctgccatcggacgggcagtgccgcgccctgctctggggcccccggagcgaccacagcggaggccggaacggactgtcctttctggggcggggtggggagggggtgtcgctggagggcccggtggcatagcaacggacgagagaggcctggaggaggggcggggagggggagttgtgtggcagttctaagggaagggtgggtgctgggacgggtgtccgggagggaggggagcctggcggggtctggggcctcgtcgcggagggcgctgcgagggggaaactggggaaagggcctaattccccagtctccacctcgaatcaggaaagagaaggggcgggctgctgggcaaaagaggtgaatggctgcggggggctggagaagagagatgggaggggccggccggcgggggtgagggggtctaaagattgtgggggtgagga

SEQ ID NO: 31085 - DNA, 961 bp, Artificial sequence
  DNA replication origin
attgtgggggtgaggaactgagggtggggggcgcccagaggcgggactcggggcggggcaggcgaggcggagggcgagggctgcgggagcaagtacggagccgggggtgtgggggacgattgccgctgcagccgccgccccactcacctccggtgtgtctgcagcccggacactaagggagatggatgaatgggtggggaggatgcggcgcacatggccccgggcggctcggcggtcagctgccgcccccacagcggaccggtcggggcgggggtcgggcggtagaaaaaagggccgcgaggcgagcggggcactgggcggaccgcggcggcagcatgagcggcgcagaccgtagccccaatgcgggcgcagcccctgactcggccccgggccaggcggcggtggcttcggcctaccagcgcttcgagccgcgcgcctacctccgcaacaactacgcgccccctcgcggggacctgtgcaacccgaacggcgtcgggccgtggaagctgcgctgcttggcgcagaccttcgccaccggtgagcgggggaaactgaggcacgagggacaagaggtcgtcggggagtgaaagcaggcgcagggaaataaaaagaaggaaagggagacagaccaggcgcctaacagatggggaccaagaaacaagagatagctgagaggtgcaaacagaagagaaaaaagagcaacatcccttaggagaggggcagaggagagagaggtggagagagggggcggagagtgctcagaattgagagctaaggtgggggatgcaggacagactgaggtggagatgcataggaggaaatggaggcagatgtgggacaggggtgagaaactgccaggatttcctcgctgagcctggctggtaggtatagttgttttctttctttttctttattttattttcatttatttacttatttttattttttatttgttttgaga

SEQ ID NO: 31086 - DNA, 782 bp, Artificial sequence
  DNA replication origin
gaggaggaggtgccccccaggcctcagcagcgtggtgatgtggtccagggcccgctgaaagctggcaagatctgggctcacagcctccaagcagaaggcagagaccagggcgtcagcaggcaggggagctgggctcccagcacccaggggctggggctggtgcacgtcgatgggcaggacccgtttcaccctggctcgcagctggcgctccttatcctgccagcattccctgtgcaggaggcacaaggcagggctcaaggctgttctacgctcaggcctctgttgccccaaccagccactctatgggaagcctcctccccaaccctcaccccccagtccttaccccttgccctcaatgaggcaggcatgttggctgtacatgctccagttgaaggcccccggctcctcctgcagccagcgccccagctcctggcggttgacctccaggaaatctgtcatggtgatgtcctcaaagtggctgcaggcactgagcagctggtacacggtggggcctgaaccaatgtcgatgagggtgcgtccggacacttcacctgggcagggcagaggaagagggtcctggtgccagccagcccaggcagcccctgcctccttacccttccctcccctgcatctccctgcctctctctagttcttccttctcctctgcaaatgtgtctccatctggaaaaagcattggccccagagttagactgaacccagctccaacatgggctgcccttcggaagggaacttcaccgctctgagactcaggtttcacatct

SEQ ID NO: 31087 - DNA, 1313 bp, Artificial sequence
  DNA replication origin
acatccatttcacctttgggaaggggctctgcaggacaagaaatgtgcttttcctgcccctggagccctctgaacaaacctatgtccctctacccccacccagccagggtccctggggtggacttcctgccaccccaaacccccaaggccacggggggctgcagcctccacaggttccggcctggcctgggaaccagttccggtatagccaagctccctagttactcaattgctaagacaacagcccccaggggccttgcctcctcctccaaccggcaggtgttgacagcaccaccccacccgggcccaggggagccagtgacctcagcctctgggggcgggaatgaggtgggtggggtggaggggctcgagccagcttggggtgtgttccaagcagcaggggagggagatcaagcagatcccactggggcacaggctcccaggaggagggtgaaccaagcccagcttcctcctggctgggcctgcccaacccgccagaccagtggctgctcccgagcctgggaggagtagagggcaggactggaggggctgtggtgggccagggcccaggggaatgtttgaggccttcttcctggaaattagctgcgtggagagagcacaaaagttatctagcgaatgagcctaagagcttgtgggcgttggtgctggcactttcttcagggactgctgtgtccacagcaaaggcccaaactgctgaaagcagggtgggctgaagggaagggctgggaaatcgtgacaaccaaaggaacagcaggccaggccgggaatggcctggaggtggggagggatgcgctagggtgggacaggcctggcggagatgaggaaaggccaggaactgctcagttggctccaatgtaccaggaaaactggccaggcaggggacagagggagggggcaagaagctacactctgtctggcactgtagcaggcaggtcagacagtaagatgcattccaaatgcaggtctggggagctcaggagagaatgggaggagaaggggtacaggcggggcagaactgctgcacagccagtcaggttctcggggtgccaagctctggaaggcgcaaggctgcctagtgcccctgtctggcctgggctctgggctgagccttgctgcttctgctcctcttgacctggtcaaagggccctgcccttctcagcccaagcttcccccgggacaaatcatggctcaagtgaaacttcagttcctttccagcctggcgttaggtggtgtggtctagggcaggctgcttcctcctttgaggatggccactctgtcccttccaccagact

SEQ ID NO: 31088 - DNA, 1731 bp, Artificial sequence
  DNA replication origin
ggagccgcgagcacccaaggtgggtctggtgtggggaggggacggagcagcggcgggaccctgccctgtggatgccccgccgaggtcccgcggccggcggggccagaggggcccggacgagctctcctatcccgaagttgtggacagtcgagacgctcagggcagccgggccctggggccctcgggcgggagggggcagttacacggcagcggctcgagatggcccatccaagagactggcgctttccaggctccgaggggctccgggaacttgtcaaagaagttctctgaaattgttcagaaagttttcccgcaaagggtgtattgcgtagagcgcgcgcgcgcgtttccccccttcttgagccccctcaagctttctcaaagcctttccagttggcagcctccgcctccggactggcctgggctggattccttgggggggtcctctgccctgcccctcctccagcccctccccgctccccttcagacgattttggtttggttgctcctgcttctggcggggtcgggtgtgtgtgtgtgtggtggagtggagggtggcatagcaacctgtcccaaccagagccggggaggaaagggtggcccggagggtggcctcttgctggggtctgggttgggggcgggggagacgtttgctttgaacagattcttggggccagcttagggactgtgctctgtgacttttggagcgcgtggaccatggaggggtgggggtgggtttcttggggtgtaaagtgggagagttcccagagaaggaagctaagaaataaggccagatgggagcctagggagggctgcgttgttctgctgccttttccttggtgctgtgcgtggggaagggtgagtgggggcagtgtgtatcctgacccatctgtccacctgtgtgcattaatcataaaagctaacatatagcctgggccaggtatactctgccaggaactgtttgtggtgttttgcatgcattctcctttaatcctagaacacccctatagtggaagttctgccagcattctggactgagtagcagtccagaggttgagtagcagctagtaagtggtggggtcaagatgggaccccaggcagtgcgacccccaaccatgcattcgaaatcgctatatggatgagtgcacctggagcaatgagggacactgctccctgagtcactgggctgcaggggagacaaaatgaaagtgttctgggagtcgtgggtggtctccataggtcagagggtctggggagggagtgggtgtcatcgtggctgtgtgttgcccgaggggccctctgtgagtgagtgcatggccgtgttatctctgcaggtctacgccagggtgttcctcagttgtgtggtctttgtatttgtgtgtctgggctttgtgttgccaaacagcagtctctctgctgacttggggacacaggctgaactctgtcctctgcaggaactcccttaaggtgctgggccagatctgccataaacagagggaggtagccttctatggccacgccttcttgctgaggaagaaggttcctctcttccagggagtacatccttgccctccctgtttcccagacaagcatcttcacctctcatcttctgatgagaagggtgaggccatactgagctgtcaggctgagctgctgcccttcctcaccttgggctgggagttgatcagggaatggcagttgctgcagagctggatttgagggctgggttct

SEQ ID NO: 31089 - DNA, 1544 bp, Artificial sequence
  DNA replication origin
agcacaccctactgcatctcgccatcctgccaagtccctggcaatccccctcgctgcccccctccacccagctctgagcccgccagcagctcaccggtccaaaacaggtcactgagccattctggggctgacactcagggtggcacggcaaacagtgcctggcattcacatactccctggggagcctgagagaagggacagtggtgagggggtctgagaggagccccatgcacccctccagccaccctctcctccgcccctcatacccctgcagtactcggcattcctccacgcactcctggccccgaaggaactggctgcagttgacacactgggtgggccctggaccccagcagtgccctcgggcgcacagctggtggcaggccaggccctcgcccactgcagtgaggaggaagggaccgcaggggacttttaggggaggccccaggtccaagtgaaccagggaactggctgtgggcatggctgtgggctggaggggtggggacaggtggggccgatgtagggagaggaagagttctgagatttcagaaacagagggggagggaaggatgccaaggcaggtaggacccagctagagaagccatgccaagaggccaagccagccagagctgtgctgagtcaagaagggtgcacagagacgggcagtctgcacaagtccaagaacgctgctgccagggccccctgggcactgctgtgtgctggcagatggggagtgcgcacactgggctccctgtcttaccacactcgtcctctggccggttggcagtgtggagcagagcttggtgcgggttccgaaagagctggtcccagggcaccgtgtgcacgaagcagaggtgggtgttatggtggatgagggccagtccactgcccagttccctcagtgagcgcagccccagccagctgatgcccagcccttgcagggtcagcgagtaggcgccactatgggagaaaggtgggcaccttaccacggaccccttcccggtcagcaaaggctattctcatcttcctccatccccagcacactctgcagactttcatggaaaggttactgctacaggagtactccctcaggcccaaagcttcccacagggactcctccctgggactcctccccatcaggccccctctttctcagtgctcacttgtgcagaattcgtccccggattacttgcaggttctggaagacgctgaggtcaggcaggctgtccggccatgctgagatgtataggtaacctgcaggcagagggtgagattaaaggagtggggacaggacaaggactcccagcccctgcagaacaggatgcagagacagagcccacctgtgatctcttccagagtctcaaacacttggagctgctctggctggagcggggcagtgttggaggctgggtccctggaggggtcaggagaggagtcagcagggccaggaacagggtggacatcactcccagcactggccatgccagccactccccaccatgaatgccttcactcaaaccctttgcccatcgagcccagctgtt

SEQ ID NO: 31090 - DNA, 736 bp, Artificial sequence
  DNA replication origin
gagatcattacttgtcctccaaacatccttcaccaccctagggcttggccccgctcccttctccgctgtaactgccctcccccaaacactgcctccagctcttgcccctcccatcagaactgccgaccacacccctccaggcaccgcccccatcctctggggccgcccaccccaggacctggccctgaccttgtagactgtgccaaaagcgccagatccaagcaccttcaccttcctcagctccgtctctttcaggatccgcatctgcgcctggttgggcatcgctccgctaggtgtcagcggctccaccagctggggtgagggggtggtgggtcagtgccgggggccggtgcagaccccacgcgggctgggaggacttcaccccgcctcacctccgtttcctgcagcagtctccgcatcgtgtacttccggatcttctgctgccgtcgcttgatgaggatcccaaagaccacccccaagaccacgaccagcagaatgccaaccaccgcagagatgatggacgtcagagggctgggggcggaagccagggtcagggattgagggctagtttggggtgggagggacaaagggggcccacgggggacatgaaggtgtttggcattcggaaagggaagtcggaagggtgacccacaggcttggaccctctcctactctaaaacctgccttggctccccgctgcctccacaataaagtccaaactccttgtaggcaatca

SEQ ID NO: 31091 - DNA, 2566 bp, Artificial sequence
  DNA replication origin
tcgagagacaggagccccggaggcctggccgcggcgaccgcacttcccgcgacggccgctgggtgtcactgcagccgcgcggctgaatcggctcggcgcctgcgggagtgggggacggtgggacgccgggactaggccgtcgcgctgcacgccagtctcgcctgcccgcgcctggaggctccgcgacgctgggatgcggcgcccacaccttcctccacccgcctggccaaggaagcacctcccgcctcgcccacagactcgcagcgaggcccggactaagcaacgccccggggcgaccggctcgttgctgcggcgccacgcaagccacgaaaccgatggcgcgtcccctcgtggggccgagttcaaagagccgcgaccccgacgcgcgccccctggcgaagccggcggccttccctccgcagaggcacgaggggccgccacgacggagggtggctcggtggagcctggcgcccgtcggccccggcgcgcgcatgcgacttgggtggtggcggaagggcgggcggcggggcagatcgcctcaggcaccggcccagaacggctgagagacgggtcccccgtgtatcctcccctaccccaacctggcctgacaagtgtgggatccagccttacccagccaccccctggccccaacactaagttcctccagtagatgtgtggggcagggtgcctcagcctgggaggaaggaaccctcccttgggaggccaaagcgggaggatcacttgaggtcaggagtttgagatcagtctggccaacatggcaaaaccccgtctactaaaaatacaaaaattagctgggcgtggtggcgcacgcctgtaatcccaaactactcaagaggctgaggcaggaaaatcgcttgaacccagggggtggaggttgcagtgagctgagatcagccactgcactccagcctgggcaacagagtgagactgtaaaaaaaaaaaaagagagagcgagagagagatccctggaatcttttgggaaattggggtagtgccagtaggaatgccctggaggacaggactcagggcatgggagttgggcaggtgaatgcggatgaccgtgcctgttggtcacagctgtgtgagggtgcgggtggcccgttccatccctgcttacagcttcccctccaactccaaggtcacagggcccagttccactacccagaccctaaggagatccacgtggttgtcctgagggggtggtttctgccttccaatctccctcagtctgccccaaaccaccctaaaataaacctaatccaagtaagaacaaagtgcttacaacaaaaatgcagctccaggcccggcgcggtggctcacacctgtaatcccagcactttgggaggctgaggcgggcggatcacatgaagtcgggagttcgagacgagcttcaccaacgtggataaaccccatctctactaaaaatacaaaattgctgggcgtggtggtgcatgtctgtaatcccagctacttgggaggctgaggcaggagaattgcttgaacccaggaggtggaggttgcggtaaaccgagatcacaccattgcactccagcctgggccacagagcgaaacttgtctcaaaaaaaacacaaaaacaaaaaaagcgaaacaaaaaaaactccagctaaacagcccccccaggtgcccatcaaagaaaaacttgccccttccttggggtagatgcagccgtgtgagagggtgtcagatgacatcataactcaacccacatgggattgaatttcaggcctcatccccatttccccacaccgccccttcttgtatggtgaacttcgagaacgcttgtggagcagcctcagcccgccctccccacaccccaggatcgcccacacccccaggctctggagtccagtctgcaacatccaactcccccaggatctaactccttcttttctctcctcccccaactcaactgagagctcagagtcgtttgtcctaattgccactgcatactccccctcaagtcccaaagctgaggttctgccaacagcacaggacaggaaagcagtctgcagacgccccaccactgtgcgagttggaccaagccctgacctctctgggccctctttctatctgttggaccagatcagtacttcactggttcaagcctttttcctgaatataccataaggctcaagttccagatagaaaggcaatgcatcccccatcaccaccccaacctgcccctcaagcccctgccagaacccttgggctctgggaaggagttagaaaactgcttatgtggatagtttggaagaaagaatccttccaagtggctttgggctcccctgtctgtgtcctgtccttcctctcttcatccctcatcagggtgcctggcactggggcccaaggaaggagccaggcagggtccctgacctgatgttgaacccttgggcctgtccaccacccgtgaacttggatgttgcagaactggccagggctttgtctggatgccccgcccagggaggtgggctcccctggaatcatgcccacccccatcccagagtccagagcgttggcagcagtc

SEQ ID NO: 31092 - DNA, 2199 bp, Artificial sequence
  DNA replication origin
ccgggcctcgctgcgagtctgtgggcgaggcgggaggtgcttccttggccaggcgggtggaggaaggtgtgggcgccgcatcccagcgtcgcggagcctccaggcgcgggcaggcgagactggcgtgcagcgcgacggcctagtcccggcgtcccaccgtcccccactcccgcaggcgccgagccgattcagccgcgcggctgcagtgacacccagcggccgtcgcgggaagtgcggtcgccgcggccaggcctccggggctcctgtctctcgaggttcccaccccggttacgcgcgggcaccccggaggagagcggccgcgcgctgcagatgcccgcgggggcacttcccctgcccctcccccgtttcctccccgcaggcgcccgagcgccgggagatcctgcgcagcggcagtgcccggaagggcggggcggggtgcagcagcggcgctgggctgtgacccgggcagtttcacttctggatcctgctcgggctgtgataggacagcgcgggggcagcgggggaacacgcgggcacgccgagatccggcgctcgggaccccgatgaggggaggcctttcactcctggggtgtcacgcgacccacgctttcctccatgtccactcccaccccccatgggttccactttgctgtcccccgagctgccgctcctccccagcagacaccgtctccgccggggctgccgacccccggagaggccccgagcggcgtgggcggcgggaggagggagctgtgaagccgcaggcagggggttaggctgcgggctgctgagacgccgagctgtttctcagaagtgcagctgcccctcccctcacacccccctcactcccaccgcgcgccgcacccctgccccctctccgccggcctccctttcctctcccaggcaccctagccgggaatctggggtctgggtccacgcagaattaagaggagaacctgagaaagggcgggggccgggggttcagacccagcctcagcgcgcgttattccgagcctcctataattccacaggtgaggggatcctgtcccctacccctggggtccaggattggaatttgatagaacagttaggaaaatgacatcttgagagagtcagggcccggccactattactctagctccagcgtccagtgaggagaggagagagagggaagacctggagcccggctggtgcagtgaggttgaggcctgtcttaggagtaccagctggaaggcccttcagagatccctgactctggggaaaatcaacgcccagaaggggaagtcaagtgtctgggctcatcccgagagggagagggctgggattggaaccaggactccaaatagttgcgggagtctgcgactgtcttttgcttgggacttcagagctttgctggattcactgactcagcctgctttccctcaacacacacaaacacacacacacgagacacgtgcacgcgcgcacacacacagatacacagacacacacagacagacatgcaaggagagagacaggcacacatggagacagacacgcacacgcaaagagacacacagctccccaggagtctagcggggcagctgaggtctgtgagtgagacattctcagtgagacactgagaatgcaattccagtgggggtgggatggggattgggcggtggaaggacaagcccgggggaggaggtggcatcgcccccctagttcccatccaccaccacccccagtgctgtggtttatttgcctaggcagctcttctgggccagggggccagggtactggggtggagaggcgaggtgatgggaaaggctgttctggggcttcctgccccctcactcctggggaaggggggtagctgccatcacccgcaggcctttccactgcagccctttccttgggtatgtgtgttattctgggggaagatctgttatttgcggagaagggaggcagctgcctacttcacaggtcaagacagagttaaaaacaaaaccacagcaaattcaacaccccgtgtccttcagggactttccatgacaccttccttcccccctctcccctaagccagggagcacctccccagagggcctccccaccccaggtgcagtggcttttggcttttatgcaaacaactgtctgatcccggaatgctccacagcccgaactgtggcctgggccgaatgtgcccctccaccatccctt

SEQ ID NO: 31093 - DNA, 740 bp, Artificial sequence
  DNA replication origin
cgatctgaccatcacgtcacggtacaacttccaaccgtgcgtccccgaagaggccgggaacggagcccaggaaaaactacaactcccaggaggcgtcgggagggccggcccggagccagcggaagaaactacaactcccagaaggcgtcgggcgtgccggcgcggggcggtgacgtacggggaccggcgcggagcgctgattcggccggagctgccagcggggaggctgcagccgcgggttgttacagctgctggagcagcagcggcccccgctcccgggaaccgttcccgggccgttgatcttcggccccacacggtgagcccggaaggaaccaagaggccccagggctacgggaggggcgggagagaaggtgggggctgctggggaggcgccccgggctggagagacgggggcagagggagtggggggtggagggagtgcatcagccgagggggtgcatcggctggggaggtggccaaggaataaagtgcgagcgggaggccgggggtggaacgtcgggaggagcgcctcggctaggggtgggaggcggggagcggctcggcttcggggataaacgtttggctgcctccagggctgggtgaacgcgtggagatggctgtggggtcccggaccggaccgggttccgagtgcgaagacccaggctggggaacagagcgggacccctccccccggccccgcacccgaggtctcactcagaaaaccccaacaacagtgagga

SEQ ID NO: 31094 - DNA, 2472 bp, Artificial sequence
  DNA replication origin
cgtgtcccctcctggaggcaacactatatatattgggtgcaggggcgggtgggggtgggaagggacagagaagtcagagacagccagtgcccagtgccccatttcttcttttttttgagacagagtctcgcccttgttgcccagactggagtgcaatggtgcgatcttggctcactgcaatctccgcctcctgggttcaagcaattctcctgcctcagcctcctgagtagctgggactacaggcgcacaccaccacacctagctaattttgtgtttttagtagagatgggagagaatccacggggccctgtccctctgggacacacacacactccccttccagtggaatgaaataggagagatagggagagacagtttcaccatgttggccaggctggtctcaaactcctgttctcatgtgatccacctgcctcagcctcccaaagtgttgggattacaggcgtgagccaccacacctggccacagtgccccatttctgaccttcacagacatcccccatccaagaacaagaagctgaaaatgccctcagaaggtcagagaagcagagggctcttctccccatccccaacccaaaggtggacaaaaccttagaaggtgagagggacacagagacccctttcctaagcaaaggaaagaaatctgtcaagtcagcagctgaagcccagagccccttcgcaagggaaagactttggggtgatggtgggtgggatgcagaggggtcccctggacattggcgggacgtagtgctgactgtgatggcagccacgggtttcttgggccttttcggtgcatcctccccgcaagcctccaccacgctgttccaggtaggctgaggttaggcccactcagggcggcaccttggcgcaggacacctcttccgtttgggctttccgtcctcgtgatttcgctctccatctgacagtcatccatggtgacagggtgtgtccctttcccctaaacaggatcctcaatgcccatcggaaaacgttgtaaggcgttgagcccccaacgccccctcaccacaagaccctgctgtgaccatcttttcctggtgaggagagtctgcacgggggagcagggcgccataccccagaaagaaacctctgtgcctgggagtgagggactcgctgagtaaagtgaggtcgaagagggtggagaggggtagggtcccagtcaccactgtcctgaacccacagttcagtccgggcccaagatggccccacaggagcacagggggtttcgggcgctgcaggtggaggtgaaggaccagctgcggtgcggaaaggcctgacccgggcggcagatcgcctgcggagagaatgaccggctggggtggaggcggggctggggtggtgtgggcgtggctggggaggcgtggctggtgtggtaggcttaagcagtgagggcgggactggggcagaggcggggtttgggcgctgagggcggggctggggctttgaggaggtggctggggctggggcgaggctggtgcggaggcggggttggggcggtgagggcggggctggggcagaggcggggctggcggagtgaaggcggggctggggtggtgagggcggggctggtgcggaggcggtgcgggggaggtgtgggtggggctggggccgagacggagtttgggcagtaagggcggggctggtgcggaggctgggctggtgcggtgagggcggggctgggtggaggcggggctggggtagaggcggggctggggcggggtgggcggaattgcgggctgcggggcagagatggtgatggcgtccggggggcggggctgggtggacggccggactacaagggacgagaggctgggcttaaggtagcagggggcagagcggattgcccaggggcggggcgggatcggggacaaggctcaagtgctgaggaccagacatgcgccggaagcccaagcccggctagcgagtaggagggtggatggtgggggatgataggctaggcttaagatggctgagggcggggatacaaggtggtagggccagagatgggctggatggggcgtgatcggcctcctcctgggagatctcagcccacctgagtaggcttcttccggccgcaagagagactggggcctggccctgatggaatggccattctgagcgtgaagacctgcgtccccctcccttcaggaagctccctgtctctcaaatttcagggggatcatcacttcccatctctctgccaggttgatcgagttctggatctacaggagccagttctgagagggaggactgggggtaggaacggggtctttgaatggctgcgggactgcaggagacttccagcaacctcagctccatgttggaggaacattctgtacctgctgggtgctctgtgtggtgagggtcagggatgagggtgagggccatccctgatgtaccaggcctactaggttaggcccaatggtaccaagcaaga

SEQ ID NO: 31095 - DNA, 797 bp, Artificial sequence
  DNA replication origin
tctgtgggcgtccacgagaggtcccctcaggctccaatctgggttacaaaggactttaagagcgcctcaaccagcgtggagtgggtacagcctatccgagcgcgggacgagatgacgtcacgagttgccgggcgggttttgcgcccaagttcgctcaattttccccggtcgcggcggggtctccttccagatccgctgggcttgtgctcaacggctgccgggcgcatccggcaggagggaaggaaagaaggctgtgaaggagggacgtgaagctagggctgttggccttaaaataaaccgaactggagagtaggaagaaccctatgggatccggacttccttggttagatttgagtttagtgctgaacataaggcatacaatttctgcaggctgggagtgccgataggtaggagcgtgcatttgcgtagaatcactccagtttaacaaaatataggggtccaccctatgtacggcccacggttagcaaataggggggtgaaaaacagctcaagaatgtagtatacgggggagtcagatggttagataagcagacactgtgctctgggctgcggtggattgggagtgttgaggaaagagggtgggagcccctactggcagacgctttagggagcccattgagagggcttttatacatccagacagacattgtgaaatggggaacagaataatggtgtgcctaaggagagaatgatggtttacttagtggtgtacctaaggggaagcaaattggacaagaaaccctacccacttatttttcaaaggactgccccactgg

SEQ ID NO: 31096 - DNA, 785 bp, Artificial sequence
  DNA replication origin
ctgcaggacgctgccacggccaccctgctccaggcagtccacacactcctccatgaaccactgcacgaactgggtgtgggggccagcggtgcgagaccccaggatggaggagatgagcaggaacaggttggctgtagagagtggggggagagtgacaggagggagttccatgagagtgggtgaggtcacactctgggagaaggtgggactgaaaagggaaaagaaacacatgctgagcatgtccccaaaatggggtgtcagagagagaaaatataaaaggcaattggggaggggaggagggggaactagacaggagcctgggggccaggacagccaacaatgaggggcatggagagggaagggaggggcaccgcaaggccccttccagctgacaaggtctcccagcctccatgagaagagagactcgtccagcttagccccaggttcggcagcaggggtggggaactcacccaggactcggttcagagggtcccgcatgttgaccgtgtggagctgagaggctgagagggagctgctcatggatcggtctgctgtgggacggagcagatggagcgctgggaaacagcctgccgagtgcaaaagtggtgctccccggggatgccccaacccgaccttcacccatcggaggtaactggtacatggagagcccagagaagaccctgagatcaagagcacaaagggaggccaggtacagtggctcacacctgtaatcccagcattttgggaggccgaggcaggaggatcgcttgagtccaggagtttga

SEQ ID NO: 31097 - DNA, 1265 bp, Artificial sequence
  DNA replication origin
gtacgctgcagcctcaattccccattacagctgccactgcacaccacaggctcccttcacccatggcatgccctcaacaccaccactgcactctgcacgccataggtttcatcccagctgctcttctcatctccatggttccagggaccccaagagaggtaccctcccctccgccaagcattacgaactccagtaccccctgtgaaagaagtggttccaacagcactgaggatgcaggtggctgagactaagacatgagcaagggcagcccaacttgggtaagctgtggctcagaatcccacactcgccaagtgactctgcccagtataaactgggcgattagccgagcagctccccctaacacacacacacttacacacacacacactcacacacacacccctccccaagagcagactatgtagccagggccccaccctgagagccgtgggaaggctgtggcccccgctggtaaaactgggctaatgacagcaggggaaccggcggggccaggggggtgctggggtaattagggctcggcctggcgctaggagatcctgagatgaaaggtgctctggcgtcactgggttggttttatgtccatgaatgcaggtgtgtggtgtgtgtatgtgtgtgctgggggtggggctggcatggtggagacctctcctttgggttgggttagggggtccatttgtatgcagcccaccgtcttccttagattgactctggtaccatttggatttttgtgggagcaaacatggggggaaataccaccacccgggagctaggaattgagggggtatggcagatcttgtcccctccccgagctcaggagagggagcagattgttgggggaaatggctggtgacagagaatagaaagagcctatatggagaagggtgacgttggaaaagggaggcagtggatcggtattgatgttagaaatgagaggggagggaggtaacagggaatgaacccccacaaggatgaaaaacgtaagatgattgaagttaaaaggacatcaggggtcacctgcccagccctcgcagctgaagcttgaggaagctctgcccccgacagcagtggcgatttgtcaaggtcacacagtgagttaccggcggagaagggacccgaactcccaaacaaactacacctgcaagcgtttggtgtttagactttctccccgatgtataaggtgcaggctgctcgtcgatacttcctcctccaccctcacggtgcacacccgaaaaccccccaattct

SEQ ID NO: 31098 - DNA, 1465 bp, Artificial sequence
  DNA replication origin
ccagcccggtccggcgcgccacgccgaggtaaggaggagggagcgagggggcattaatatgcaaatgccttgcgattgattatgcaaagccgcggggctccgtggccagctcccaggcgggctaggggcgcccagggggtgcctgctgccagcctcagcctttcctggcgccccagtgaccctgtcacgagcccgggagcttgcaactgacgccctggggaagggaggtgttgctaggaggtcgctgggccccggggttcgcaggcggagatggcgtccgagcctccccctggagggcccgcccggcctctgtccggccagtctgctgcgcattcccgggccgggccccgttgccggccgccggagctcccccgcccgccgcgccgcggtttgtttacggtgcgccggaggcctgcccccccagcccccacccctagcctctgaggcccgagtggcctttgcaaagctgcctccagctgcggagggcagtatgagtgcggtggcgcgggtgggcttgcacgggtccggggagagggaagttcccccgcctcacccgcctcccggttgagcatggctgtctggttgcaacactgctaattgcaaaaacgcggttgttgggggggaatgtgtgtgtggaaggggtgtacttggtggtgcctagatgattaggagagttgctggctggggaggagagggagaaatggacctgtgtgtgtgtaccccaccttgtttccctccccttgcaacgtgtctctggtgccccttctccatctggggccctcccttgtccagcgtgaaagaaaggcctggggggatgacaggggcaattgaaagaaccaccgttccaggggtgggggtgggggacacagaaggaaagccagtgaggtgggagcctgcccctcagtgctggctttggctccaggagggggaggggatgaagggggctgttgtccaaaatgaggggggaagcaaaagtgacacgcagacacagagatatgtccacacagacagccacatgcacatccagggacacccaggcagactcaaggacaggagctactggacacacccacatggggacaagggaagagacaggctgctgctgcaccgtggagctctgaggggtgggatatacccatgggagaccaagagcatggggaccgatccatgcacatacccacgcacagggtcacacgtagatgctgtcacacactggggcaaggaggagttgctgtcacccacacataaaaagtcactgtcacatgcatgcatgcacacagagcaattgcacacagcagcacaattacaaaagaccctgtcactcacaggcacacacgtgctcgcatgagcccagtcacacagacatcattgcttgccgtgacagtcgctgtcactcagtcagatgcaaacacagttacacaccaacacatgtatacacaacttagcaacaagtattttcctggac

SEQ ID NO: 31099 - DNA, 1138 bp, Artificial sequence
  DNA replication origin
cataccacatgagcctgtgttagccacggacagaaaaaggtcagcgggtaaggggcatggggcaggggtacccaccctgaagggcagcctctcacccctcctccagagtccagcttaactccccaaactccttcctggtacctcctctgcagaggcgagggaggccctgccccaaggaggccgagggggcggagctatggggttctgtgcccaggctggacagcaggacagcaagacccacctgtcggctggcctggccacccactccctccttgtgagataagagctgctgggaggcagtgtaggcaaagtgcccgtggagggggaagcatttcattaagcttaagtacttctgccatggggggacagggacacggggccaatgcggcatccacgggcgccccgccaggttcccactgccgagccgtcccactctgcagtcctgtatatctgaggacacccccaaaggactcctggggctgccagaggggagtttctgtccccaggatctaacccccaatactacccgcattaaccctcctgcgtatctgctctgggctttggccccacctttctggggcccctgaactttgtccttagtgctctgaagaaagcccagccctccttgccagccacagggacacgtacatgcggggcggctgagaaaagggtggaaagatgggaggaggggtaaaaaggctggtgggggaaagagggaagaagggaggagggggaagaacaaagaaatgggacagggctggggtagagctaggggtgacaaggcagtagagggagaggaagaaaggggagccagagatgggggatggggagaaggggtgaggtagaaaggaggacagataaagggaggagagacacatgaaggaggggagacaaagagagaaaggtaacaaagaaagatgggtggggggcttcgtaccctgtctaagtcccaccccatgcaggctggggggaggggggcgtaggaatggtttccacggtgacagctggttcttggtggcctggcatgtgggctattaatagttctgtgggtaggttcacacctccctctccccttcccctctgcctgctgctagggtggggggagatccctcccccaccacccactcctgatcaccca

SEQ ID NO: 31100 - DNA, 1516 bp, Artificial sequence
  DNA replication origin
ggaggggagacctaggccaaggaactgggtgggggctctctctcatgtgtgtgtagggggtgagttgagggcatcttcccccagcccacattcctccttcccctacggtcaaggtggcttgtcccttctcaatcctcccgcccttcccctaccttctgagaggatggggtcctgggaactgcaggacacagctcccccagcctcccacactgtcctttccatagcaagttcagttgtttgccctgtcccagggctggaggtctgaggagggacctgggcagtgcgggtgtgtgtgtgggagctgaatctatccaaggacgagaggaaggagagaaggggtgtgggggggtctccctcagcccccagctctgccccttctctccaggctcctccccaccagctccgcacaccctctggccgcctgaggctttagacttcctgatcctcaaagacctcgaggaagagtggggggaagagttcggtggggcactcgactttcatgtggaggaagcggctggcgtggcaggccccgatcatgcggaggtcagtcaccttcatcagcagcttgggccagaagtgcggaatgttgtgtttgcggtggttgacgtagtgctcgaacgccagcaggtacgcctcctgactcttctcgatcttgtccacacacagcaggcccgagcggtctgtgagggaagaggggcgtgaggggcgaggggctggccgaaggcctggagatggggagggtgaggtgtggggacgtgggaagaaaggactagaggggagatagaggcagagaggctgggggaggggaggggagaagctccccctgagagacgtggacaggagaagcacagggagagggaggcagctgggaagtggagaggggcaggggggtactggggggagggggcaatgcaaggaggacagagggacaggccgggggctgggggagagagaggagccttggagtggggaggactgaggttggtggtcagagaggcggggtgcagatggggttagggaggggactgaggggtaagagatgggactgggagacagaggagggatgaggggatggaaggtggctgagaacaaagtggggagtggggaacaaaggggaatgtgagtgacagagggacagggcagcgagaaggaaggagacaaagacaggaaaaggcacagagcagggatggggaggcaagggatgggcctggggaacgagtgagaagtgtgtgacagagcaaggaacaggggataggggatggcccaggtgacagagaggtagcccagaagaagattcaggagggagttgagcaacaggcccagggtccagccaatctctgggacccctggaagcttctgagccctcccgactaatcagcaggtacctgttgacattagcagcacagcctgcagcagagccacttccgtgtcatccaggttaaaggcagagagtgacttgcccagttcaaagatggcgtcggagactacgcccaggccgccattcttgagctgctcc

SEQ ID NO: 31101 - DNA, 937 bp, Artificial sequence
  DNA replication origin
gcatagcattgccttcccatgtccgtgtgtgcatgtccgtgtgtgtgtgtgtgtgtgtgtgtgtgtgtgtgtgtgtgtagggggctgtggcaggctgagggtcagggtggggtggcaggttccccactgcttaagacatttttgccccaatagtgcaaagcgcaggaagccctggcacccctccccccaccccctgccccaatccccatggcttccgggggcatctgtgtccacccatccatccctgccgacatgcagccctgagcccagcaccctctggtctgctctgtcccaccccacctcctgctcccatgggaggaccacctcctctctccctctctcccctgaggagtgggcggcagccacagggagggggaggaggacagctcacccaagtgcagaccaacagagcaccctcaccaggagggcgagaggggctcaagccaaagtccctgaattagagaaaagaagaggggaaggggtcccggggcagaggggcagctggccaaaagagctttaaagaaaaaggagcaccgaccacccctcccctggggccccaactaagtgtcacttatctaaacacccccattctggtacctgcccgcccagagttagtgcagtgagtaggagctggggaggagggcagaggttagagagagcccagaagacagatgggaaacagggaaacagagtgctaaaggggtggagggttctgggagacgctcacgcacagccctcctacccccgacccaaccaatgcagcagcatccggtttctagctaatactgcaggatataaggagggtaggagttggagccacagttttttcctgggtgggtgccaaggtgtggaaggaggaggtggatggggagaggcccctagggctgggcacttaaaggggagctgtgtgggcagcagggcaggctggtgaggggcc

SEQ ID NO: 31102 - DNA, 819 bp, Artificial sequence
  DNA replication origin
agcaacccgtcctcccaccgatactgcacctgctgctccaccctgcctgccctagtgccccgggccaatactgggggaggcatgctgagcacccacatcaaggccatccccctcattagcaccaatggcccccaggagagggccctgtcccccacttccacagcagggactgggacagctgccgctctagagcaggtgcgtggcactcctgagtcgccctggctcctcccctaccatgtgtactcactcacacattcacgcagaggaacgcacacatacaccccacatcaccgagggggaagggaggggtccggggaggatgggatcacagctcatatgattggggagggtgggggagtcccaagtgcctataagaggctaaggctcttcaaggccttttctctgccgtgtccatggctgagaatggggatggaggggttggggtggggatggagggatggggaagacagcagacaggtcaggaattccactgggcccccaggcgtggtaggaaggtacaagagggcctacccatgggactggagtaatacaggattcagtactccaggagagagagagaggatagagacaaagacagcgcgggcagcccgaggccccagcagggtgggacaggcacatgcacaggtgacagcgggtgctcctccaggccctccacccctgttggaacacctgaacgattggggaaggacagtgccctgacgggcagcatagcattgccttcccatgtccgtgtgtgcatgtccgtgtgtgtgtgtgtgtgtgtgtgtgtgtgtgtgtgtgtgtagggggctgtggcag

SEQ ID NO: 31103 - DNA, 638 bp, Artificial sequence
  DNA replication origin
ctcgggctgcccgcgctgtctttgtctctatcctctctctctctcctggagtactgaatcctgtattactccagtcccatgggtaggccctcttgtaccttcctaccacgcctgggggcccagtggaattcctgacctgtctgctgtcttccccatccctccatccccaccccaacccctccatccccattctcagccatggacacggcagagaaaaggccttgaagagccttagcctcttataggcacttgggactcccccaccctccccaatcatatgagctgtgatcccatcctccccggacccctcccttccccctcggtgatgtggggtgtatgtgtgcgttcctctgcgtgaatgtgtgagtgagtacacatggtaggggaggagccagggcgactcaggagtgccacgcacctgctctagagcggcagctgtcccagtccctgctgtggaagtgggggacagggccctctcctgggggccattggtgctaatgagggggatggccttgatgtgggtgctcagcatgcctcccccagtattggcccggggcactagggcaggcagggtggagcagcaggtgcagtatcggtgggaggacgggttgctgggaataggacgagggggccaggcc

SEQ ID NO: 31104 - DNA, 1023 bp, Artificial sequence
  DNA replication origin
tcctgggggccattggtgctaatgagggggatggccttgatgtgggtgctcagcatgcctcccccagtattggcccggggcactagggcaggcagggtggagcagcaggtgcagtatcggtgggaggacgggttgctgggaataggacgagggggccaggccaggacaaggggttgccagagccatgaccactaccccgcccccaccacccgcctctccatctcagtattgcccctcccatcactcataacacacatacctcatccagcctcctccctgctcagacttggggagggtgggggaggagcccctaccccttctcctggtggcgggtctgcagggctgggagagggcagggcgttgtgagagagagaccgtccataaggaggacagtaactcctgccctgggaactcctgggcgggggggagggggacactgcccagaggcgctactgaatgtatgagaagctggtgctgggctggggggaggggggttgtggccagaaacagggaaggaggtaggtctcttccccagggaggggtgggaccggcaggggtgacttgaggggctcctactcctgccccacgttgacaatcagtatgtctgttatgtgcgatttttcaccccgttgtgttttgggtcaggattttaaagaaagatatttttatggtaattgttgctcgtctattttactatatatttatgtaataaatatatgatgaaaataacccccttgggcaccccccttagacttgtgtgctgtttccctatatcctcccatctgctggcagagtacccaccccacaaactgaccagatggagaggtggccccccccagccttggcagtatttccaccccaccccccaaacgagcacacaccacagaagccagctcagctgtgaactattggatttgagacaggaacagaacaaatcagagggccaggggagggttgtgggggagacagagtggtttaaataggggaggaggggaagttcggtgatgggggagggaggcaggt

SEQ ID NO: 31105 - DNA, 1255 bp, Artificial sequence
  DNA replication origin
ctcgtctccccaccccgcacccccccttccccgccccggccccccgccccggagctcgcctcaaccgccccgagcctccatttcccccccctcctcctcaggagggggtggagggctgggtccgcccaaagccctcctactccgggagagggggtctgtcgcctctcccgggggtctccgcggctcggggtccccctcccccacagtcacccccggcgcctcagcgtttccctttaaaaaaacggagccgctcgtagccgccaccgccgcagccgccgccaaccggaggacgcatgcgcggggaggggagcgggcgggagtgcaccgggagccgagaggagggaggcgggccgcgctattgtgaaaggggccgccgccgcctcgaggggggcagggaggggaccgcgggggccgggggccggcgaggggaggccggggctgaggggcgaggaccgaggagcgcgcggaggagcggggtgaaggtgggctgccgagggaggggcgagccgggggagggtctggagggggaagaagggcgagggcggccgcgggaagaaggggaaagcggaggctccccgggaaaaaagcgcgagagaatggagttgagaggaaagaaggaggatacaggcggccaatgtgtggcctacgtgggagcgccccgagcgctccacgtccccggcctgcgccgggcggccccttccccgggcatcttggcaacgcgcctggcccaagccggaggggccccgcggccccgcacgcctcctggaccagtcaggatccaggctcctctttgagcccgcgggtgtttcatgggggtagaagtctaacccctccaccccctctcctccccagcagtcccacgcgggtatgggagagaatgaagttctttgtctctaagggattcaaaccagaaacggagggacctctggttcccagagggaggaaaatccatgatgtctgctgcccagggagctattgccaccgcctccttgggatgaagtattgccagctaccaacagttccttcccaacggccatcttccagccttcttaaacgactcctagcatcttcgggaggctcctgaaggactgaagcaaaggaaatctctgaagggatttagtccttgaaagggagtagggatacttagggtgttctgtgttgagcgcttcttcctatctctccagcttcatgtatgtgtgtctttatgtccaagcaattgagccaacaagtcctcagaattccttgtgaaaaaaac

SEQ ID NO: 31106 - DNA, 2098 bp, Artificial sequence
  DNA replication origin
gcaccgtaagctcaaggagccggggcccccgctggcctcctcccagggcgggagccccgcgccttccccggccggctgcggcggcaagggccggggcttgttactcccggccggggcggcccccgggcagcaggaagagagctggggcggttcggtgcccttgccctgtccgcccccggccaccaagcaagccggcattgggggggagcctgccgcagccggagccggctgcagcccccggcccaagtatcaggcggtgctgcccattcagacgggctctctcgtggcggcggccaaagagcctacgccctgggctggggacaagggtggggcggcctcccccgctgccaccgcctcggacccggcgggacccccaccactacctctgcccgggccgccacccctcgcgcccaccgccaccgccgggaccctggcggccagcgagggcagatggaagagtatgaggaagagccctctcgggggtggtggcggctcgggagcctccagtcaggccgcctgcctcaaacagatccttctgctgcaattggacctcatcgaacagcagcagcagcagctgcaggccaaggaaaaggagatcgaggagctgaagtcagagagagacacggtacgggaggggttaatctgcattcgggccgaggagcgagttgtgcgcatgctcgggggaagggggctgtaggaggttaaggcacccccgggttaggggtaaaggaggttggccaccggcaaaggagtatcttaggcgctgggtctctgggagccaggctcacagacacgttgggttggagggaagggttaaagggcaacctctcagggggagggggaggggtttcaggtgccaaagggttaatttaaaatgacagccccagacgtgtgggaaagacgtttagtggaaaaagacgtgatctgtgaggggttaaaaatgaaagggtggggtgtaggtgttgtgtccttatggaagggttaaattaaagagctattgcgttagaaatgcacggtggaggagagggctgtagcaagcagctgttgctttcaccactgctgcagcatctttagataggagggcagtaggccttttagtgggcacaggggtagaggtgatttacgtggaatcctattttagttttcttaaatgatattaagagaatcactgcctttgatttcagacagcttttaataggaacctgagttctaatacatgacccactgaccaggtcccttttataagcatggtgtttgaaactggaagattttagggcatcaggggaaagtaagcttattaaatgtattaaatagacctccccatccttattttagaatcttagggagtaggaaagtcgtttattatttctttacttctgaggagcttggacgacacaggcttgtttttactgcagcagtagttaagggcatctctgcgttaaaacatattccttcagatatgagggaagctggggtggggggtattactgtgctagcataccttacagctgcctaaaaataaacatggtttctacaattgttgtgttcaggctgcagcagtctctctctccctctctccctccctcttcctccctccctgtctctttccctttctctctctctctctctccctccctccccgccgtcctcatctctccctctctcctctttctctctggcgtcgtgtgcgctaagagctgagcaagggagcaagcggctattcattttgtttgctttccaaatgaatctcatcgggtggctgttttattggagaatgcattctgcaaggtggattgggagctggggcaggtctcattaaaatatctcatggtgttgatttgtggaagttactcaacatggaggtggcactgctcagactgtactgcagtctaggggtgtgatggtaccgtaattacaacacatcatatccttgtatggggggagtgggaagagaaggaccagtgaaggagaaaaaaatcaaggaaatgtcacccacaaatggtggttaagggctgtgaatcaaaacatatacaaggagatgaaatgagagtatggctgataggggggttctctgctgattgtggaggtttctgctcag

SEQ ID NO: 31107 - DNA, 1548 bp, Artificial sequence
  DNA replication origin
cagaaatttctccagcggcttcatgcccccccccgcccctctcctaggggtcgccgggggacccaggtatcccaggcgcgggcggggggggcggcgaagacacgatgctcagagctggaggagcagagtagagggccgtgccaggcgccagactgggggccagaggggccgagcctcgctggccagagtccagtggccagtagccgggggaggtgccagaggaaaggagtgctcgctctcagcaaccccccatgccggctgcagccggcacgcggcccgaagagtgggcaggctgcggggccggtgcgcccggctctgcgctgcggcggcagaggcagcgggcggagcgcaaggctgagaggacgcggcggcggcggcggcggcggctgcgctcctggccgtgaagagggggaaggtggcagaaccgagaccgcgccccctcctccagtccccgcccagtccccgcccctacccttcctcggctcgcccccgcgccgcacgaggcttgaactcgcgcgctggggttgaccgcgagggaaacagtaagggacttgggttctaagcagaagaaattaagggcaaaggtaagtcagagatttaccaatggggaaggattcctggctcaagggataaccgggtctcagcatcatttcaaagagtcaggacaggtctgtggcctggacaccttcactcacctacctgtgtacccaagtcaggcctacagattgctgaacccaagagtgtgcacctttctcatactcacagaaatatgtggagtttatcttccttctgtgagaagagctgggaaggcctcttgggtgaattagcattgccactggaggcggtgcccatctgtcctctctggtagggcacaataggtggtgtgggcctggtctgtgggcaggtactggcaggcaggtaggagccaggcagggagcagcaggttgtggcaggtctagctggggtgaggaggggataataggcagtggggaggagaccaggagcacaagggcacctgagcccagctggcagcagaaggaagcagggccatggagacaggtgacaagccccagaactgccgactatcatcaagcacagagcccaagtgtacatggccatggagtgggaaaagtggtgccaattagcactccaagtaatccttactcctgatgcccacaccaggagcattctgtccttaaggatatgctgccccagaaggagtgtgggggaggaggggggtgcatcgtaaagccatgctaagtgtgagaacatccaggttagacttacaaggtgtgggagtggcagcaggttctcgatgggttgaggctctctggacaatgccccacccctgtttaccgagcaccaaccaggcagagacaggaatgctaatggctgggagtggtagtaaaactgaacagggtgtgtatgacatacgtatcaatgtatgtgcatatctgttcccatgtgtgctagagcatgtgttcacagaaataaagctttgcacacccatctgtttgtggatttggaaacagtaaaaagaagacagcg

SEQ ID NO: 31108 - DNA, 1896 bp, Artificial sequence
  DNA replication origin
gcgacccctaggagaggggcgggggggggcatgaagccgctggagaaatttctgaagaagcagacgtcgcagctggcgggccgaacggtggcgggaggtcccggcgggggtctggggagctgcggtgggcctggagggggtgggggacccggcgggggcggcggtccagccgggggacagcggtcgttgcagcggcgtcagagcgtgtctcgcctgctgctccccgctttcctccgggagccccccgccgagccggggctggagccgccccctgaggaggaaggaggagagccggcgggggtcgcggaggagccgggcagcggggggccctgctggctgcagctggaggaggtgccggggcccgggcctctcgggggaggggggcccctgcgctccccttcctcctactcatctgacgagctgtccccaggcgagcccttgacttcgccgccctgggcccctctgggcgcccccgagcggcccgagcatcttctgaaccgggttctggagcggcttgctggaggggctaccagggacagcgccgcctcaggtaaggagccggtgggctcgaacacccagagcaggggctggccccggctcctcttccttgcccttggagcgtaggggtggcgccgtgccggggcttggttatagggttgagtggtccgcggaagccggctaggggcctagcggaggtacagaccctcccgcggaagaggagagcagtactcaccttcctccctacagcagcctcaccctcgtctggagaagcagctgagcctcttactctccttcagccacccttcctttcccctgggcattggagccactgactcccatgggtccctgatgttgaatacctcctcctgtggccccaaattagggcctgacacattaaaatgggagctgcccagcgcagccatgccacccgccagaggtgctttagccctgaaaaccctggggtccctgactgttcagaggcctacacagcgcaggctgacccacccagggaggcagtgccagacaggcacaggccccaagctgccttttaggcatcagcaaagggatgcgttgtccttagcagtttggtgggggggatagtattctccttgggctggactcagaaggtgtctgggaggggagaggtggctgggccggcatcatggccctgcagcatccagggtgtccaagcgcctccagcttccacccttcggtggcaggcctcagcacccggcttttttttttttttcttttggagatgtagtctcactgtcacccaggctggagtgcagtggcgccatctcagctcactgcaacctccaccgcccaggttcaagcgattctcctgcctcagcctcctgagtagctgggactacaggcatgtggcaccacgcctggctaatttttgtatttttagtagagacaggggtttcaccgtgttagccaggatggtctcgaactcctgacctcgtgatccacctgccttggcctcccaaagtgctgggattacaggcgtgagccactggcctggctaatttttgtagttttagtagagacggggtttcggggtttcaccaacttggtcaggctggtcttgaactcctgacctcgttatctacctccccccacccccaccccacggcctcccaaagtgctgggattacaggcgtgagccaccggacctggcacacggcctctttaaaatataatcaccacaccctgagaagcttattccctaaatgatgatactatttcaccactccctttcagcacccctactaaggggcctttgaggaaaccaaggccccaaatctggttagttctgaggtagaagaccgagggttctttaggtctagctctaggcattactctaagcccaggagggtctgaggtttg

SEQ ID NO: 31109 - DNA, 1412 bp, Artificial sequence
  DNA replication origin
gcaggagaatcacttgaaccgcggaggcggaggttgcagtgccgagatcaagacactgtgctccagtctgggcaacaagagcgaaactccgtctcaaaaaaaaaaaaaaagtttgggaggcactggtctaggactcaggttctgatctgagtgctgcccctcactcacctatggattgtattctgatcctttaacctccctgtgtatgtaaggatgccacatttcacaggctaaagacacaggatgagtgggaaggcagaaagccagcaatgtcactgaagctttgttttcctctacagtaggaaaaaatttcagccttcccagtgtcacaaggacaacagagtaagagaaaagctgtgaaagaaagggagtagaaaaaaagttataaatgcaaaagaaataatcatttgacaaattccagataaatatggcataaactagtgataagatgagttccattagtctagaatgtgtcagtgtggggtgaggagtttttggataggacagtgtcagtgtgggatgtgtgagggtgcaggcggcaggggccgaggatgagcagctctttctcctgcagagaaggtccttctccagcccactgaggactgtgttttcaccgcactgggcatcaacagccacctgtttgcctgtactcgggacagctatgaggctctggtaagaacttcccaaggccttgactggaatggagggctgaggagggctgtgagcaatccctcaccctgccaccaggagcccagcccctatgcccctgcctgccaccaggtgcccctccccgaggagatccaggtctcccctggagacacagagatccaccgagtggagcctgaggacgttgccaaccacctaactgccttccactgggagctgttccgatgtgtgcatgaggtggggaccgaggctggtgctatgctggggggctggagggagaaatgtgccattgggagacggtgttcgcagcacaacgtcctggttccaaggctcacttgcagcaagcccttgggcaacgcatggccgtaacctttgttcccccatctgaaaaaaatcgcaaagagagagaccccagagcacagtggctcagggcccaagtgctgtttacacagaacctgacccaggatttctatttttaaaatattcactattaaagaaataaaataaggcagagacaataatgcctagcagatggttgtcttgaggatgtcagccgtgagcgaatgcctggcacctagtaagtgctcagtagctggtgaaatattattaatgctggttgttttctttttccgcatctttgccgcctcctgtcctttctatttttctattttccaccccttccgcccccgccctcctgcctttcgctcctcatcgccttgcactgccatcttcccacccactcccct

SEQ ID NO: 31110 - DNA, 2108 bp, Artificial sequence
  DNA replication origin
tttttttgagacagagtctcactctcgttgcccaggctagagtgcaatggagtgatctcagctcaccgctacctccgcctcctgggttcaagcgattctcctgcctcagcatcccaagtagctgggattacaggcatgtgccaacacacctggctaattttgtatttgtagtagagacggggtttcaccatgttggtcaggttggtctcgaactccccacctcaggtgatctgcccgccttggcctcccaaagtgctgggattacgggcgtgagccaccgtgcccggttatatccgggtaatttttgtagtaacaagatttcaccatgtttcccaggctggtcttgaacttctgggctcaagcgatcccccctgtcagcctcccaaagtgctgggattacaggcatgagccactgcacttgggccatttacctttttcatgaagcctatatcactatttccccaagtctgggtgagatgtccctatattcatcccagcggctgcccttatcacagagtgtgtgatagagcatggggctttacattagctacagtgggcagtgaatgccctctgaggacgaagcatttgcagtaaggcttgaaaaatgaggaagaggcggaggatagccagtacacagtccctgaggtgggaactgctgaatggggtacattgcagtgatagaaatcaggtcctcataatgtagagtgagtgaggaggggacaggcaggggatgaggttgaagagttgggaggctctggtaaggtgtttggacccaccatctccctggctccatcgccccacgtatggccatgcaggatgtagacagctgaaaatctttacctcgtgtccttgatccctatgcctgctgtgttccctgccttctctgattaataataaaattccattcatccttcaaggcccagctccaaaccatttaggaaacctccttccattctttagcaggaattaattgctcccttgtctgacgtcccacagcactaatcacacgctgacttgtatctcagctagctgtttatgccagtctgcccaccaacgtagtgagttccctgagggcagaggctctgtcttagtcacctctgtagccatctcctggtgtttagcaggtactcaatgtgacatttacttgactagtgggtggtgcctagtactactcatggcagaatagaaggaaaacaaaaataataacaacttatgctctatcacgttttcccattcattaactgatttcagctttgcaacaactctatgagacagacgggacaggcactattagacccattttacagatagggtagctaaggcccaatggcacacagcttgtaagtaatggggactaagtcccaatcttgcccccttacttcggattctgtgctgggaatggaattaaaccaagagtattttgaagctataatggaaagcgcttttctgggtggactagggagagatacttagtcagctgtcagggtttaacagcagctccatcaaagagggcacaggatttctctctctggcccaagcagctggaggggtccacagcaccatcctatagccctggaagctggaggaaaccccagcccgagaaagaagagacggtgttcgagtcaggtgggtaagatgacgtaaatgatgacttgtgagcagtggcctgcctctgttgccatgacaaccggagcttgactacttggcctttgcaaggttggccgaggcgggttcttcgttaactcgagattaaggaaggatatttaggggggagggtgtgtgtgtgtgcggcggattaaagacgaaaggagtatattcaacaatgactgtttagctcagtggttctccaccttggcaacacgttagaatcacctgcaacaatttcctgatgcctaggctgcaccccagaattaaattataatttccaggggtgggaaccaggcatcatagtatttaaatcttgccaggtgattccaattgcagctaaagttgcaaacccagcttttagctggtaagcggaattcctgtgaccttcctaagatggcgtccactcaaccgcttccgcctttacgtgggccggcagggggcgggcttcccaggggcgcatg

SEQ ID NO: 31111 - DNA, 1068 bp, Artificial sequence
  DNA replication origin
ttttagctggtaagcggaattcctgtgaccttcctaagatggcgtccactcaaccgcttccgcctttacgtgggccggcagggggcgggcttcccaggggcgcatgcgtctcgcatctctccgctccctgctctctcctcctttttcccccgcctccattttgttcgcggacgctggggacggtgggagcagatccatttccgggttggcaaaaggggcggtggcggcggcggcggcggcggcggcggcggcgacggcgagaaagagcttgccggggggcgagcaggacaggacgaagccggagtgtaggcggcagaggattcgctcccagagcagctgcggccaggtcggaaagaggccggggcggctgggtcagtcgctgaaatgacctgcggacctgagtgggagggaaagtcgcggggaggggggctcggggcggggcttgagaagagaggggggcattagaggaggggccggagggggagaggggtcttgcgggtggggcctgaggggcggggggccgggggactgtatcggaagaacctggaggagagagggcgtggggaatctggggaggagtggtcgaatattggtatggggcgagcggggactggaaaaatggggaggaacgtttttgagagacaggcaataagggctcctgaagggttgggtgagttaaggcggcaactctgtgaggaacgaggtaatcgtgcgcaaaaagggagacgggaacggaggacctgttgggaacggctaattagcaggatgctgtgggtgaggagtccagtgtgacattttggggattgagttaggtgaaagctagtgtttgggaagatggctcgggaaactgcttacactagagggaatcttgagagcgttctttgaaaaggaatcagaatttagttaaaggttggattgagaatgttaagatgcgcattggaacgtctggagttgagggttcatgttgaagtggtgtgaagtgagggaagatggaatttttttttttttgttttaaaggtggggtctggctatgttgctcagactagtcttgaactcctgggctcaagc

SEQ ID NO: 31112 - DNA, 637 bp, Artificial sequence
  DNA replication origin
actctccttgggccccaccaactcttctgggacttgcggagttgctcagtccccttctggctcaacatacacatatttagtggttgtagccagagcactgagcacaggaattattctttctgttggtctctgtctcattctctctcatatactaggctggtcttaacatgacaaatactcttgaacatttattttctagcttgggtggacgggcttaaagggcagtaggctgccagccagaggtagggagggaggcaggtgggtgagggatatggcgggtggaggggtggggtgggggtggggacgagctggggaagggattgggtgacagcccaccccatcagctctggtaactcaatccctgcaccccaccctcccaatttccctcctgctcaacaacttcagcagctgctggcagaagcaaggctggcagaagtgtgtttgagtgcatgtgtatatgaggggagagggtgagaggggctgtgggggcagggagtgctgccaggacatgttaaaggagactcacagcctgggtacaacttgggtggcaggaggaggtggggcaggtgggagagtgggtggtgagtgatgggcaggctgcagtgggggcagggcagcacaggggtctcacaaaact

SEQ ID NO: 31113 - DNA, 928 bp, Artificial sequence
  DNA replication origin
agagtctgtgcccttttgggcccaccctggtcatccctacccttgcccatccctgttctctggtctttctggcccttggcctatttctgtgacctttagccctcctgcggctcaaggccctccccagggagctgagtaaatttgcactgaaatttgcaggcagagctgggttaggctttttggaggctctgataggggtctggggaggccttccagccttgccctgtagtgtgtgtgggtggtgggctgggggtgaggtgggggtagtggggattgaagtttgattcaatttcaaactccactggggcagagttgaggtggctgtggttttctcttctctgggagcaagggtgggttccagagggtccaggctggactgactaaactggcctcccgacccccaaaggctgggtcaggatgcctgagatctggagtgatggctttctgggcctcagcgtgggttacagaggcctcactttgggttagctgccccttgggcctcaccttgagagaggcaggcctctgtggatgtgaattcacctgagtgtttgtggacctggtgcatgggctgggcccacagggaggacctcagagcatcttctggcagaagcagcaggtacaagggccaccctggctgtgtgaggttcggagaatgtacagtttgggagactgtggggctgtggttgtgtctttggggagctgtgtactggggcccatgcatgcagtttctgagctgtgttcattgtgtggtggagcccaggtgtggagagatggtatctccaggttccttctcctcacatgcatgcctgcacacacacaggctggggctgcaggcgtgctcttgcccacccagatgttttctgtagacctgcatgcatgagtttgtatgtgtatttgtgtgtgagggtccaactgtaggaactgatga

SEQ ID NO: 31114 - DNA, 780 bp, Artificial sequence
  DNA replication origin
agccttccctgcttgcctggccttagggctggtgctgagggtgaggcagttcccaggagaggtggcaatccatggtcctccattcctgcaggagcagtggtatgccccagtctgcccataccctttttgtaggaattcttgctgatgaggcttcctactcccattccccatccaacaaaggtgttgggtccctcctccccctcatccctttccccaggtggggaggaggcagcacattaggtggcctgggtgcgcccttcagagacctagtagcctatgggaccaacagaaaccctctccaggtcactgtggggagggctgtgtatttgttctgctacagccagggtgggagccctagagatggtccggcgattctccccgccccctaaactggcccctggggcttggtctctgaagactggtgtttactgtggaggtctcagattctgtgtgcactacgggtcagggctgtgtgtgttttgggggtggggtcacggttgggtgtgtgttgggaaggggattaatgacttgtgtgtattgggtgagagggttagagagctgagtgtgttttgggggaattaaatccagagctaaggagggagagtcagcctgtctgtgtgttggtgttggggctgggagggggagtgacttagggcacagagtgtttaaagaggagtggtctttcgtttgggttcttaacctttcttggctggaggggagaactgatctgcctttttttgttcaccctgggaattccatgggcaaaggggtctgactggg

SEQ ID NO: 31115 - DNA, 1397 bp, Artificial sequence
  DNA replication origin
atgcggctgaactctcgctgaactcgcctggcggcgcctcacctccgagtgacccacccaccgctgcccgtgacatcacccgctcgccagcccgcccgcggggctcgcccgccagccccctgcccggccgaaccgggccacctcccccggagacgcggagagcggcggcaggaggcgtagggccgggtcgcgcggggccaagtgtttggcacccgggtgtgacattgtgcagctcggacgctgtgtcggaatgagacaccggcttgtgtcattgtctgtgacatcatgtgtgactccggccgccggaacccgacgcggcagcgcgggtgctgttggcacaaacacaggcagagggggccctcctccccacgctctgcgtgcttccggcgagcaaagccccgcccaaggtgtctcctagctggggaaccagtaccggcccctggtgcactgtccagctctggagagataaaaggaagagctggtgccttccagtggactacttcatcctagaagccctcgggatgcacgtttcactggaagaaaggcctagcttgggtaggtccctagaaagaggggatacccctggaggagggggtatcctattacccccactctctaaaaggaaggatggaaatgtacatgctacccaaggacattcttctagaagaagcctggctctttatatatgttgtcattttatcctcacagcaactccaagagatgttttacaaataaaacaggtctcagcaaggctatgtgggttgtccaagatcacattactaataataaagagtagagcaggtatttgaacttcctgctgccaaagcccatgttcttaccaagctaggccaattcaaggtatttttctgagcaccttctatgtggacaccctggggaacctgcccttgtagaccttagggagcaacagccattaagcaaataatcactgtatgcacacacaattgcaaactgagataaatgctattatgctctgaagaattaacataggtacctaatttaggtttaactaaattagggaagaactcaaataaaacagacctaccataagagaaagtttgtaagttaatcaggcaaagagtagaaaggagtgtagttccagttaaagggcgagtctgtgcaaaggccctggggttacagcagttgatgagttcattgaaggaactggcagaaggctagaatcatggggcacaaaattcaaaaggaaaaggtacacaagaccaggctagagaggtgggctcaggccagaccaggggggcttataggcctcagtaaggcttttggattttatcctaaatgcaaggaaaagccatagaaaggttccaagcaaaggaaagatcagatttacagtgtaaaaagatctttccagtagttgtgtg

SEQ ID NO: 31116 - DNA, 964 bp, Artificial sequence
  DNA replication origin
tgaagtccccgcgtctaagtccgccggccgctccgccagtcccggtgaaaagcagggaagttgtgtgtgctgggagggggggtccgtcggctctcccagggaagcctggcggggcccgggaactcagcggcttcacctcgaggggactcccgtctagagtctcgtggcgtccgaggcagagtacagcggctccccaagtccgcaggccgggggcgggatcagcgcggggctgggggtcaacgagcacttcctcctcccagccggggatccggggcttctccagggattctccgtggcgaggattccgggtgggggtggggatcccgcgcggttccgcccccgccaggccaggggcagctggcgactcgctcggtctctggtggtacgcgccacggcccccccaccccagctctgcgcgccccctcccctccgggcaccaccccctttccaccgccccgccccgtccaggcaccgcccctggcttaacccattcccggcgcgtccggctgcagcgggagaaacgcagggaaccgagagggagaggcggcatgtggacaggcaagtgggggcagcctgggaagggggaggagaggagagaagcaggaagggggaaaggctccagatgaggagtacacagagtacagagggacgccgagtacagggagaggagggggctgcgaggggacaaggacggaagaggggcgggcgtcctcccttgtaccagttccggctcccaggctcccccaaggtttggtcagtccctggccgagcgaagccgtggtggaggaggtggtggggcggggaagaggggggtggtcccggtgtcctccccttaacacacacccccacccaggccgggcctcatttgcctaatgcaatgcggctgaactctcgctgaactcgcctggcggcgcctcacctccgagtgacccacccaccgctgcccgtgacatcacccgctcgc

SEQ ID NO: 31117 - DNA, 1224 bp, Artificial sequence
  DNA replication origin
gggacgtctcctctcccccagctgctctgctcggatggcgccgccggctgagtgacgggggcggcgcgcaggacttcccagctcggacctcttgccttcgaggggaaagatgtacgagagtgtagaagtggggggtcccacccctaatcccttcctagtggtggatttttataaccagaaccgggcctgtttgctcccagagaaggggctccccgccccgggtccgtactccaccccgctccggactccgctttggaatggctcaaaccactgtacgtaccggcctctcagtctgctgttgtagggggtgggagtgggcggtagggcttccactactactcgggggtgagagtcccggggtgtagtggaggtcctgtctctacctttcacttaacccgtgttgcccttgctggacaattgaaccctcccggccgcaccctccccccagtaaccctaagtgcaatttgtgttagattagggctgaggaactttgagagttccttctttcaagcaacattccttcatctcttgtttcacttcttccaggagaaatgaagcccaagccccttgcccccagtttatatcttcttgcctggaatccaacagcttcacagcaggctggagggtggggtaaaggtcctgtctgtgtgggtttgtctgctcccgggggaaggcccccccgccagatcccacttgccaaagcccgagggagagccccttcctgtgcgacagctgctgcccccagcccttgctcttgcgtcattagagtgggtgtcaggggagcactcagtgtctttggtattgacagtggggtgtggcagaaaggggcaacttcatcagacacccgtctgccatcctaaccttccatcttggcaaggggcactgggtccttatggggttgttgtcctggccccagacacttggctgtcatctttgaggctttcatccccaggagtggaggggagaagctgctctggtgagaagaatccctctccccctaatcctaatccggtttgttctctggggaatgagtttgtttttgtgggtctggggctgctctggaaatgaggactgcatcccttcccagctccgccaccgagtccttttgttaccctgacttcacttggggatagggccaggtcctgggctgtgccttcctaagaggggcactgatgagaatcctagcatcctggcagcctggtcactttctctccttgttgcccc

SEQ ID NO: 31118 - DNA, 1284 bp, Artificial sequence
  DNA replication origin
tggacctgctgcctccctcctgcctgccagggaggaggggtggagtgggtctcgggggggccctggcagattggagaaggttgaagggcaaaggacttaccccacccctcttgctgggagaagagagacctgagatggacagacagcccacctctgccctcccagagccacttctatcccagcttttcctattgtcctgcccccgaccatttcctctagggccgaatctgctgtgtggctgtagacacaagagggaaggtatcacccttgactttggaagaagagagagtgagaggatgactctaggaccctttttctcattctcccagtgctggagcaagacccccctcccctagggggatagttggagcagggctgccagagtcaccccttccactgccttggccaccttctccagagggctggagagaagctgggatctgagaccttggtctccagcccctgtctcttcttagcccatggggacagctcagctcttcctggcccagaactggagagggaggaggatcacagagagtaggacaggcagtgtattggtgagcccttcccctaaaccactggacatggggaagtggagacctgtccccacatccattctggggtggggtagtagacctagaggcctgggtttccagttcccgtagtctgagcgtgggtgtgcatatataagtgagtgaggtgtcagtggactcgggtcctgaggctgtgaggttgggagtgatgggggtctgggggcttgccttgaggcacaggaaggacccggagtctgagggtggcaactagactcagtctagaatatgtggggccaatgccaccaccttggaagggtccccttgggtgtgtggaagtccgctggtgactggagctgcctccagccccctcttggggaattctccactctcccctttactgccactgaaggtgggaagagcaggttggctctgggaggaggtggcctgggttctgcagggccctagggacattgcctccctccccagagccctcatttcggtgcattagaggacaaggggggtgcacaggatgtggctccccatctgtctcccaccaatctccgccactcacacctccgcccgctcccagacgtccaagaatgtgaagcacgtggatgcccgtagttgggggagggggagacgcttatcaggcggccgctgggctaggggccttcttccgctgccgcggtacacccagagctacccccgcctctccccgggaggaggaaggacggtacagagggccctacgc

SEQ ID NO: 31119 - DNA, 1138 bp, Artificial sequence
  DNA replication origin
gtgctaccaccctccccccttacctgcagacacagtgggggctgctaggcggctgatgacagggaactaggccaacaaccttggcagggctttcctggctcttagtagtgcctgggcaccacttcccaggccagcctggctgaccagcactgctatggccccccatccccttccctgccccaagaccagcctgcagcaatgggacagttgatgcccacaccatccccagcccagcagattctctcctgacctccccaccgccgtctgctcttcactccaacaccaactgccctggcctggttttctcccacctcattctccccaggccagacaagcaaatcagacaggctgagaggcctgagaacagctgctgggggggcggggttggggggcctgggtgaggccaggaggcagagggggtgagccacaaagcagccctttgttgtgctaactttttccaagacgtaaaagcagtaacaatagacaatccagactggtggggggaggggagatcaagggcaagggggtatgtggagggttggggggaccatggcctagaatcttggtcagcattccgacaagcagaggaagaaggcactgacctccccacccctcctaatccaccgtttgccctgggccccgcctctcccaaggccccacttctaaaatgaaccagactggagagggagaaaggactgagggagctttgggggtacagagcgggatgtcacgaggggagctagggtatggggagtcatgggggataccaggatgagaggtaaacagctctaaggcctgggacagactagagggcaaaaagccataaaaacatggagctaaagcaaagtccaacagagggtgtttacggaactgagagaatgtgctttttaaaattattttttggcagaatgggagagatgaccagaggcaaggactacagtttaggctgggcaaggcctccttttagcccacccaacggcagcttgactgccttggaggctgtaacatagcctgccccctacctccagcacatccccacctgtcacccaggtaacccagctctgaggtttccctgctctgccctttgaacccagagctcgatgccccacctccccaggcctccagccagcagtccaag

SEQ ID NO: 31120 - DNA, 881 bp, Artificial sequence
  DNA replication origin
ccacatttcaagtactcagtagacgcatgtggctggtggctgaggtatggatggtgcagacgtagaacctttccatcattgtagaaaattctatcagacagcattgctccggccacctgccaggtggtcctccgggagtgctggtgcggagtgctggtgccgagtgctcagagtgggttcgggttcagtccctgaacccaagcatcctctgcacccagatcctgcggatctgcacgcggtacacgcccgagcaggacaccatgaccttctcggacgggctgaccctgaaccggacccagatgcacaacgctggcttcggccccctcaccgacctggtctttgccttcgccaaccagctgctgcccctggagatggatgatgcggagacggggctgctcagcgccatctgcctcatctgcggaggtgggcagggggcctgggtctgggggctgggctgggacgggggtgcagccctggagtctcttccagggagctctttcaggccacctctgttaggtatctctagagggcagggtctggtctgcaactacacagcaagggggccatgtggggcctggactcctgttcccgatttctgggcaacaccccttctagggaggttaagagtgagggtttgagggtcggaccaaccagggtcacctcctggccgatgcatgaccctgagcaggttgctgaacttctctgggcctccgtttctgtacagtgggggcggtaacggtctctagctcatgaagttgatgggaggattacggtggtaacagatactgtgcaggtgcccagagcgagctccagtgcttgttagttgctattttattgttgtgatttctgccatttcatctggtttccagaataacaggggg

SEQ ID NO: 31121 - DNA, 1064 bp, Artificial sequence
  DNA replication origin
ggtggtaacagatactgtgcaggtgcccagagcgagctccagtgcttgttagttgctattttattgttgtgatttctgccatttcatctggtttccagaataacaggggggagtgggagcctgcctgggaaccctctccctgcttgaggatggcactgcccatttggggtcccatcccactaactgggctcagggagggtttggggcaccccctcaccctcagctcccgttgctcccttttaagggcctctgtaccctgcggcagcagagaccccatgccctgccctgtgtggggaggcgcctgcgagctgccctcctccatggcctgggcaggcacgccccccggtggccgaggctgggggtgcagctgtgttcccagctgctcagggggtggttctgcttcctcagaccgccaggacctggagcagccggaccgggtggacatgctgcaggagccgctgctggaggcgctaaaggtctacgtgcggaagcggaggcccagccgcccccacatgttccccaagatgctaatgaagattactgacctgcgaagcatcagcgccaagggtgaggctcacagacctggaggggtaccggcccccgacacctggcccaggcccccacatccaagccagcaccccatgtctttgtgccaggacaatacgacacctgtccccatctgtgtctaggctgaggtcccctagtgactccactttgccgaggtggcccgcctgtgtcacctttgtgtggtagttcagatcgtggctctggaaccagacacgtgggtgtgtgtccttgtgtgggtcactcaacagctcctagctacagtttcccttccgagggcggggataacattcgtgtttacagaggggtcgggatgatccctagcacacagcacaggggaaggaagggcttggcgtctagcccaggccggcagtctggccctggagccggagttcgggaccactttgccccattgccaccagcctctggacctgggggcttaagagagctggctcgtgtcaaagaactgaatcccaagaaagatgctaatatcagcagta

SEQ ID NO: 31122 - DNA, 2337 bp, Artificial sequence
  DNA replication origin
aagccttcctggaagaggtggcctctctcagctaaatctctttttaatttagttttatttattttgagacggagtctcccgctgtagccgaggctcattgctaaatctctagaggaaagaattggctaggtgggtgcagatttggaagacttagtatgaaaaaaagaatgtaaactatctccttaatactttttaatatcaatgaggcattaagatgaaaatactttgggtgtgctaggttaaataaaatacgtgactaaaattaatttcatttgtttccttttacttttttaatgtggctaatgaaaaacttgaaactacatacatggctcatatgctatttccatcggatgatgctgatcttgaacatcttctgacacacagtaggtaccctacaaatatttgttgaatgaatacatctggaaaacagcggcacagccccatctgggtttgtgtggaggggtctgggttgtggacacagaactgtcatcagagagatggtgcccaccatagcatggatagtgttcgggcatggcagtggtgtaggcctggggacaccttcagtttctcatccaacacatatttactgagcacatactacgtgccatggaaggggagagagcaatgccatcctgcaggagaagtgctttccctacggaagcgaggggcatccagctctgtcttggggtgggggctaccaggggagccctctccttgaaggtgtctgttttcttcccaagtgacaacaataggtgggtgggcattagctaggggaggagaaggctgcaggaagcagcggctactctgggcaaaggaacagcacgttcaaacgcttggcagcaagcaggtctggtgcttgttagaagagaaaattccctatggttctgagcacacctggaagccggtgctgtggagtcgaaggcctgacaggggcagggcttcagaaggaagctttgtgaaggcgcttgactcaccctgagggcaggggtgctgccctcagtcccgggtttaagtggggggcgctattcagaaacacctcccactgctgtgtggggcacaggagagctgagaaagacgccaggaactcagaaggacagggtggggtgatggcggggaacgcacagcctggtaggcaggatgcggtgaggcccgcaaggtgcagtccgatgacggcccctggatttctcgcttaggtcctgggtgatcttatggagagcagcccactggctggtgaagggggagggcagacgggaggggagacacaggagggggatgcgctgcataggcagcagctcttcgaatgcccgcaagtaggaagaagggggtggttggaagggaaggcagggccgggagcgcgtgtgttttgggagctttctcctgaggacagaagggactttcccgtttatagcctgggggagcagtagcggcggggaggatgaagatggaggagggaggcataacacacgtctgggttgccctctggcccgccgcccacccccaccccacctccatgaaagcgcccagcccccgcctcgccacaaggggtactgtgaggatgttgctcataggctcccgaggattgaggcctgcccggggaaagggagcctctcctcctcttccctccctgggcggggtctcttgggagggggggacagacctcctgtgatgccctggcaggtgggctgggttagggtggtagggagggagccattgtggctgcagctggcatcggatcctggccacccccgcagtgcatatcagagatcacacacacacgcgtgcacacacagaggtcacgccggatgtacacatgcacacatagcgcacaaggatgtttctgtgtacaggtgtgcacacgcagcccacacagaatggacatgtgcgtgtgtgcacaatgcactcacacaaagctcacagggatgtgagtacacagctctcaaggggcatatgtttctgtgtgcatgtgcacacagctcacccgggagggttacgtgtgtctgtgtgcacaagtgggcctcacgcagggtgtacacatgcgcgcacatgcacagcgctcacacagggtgtacaggtgcgcgtgcacacagctcacagtgcttatgtgtccgtgtatgcacactcgcagagagcccacagggggaccactctctctctgaacacagagagtgcctgagaatgctggcatcacagttgtttttgtccccagtaaaacaaccactctccaccttccgctctgttctccccctcgggtccactctctctcagggtcctggtctccttcctttccacctgggtggtggcatccaggacctgcctgagttcattctccgcccccag

SEQ ID NO: 31123 - DNA, 1701 bp, Artificial sequence
  DNA replication origin
atcgacctgggctatgtagagagaccccgttccaaaaaagatgtaaagctggaaggaaacttgggggtcagctggactggccgcctttgttgacaaggcaggaaagcctggctcagtaccgccgaatgatttgtccaaggtgagcggtggcagagctggaaccagaagctgttagatgtttgctgccccttaaactccagcaccaaacctccctctgtccccgaagaccatcttcacagggcatggttagtgcgtagtggatctaggctccagactgagggtctgtctgggaagggcttctaggaatcccccagcttcctcgataaaggatgtggctctggttacccccctcccccatttccagatggaaatttagctaaagagtgagggccacagagcccagcaaggggcgtggtccgtgcctgttcccaagggcggagccagccagcagggtcaccctgttcctttaagagaagggggagcgctagcccctctcagccatcctgtcctgtcctccatcctggccaaatccgaaagggaaaatgaaagagggagcaggaggcgccggtcccagccacctcccaaggtccctggctcagctctgacaccccagtcccggccccagggtgagtggggttgggtggcggtttaggggcaccaggggcgtgtggggacctgtgtaagtgtggggtggggaggatctcaggagatgtggaggctggaggcacaggaggccagggaggagggagaagcctggcgtcgcactcccaccacgctggggtaggagggcagggacacctccgacaaaggaccctgtgagagttatgaaagcggagttgcctctgtaccagccccccaccctgagaggagttcactgcagtaaaaatggtgagagaaatggtgggccaagaaaggagtggtctcgctgcctctgccactcccactcctcccatgggcaccaaattgggtctagcgtctcgggttcgaggctccactcttcccacagcatccttgacagctaagggcaccgctgggtttccgcttccgaaaccaggcaagtcaggggctggtccagctgatctccaaggtccttcctaagaatctgggatctggaggatcccagggtcgaacggagacggctcagggggtgcggctaaaatgcaaatgggggatcctccccagcacccatcggtcccaaagagaaggtaacccatagctgagcgtcgcctgctcccctcgggccctcccgtggccctccgtttcatactggtctcatcgctaaacccgggcctctcctacctcacgactcaccctgaagtcagagaaggtccaacggaccccaccccgataggcttggaaggggcaggggtccctgacttgccccatcccctgactccccgccccgcgtccccagcgccatgggggagtgggcgttcctgggctcgctgctggacgccgtgcagctgcagtcgccgctcgtgggccgcctctggctggtggtcatgctgatcttccgcatcctggtgctggccacggtgggcggcgccgtgttcgaggacgagcaagaggagttcgtgtgcaacacgctgcagccgggctgtcgccagacctgctacgaccgcgccttcccggtctcccactaccgcttctggctcttccacatcctgctgctctcggcgcccccggtgctgttcgtcgtct

SEQ ID NO: 31124 - DNA, 1526 bp, Artificial sequence
  DNA replication origin
gcccggcggccagcagcagggcggccacgaggcagaggggcagcatgaccgcccgaggactgggcgcgggcgcggggcgctgggcgcaggcggggagcgcgggcgcgcgggcgagcggcggagggcacacggcggcagcgcctggcgctcctggaggacccgacccggagggcgcggggagacggggcggcccggcgggcgaacggggacgtagcgggggaagttagcaggcgtgccggaggggagcaagcctggccgccgaggcgctgcgccgcatcctcggcccggcccaggcaggcggcgggcggcgaggggcagggggctgagcggctgcccgggaccggctcccccggactttataccggtccctggccacacccccagcgccttcccagaggtgggggagccggggcgggcgagggggagagggagaggcggccgttagggggagggggcgctgtcctgagtcgccgccgccgccgccgccgcatctgaaagtccttttctgccgaagaaggaagcggcgcagtttggaagctgtagcaggcgcccagagtgcctctgaaccggagccccggaggggaggcaagggagaagggaagccaaggggctgctgcggggccccctttcccgacctcggaggagtctcgtcccgccccgccaaggcggcctcagtctcccaccgagaaagggacttcctagcccggactcccggctctgcggatccggtcttcctggacagagccctttccaccgcaccccggtgcttccagcctcaaccgctggagaccaagcctcctgaggtggggtaaagcgtacaggcacagctaggggcacagaaaggcctggaggccctaagacgttaacaggctcttgccacttgccccttgcaacctctcccgcccccgcaatctccccagggcgcatttgggccctggtccaccctgcttccccaagatggaatcagcagaactcccggggagggaggtgccgccgagcctcttcctccttcttggatgtttgcctctcaggcccattcagacccactcgtggagggaggcaggcctgggagattgccacttgcaatgtgcaagttttgcgttgaacaactccagtggggcaccattccttgtaatcattgtgtatttgtagagctgttgtgatcatttcccagatggcagtgaaggatttgaggggcctgcagcagtgactcacacctgtaatgtcagcacttttggaggctgaggcgggaggatcacttgagcccaggagttcaagaccagtctgggcaacgtagtgagaccttgtctctacaaaaaaattttaaaattagccaggtgtggtggcgttcacctgtggtcccaggtactcgggagcctgaggcaagaggatcacttgagcccaggagttggaggctgcagtgagctagaattgtaccactgcacaccagcctaggtgaaagaaggaaactctgtctaaaaaagaaagaaagaaagaaggccgggcgcggtggctcacgcctgtaa

SEQ ID NO: 31125 - DNA, 1458 bp, Artificial sequence
  DNA replication origin
ccgccgcctgcctgggccgggccgaggatgcggcgcagcgcctcggcggccaggcttgctcccctccggcacgcctgctaacttcccccgctacgtccccgttcgcccgccgggccgccccgtctccccgcgccctccgggtcgggtcctccaggagcgccaggcgctgccgccgtgtgccctccgccgctcgcccgcgcgcccgcgctccccgcctgcgcccagcgccccgcgcccgcgcccagtcctcgggcggtcatgctgcccctctgcctcgtggccgccctgctgctggccgccgggcccgggccgagcctgggcgacgaagccatccactgcccgccctgctccgaggagaagctggcgcgctgccgcccccccgtgggctgcgaggagctggtgcgagagccgggctgcggctgttgcgccacttgcgccctgggcttggggatgccctgcggggtgtacaccccccgttgcggctcgggcctgcgctgctacccgccccgaggggtggagaagcccctgcacacactgatgcacgggcaaggcgtgtgcatggagctggcggagatcgaggccatccaggaaagcctgcagccctctggtaaggtacccctggcctcccaattccctcctgagtgcgctcccttcccagcggcttcttccccattccagccgccctggaaggcccttaaaaatcccctatgagttgaagagaaggcaggtacgtggcagggcccgactggcatgggacaggctcatcaaggaaactgctaccgagtccctagcagcctgttgccaccaccaagggagactgtcccatcgctccatctcaaacctccaagggttgtctgtttgataagggggtcccagtgggaggcctggctgctggtgcaggagtggcagattaaggtccagttaagtcagctgtctagggccagagaactggaggatggtggtggggtgtgtgttggggaggatgagggagtggggaaagctttctgttcctgatccaggccgagggtgaaatcccagtggtctggggagccagggcctgaactttttttttacatggtccagtggtggagtgggacatacaaattagagggactttggcgttgaggggcattagacttgcccttccccaaagcccagagccaggtcaccttgttgtttgagaggcagtgggaagacaggggtccctctgccaggcctggacacctctgcctgccctggtatacaggccccctgttcttttctccaggcaggtaggatttgaggtggtagaaaagtcttggctcctagccgagagctgcaggagcctcatgtgtgtgggatagggaatagagaaggggccagggcgccaggggagagaaacagagagagagagagagagagagagaaacacacacacacacacacacacacacacacacacacacacacagagacaga

SEQ ID NO: 31126 - DNA, 926 bp, Artificial sequence
  DNA replication origin
tcctacccaaccagaggatgaggtattcctacccagccctttgagggctcttctgtcttgcattcaaagtgctgagagaggaggaggctaccagccatccttatctggtgccagataccctctggctggtggaggatggagattcaaagggaacgtgactctgttgtaccccgcgaacccaagggctcggcccttgctccctcccagtctcagtacccctcctctaccattgccactggcatctctgccccaagattagcgactttctcccccaggaccccccttcccagatatgctgggtgccaggctggcatttctcctagaatgttttctgctgacccatctctccctacccaggggcaggaagggcagagaggcccgaggcccagacccctggagtccacctccttcctgttttccctgcatcctgctctcctcggctgacaagctgcagaggattgaggaagtggagggtttgggtcccaggacaggaagcttggggctggagtcccagcatccggactgcaacaatggaagcttcaagcaccaggaaaagagacagagacagacagaggcacaggagagcaaaacagggtcggagatggaatgagaaacagaggcatagatacagaaagacagacagagagattcccaaagtaacagggaaagaccaacagtgacagagacacagagaaacagcaacagaaagagagggagagaagcagagcaactgaaacagaaacacagaataaggtggagaaagaaacgcacgatgggcagaagacactgaggaaaacagaactcgagagcatgactagtgaaactagaggttgagagacaaatcaggaagaacaaaagagcaagagaaagaaggaaaagagactgagagtctaaggagaaactgagaaacaaaaaaagaaagtgta

SEQ ID NO: 31127 - DNA, 1154 bp, Artificial sequence
  DNA replication origin
ctttgggaggccgaggtgggtggatcatgaagtcaggagatcaagaccatcccggccaacatggtgaaaccccgtctctactaaaaatacaaaaattagctgggtgtggctgtgcgtgcctgtattcccagctactcgggaggctgaggcaggagaatcgcttgaacctggaaggtggaggctgcagggagccgacattgtgccactgcactccagcctgggtgacagagcgagactccgtccccaaaaaaaaaaaaaaaaaaaaagactgcaaatgggccttgtaaacccctccacggggatgttcttagggctctaatgagtggggaaggccctgcaggccagggaagggccagcctccagttgtactgtctgcagtcagcagccctgggacactggcagaggacaggagggtcggtgcaatcctaagtggcaggtgggcagggagggggtaaaagggggacgagcagaggctgccaggaggcagatctcaaggttctggggtgggaggtaggagagggggcagaccacacaggaggctttggggagagcagggcagggtcacggctggagaggagagagcagggtgtgtgtgtgcatgtgtgtgtgtgtgtgtgtgcgcatgtgtgcacatgttcaggggaagggaagagatggctctatcttgtggctgagaaaggtcatccccaagaagagcagggttgggaccagcatgttcctctctggcaggtccataatgaagatgggaaaccgaggcctcgatgggcctgaactggcttgtcggaaggtgtaaatgaactggtggtggaagcagattagaactcagggcagtattctttcccccagtgtctcctggtgggataaaaaggggaacctaaataggaaggggcacttcgggcaccagagaggtgaagctaggccaggggctttcatttgggaggaaggaaggaagggggtgcagtttctgggcagaagagccatgatcctacatgagggggacggaagtgtgtgaggtcctgctggggaccacacacttatgtggtggccttatgtacctgagctcaggggcagatgaaggcagtggagaggcatctggttaggaccctgtgtaacaccctccagaggcctcctgttgaataccttccttggcctgt

SEQ ID NO: 31128 - DNA, 897 bp, Artificial sequence
  DNA replication origin
aactggtgtaacaaatagacccaagaatgtgtgatggcttagagacaatggaatcttgtttcttgcccctctaatggtctaagaaaataccaggttagcagtgaggctcaactagagaccaggtttctgacagctctgccgtttttttttttattttgagacggagttttgctctgttgcccaggctggagtgccgtggtgcaatctcggctcattgcaacctccacctcccgggttcaaatggttctcctgcctcagcctctcgagtagctgagactacaggtgtgtgcctggctaattagctctgccatctttaacaggtatcttctgaaatcactttggccatcggcttctagctagtgggtggggaagagagagtggagaaggcacatcagcttcttaactgctttggcccagaagtgccacttcagctcacattccatgggtgagaactaagtcacatggccccatcttaatgccacgggggctgggaaatacagtcactgactgggcagtgtcagatctcagtgtcaactccatatacttctcaatgtcaaccccacgcactaggcaaggggaagcaggagtctttggtgacagaaatgtctattcccatgattgttgttgctatttccatccaggacagagtgataagccctggatgggggggtgaaagcatagtaggagtttaaaaagtggggtgatcggggattgagctgattggggatccagcagtgctgcccagggaagacagcgtccagggggcttggagagaggcaggagttccacagggtgggatggagagagcagggagggaaggtcactgtgagctgagggagtcacatgaacggtcaagaggcaggaaaatccaggccaagagagagtccaaggcgggaa

SEQ ID NO: 31129 - DNA, 1523 bp, Artificial sequence
  DNA replication origin
atataaaaatccttagaaaataataaatttgatttatataaaattcataattttttctacagattctgttaagtatgttttctgctattatgtttacattcttatttctttcaggaactaaaatattaaaagtacatttcagtcagtcatttgagctctcaaattagctatcatgaatttcaaattgttttgggggacaggctgggttccccaggaagcagacactgagatggagagcaatatgcaggaggtttattgaagcatgctcttgggattaacactggggaaatgaggggaggggaggggaggggaggggaggggaggggaaagtgaagggagagaaggggaaggggaaggggaggggattaacactggggagaggaggggaggggaagggcggggaggggaggggagggcaagggaaaggaagaaagggaggggaacgggtggggaagggaaggggaggggaaggggaggggaggcacagcacaaggggtgggggcaggtggagatgacacaggttgggtgatagcaagtgacgtggcaggagactcgaccacagactggacgcaggcagcagcaggggcagcagcagctcgattcacagcaagaggggcagcagctgctggagatgcagcagctggggtggcagcaggtgggctggaagcacacggaatggcagcactggggtctgcagcagctggacacacagcagctggggtggcagcaggtcgtcctgcagcaggtggtctgacagcagctggggcggcagcaggtgggctggcagcacacggaatggcagcactggggtctgcagcagctggacacagagcagctgtgggagcaggaggtggttctgcagcaggtggtctgacaacagctggggtgacagcagttgggtgggctggcagcacacagactggaagcactggggctgcatggcatctttgaactgcacatagtaaaatgcaagaggaaagaaatgatttaaaggtggaattcataattaaaagggaaacagaacataaagatgtggaaaatgtggagactgaccatataaagaatgaaaaagcatgcaagattgtggccaagtaatgctttgttacaaggattgatatgaatagaaggaagctaggtgctgttcatcaaatcagtgggagaatggctctgaaggcatttcaaagatctttgaagctgtccctcccatcacaggctccaaatgagagaatcttaaggtcagaaagggtttggtactctccacattctagcacagtgcccctttgctgctccagttgtggctcaagtgggtttagatgagacttgcgctgctgctgcagaggccacaaactgtgagccttggtggtgttcatgtagtactgactgtagatacacagactgcaggagttgtggggcaatggtggtccacctaggtttgaaaggatgtttctgacagcctgccttaggggtgtagccacagcagagaggtcctcctagggccatgctcaggaaaacggggggtcaga

SEQ ID NO: 31130 - DNA, 1282 bp, Artificial sequence
  DNA replication origin
cctccctggcacccctgcaggtccagcccatggtcgttgttaggccagaggtgcgtggcccatctagggagcgtggttcatctagggagcgggtgggaatggagagagggctaggtcaggcccctgggctctcagcagttctgtctccaagttagcacaagaggaggggggcagcctgagggtctggccctgtccactttctgagatccaagggttgtggccacagggtgaggggatgcttggcccagcctgggggcagttgtccggcagatctctgagggcccacctgcctgtcttcttccccattccccatggggaagggcatggggagaatgagggctgtggccctgggggaatgggggagaagatgggtagggccatgttctgggcgtctcacggtgagaccagggaagcagcagagcttgtggctaaaggccctggatctggtgctgggaaggaatctggggccaggtaggagcccagcctggagctgatccctcgggggtcataggatagagaaacagaggatcccagggaaggtggggtgggagtgagcttatgggctgtgccacttctgaaatgcaccccaaaggagccgatggtctggtgaggatgacagaaggggtggagccaaaaacaccaactcacctgggactcgtcagcagagtcccagcagagggagccggtcagtccccaaggctctgcgtggctttccagagactctgcttccagttggcttggacagcacggtgtgcagaaagtgatgggggagactgacttaaggcaggcgggacagtgggagaggacagtcaggcgccccaatcccagctgctgcagtgtctgggaggaggctgagggctgacagccaagggctccaagagccaggtgaggctggaggtggggcagggaagccatcctggccatctgtggggtcctcggtcacccatgtcacccttggcatctccccagcagccatcggcagcccaatgagagagcagacaaggcaggcatgtgaacagatctggggagtatcactcgggggttctgacaggacaaggatcaaagaagggccagggtggctggggaaacattcaccatctctgggttgacaggatggcagaaattggggaacaagcagggtgggtggctggagtgcagggagaggcaggtggatgccgggaggtcagaccctgtgagggcttgggaatgtcgggtgggatgggccctggatgcaccctgggtacaccaggcaagtctcaggccaggatccctaaacctcagc

SEQ ID NO: 31131 - DNA, 877 bp, Artificial sequence
  DNA replication origin
ctcccctggggctaaagctgaatgcagatctgctgaccctgatctacagcttgcggaagctctgcctgtgtgcccccatctgctgcttcctagggttggggcctgcttcctcaaaaggagagtggatctgttctcctgccagccccccacagggccttgtggagccctggccatgtcctcccaaggtgaggtcataaaactgggctccttgcccttcttgttgcttgggtgacaagcctcgggtcatccctaggtcctgtcactgctcctgcttctaaaaggagagcattttgccaaatcttcctgggagaggctgggggctcatccctgttatttgttctagcttggtaaaatgaggttaagacatctaggcaagcagacaatagaggggcacccaggaagggtgggtggcgggtgctggcatttgggcttgcctggaccttgtggggagggggaaaggttaccaggaggcagcactgtcagtcagggctaaagtcaggaagtggggggagtgggggcagagtgtggctggcttgcgggggggcataagtgagagccaagatttgtcagcatgcagtgggtgtggctgacacctggcctaggggctgtggagcccagtggttgctcttagttcctggatccagggagatttctggagcctgtgcctggggctttctaggggtgaagatggtgaggggcagggaaagggtggcagaggaggccttgcatggcagggtgcagggcaggatgctgggcagggaccagattgcagtggctgctctcatccccaccactacccctacctctaccccaaccctggagcagggtggggccttggcaggtgtcctctgttttggcctcggcagatcacaggatg

SEQ ID NO: 31132 - DNA, 1412 bp, Artificial sequence
  DNA replication origin
tgacttcctacagctatcgccagtcgtcggccacgtcgtccttcggaggcctgggcggcggctccgtgcgttttgggccgggggtcgcctttcgcgcgcccagcattcacgggggctccggcggccgcggcgtatccgtgtcctccgcccgctttgtgtcctcgtcctcctcgggggcctacggcggcggctacggcggcgtcctgaccgcgtccgacgggctgctggcgggcaacgagaagctaaccatgcagaacctcaacgaccgcctggcctcctacctggacaaggtgcgcgccctggaggcggccaacggcgagctagaggtgaagatccgcgactggtaccagaagcaggggcctgggccctcccgcgactacagccactactacacgaccatccaggacctgcgggacaaggtgggcggaggcccggccgcgggaagtgcagtgcacctgccgcggaaacccagccccgcgggccgggcgaggttccaggcggggcggcgggcaggagcccgttaggacgtgggaaggtccacaggtggggccgagtaaagggggacaggagacgtgcggggcaggacctcggggctggatgcagaggccggggtggtggaaaggggaggagaactgggcagggcagataagtgggtggggcctctggaggtggcgggggcaaggttggagccccgggacgaagaagggacgcgggtcagcgaggcctgaagagtgggaggagatgggacccggctgtagagtgcccagaggtctaggccaggggccgcgctgccgcaggaagatgcgagagtttggctttggtgatctggtccacccggggccagtcttgccccctctgccaccgcagcgtagggcctcctgcattccgtttctctggccggaagggtctagtgttcatccctctcaggctttggcctcctcccactctcccgccctggggcccattcgtttaggaagaatgggagagccggtcgtggcccctgggcggggtaaaggagggaggcttggtaaacctctgctggggaggacccagtacagtggcagctccttgtcggggaaagaacggatctgcgtcacacgctcttacaggggaaccctaaggggcctgaggggtagggcttggtctccacccagagggaaggagaaatttttcgagtcgtaaagaaatgtatcagaagccatggaacatttacagccgcacacgctgggtctcccaacaaacagatccccaaaatattttccagtgctgtactcgtggcatagacccagacccacagaccaggaggaagcgctagagatgtcaacagccaacaaaaacagtgctttacacacttgtaaaattgtgacctacaggggctgggcactgtggctcacgcctgtaaccccagcact

SEQ ID NO: 31133 - DNA, 1047 bp, Artificial sequence
  DNA replication origin
ccgcctggaacctcgcccggcccgcggggctgggtttccgcggcaggtgcactgcacttcccgcggccgggcctccgcccaccttgtcccgcaggtcctggatggtcgtgtagtagtggctgtagtcgcgggagggcccaggcccctgcttctggtaccagtcgcggatcttcacctctagctcgccgttggccgcctccagggcgcgcaccttgtccaggtaggaggccaggcggtcgttgaggttctgcatggttagcttctcgttgcccgccagcagcccgtcggacgcggtcaggacgccgccgtagccgccgccgtaggcccccgaggaggacgaggacacaaagcgggcggaggacacggatacgccgcggccgccggagcccccgtgaatgctgggcgcgcgaaaggcgacccccggcccaaaacgcacggagccgccgcccaggcctccgaaggacgacgtggccgacgactggcgatagctgtaggaagtcatggcgaggcggagcacggacggagcaaccctggtctcagaagctgcgattcgcgggaggagcggcgaggccctcacctggcgccttttatgcccgcggccggtggaggggggaagggaggaatggtgtcaggggcggatatctgagccctgaggaatttgcaggctcctgagagcaaatatgggctctctccccattggtcaattccctcccctcccagagaccagaggcccctgccctccagaggtgccccgccccggtccgcgcagaagctccgacccgcactcccccactctctctctgcagaccctgttctggcctttcccccgtcagggacatacctggacacccctgtccctggaagccacattctgagcctcaccctttaagatcacccagagtttgacaccactgggaattacagtccctctggggtcatattcctacacacccctgacccagtgattttgtttttgtttttttggagacgagtctctgtcgcccagactggagtgcagtggtgtgatctcggcccactgcagcctcc

SEQ ID NO: 31134 - DNA, 1428 bp, Artificial sequence
  DNA replication origin
cctcatcagtgcctgataagggaatgactcagagctgaccagtcacagggtgctggcttttatggctggtcttggactcccctttctccctcttgggctctccaaagaccttcagtctttctgcaactgattcactagttaaacagcctcagactggccttcctgagggctcagagcggttcctggtgggttaggggtgtgtatttacggggtttcctgccccagttcaaggatgagttggcagctaacaggtagtttgctgggaacttaggtttccgaggctggagacaagtctccaccagtcacaggtgacccaggtgataatacacagagaagagggctgagctgggccacccctcttttcatgagggaaaactgagacccagagatgggcagggactggcctgtctcccttaataccttctcaggagggcctctgttccaagcctgggtgaatgctttgccataaggacaagaaggaaccatggggacagttctggggacgggggtcactggggacaggaactggggtgaggttgttgcagcgccctgtagtgcctggcagggggcatggccctccaaagagatccaaaacggtgggtggaattgttgaacagagcaaggggtggggctgtgtggggaggaaggccctgcctctattgtcaaaacctttaccttgtgccgggcactttgtgtcgctctgcccagctcattcaagcactcatctttatacaaggatgaggacatgcattcagcagccctctgacaaggagggcagggattcatcctatgtttgcctttcagtggcagatgctaaatgcctcatgggcaagttactggcctctcccaggctctgcttcctcattttggaaatattaaagcagcccaatactcctgtggttgaatgaacgcatgctttgggggatggaagggaggggatcatcctggtggccagggacgagtgggctttgagggttccagagtgaggatcaggctggagcttagtgttggaaaggtgtcagctgccagaaccgctccctgcagctgttctcaggagactgttgtcacctggggcactgaatggcgacagcagggtgaggcagctttgtcttgagagggctgggttcgtgcagctcaaaatgcccggatgtgccctgatccggaactggtgcctttgtcagaggggacaaaaggggagttgggcatgggtgttcccaagaagctggttctgagaggctgtaatctccagtggagggcaggaatctgtgaatgcactttgtggggggcgggctggttaggatcgcaagcaaggggctcttaacagggagcactctgaatggttaatcactggggctgggcgcaggggctcacgcctgtaatcccagcactttgggcggcccaggcgggtggatcacttgaggtcaggag

SEQ ID NO: 31135 - DNA, 703 bp, Artificial sequence
  DNA replication origin
aatggaagaagaggtgaggcacagtggcacacgcctgtaatcccagcgctttggaaggccgaggcgggcagactgcttgagctcaagagtttgagactggcctagggaacatggcgaactcctgtctctaccaaaaatgcaaacaattagctgggcatggttgtgtgcacctgtagtaccagctacacaggacgctggggtgagaggatcacctgagcttgggaggtggaggctgtagtgagccaagattgcgtcactgcactccagcctgggtgacagagtaagacccagctggaagggaggaagaaaggaaggaaggaaggaaggaagggagggagggagggagggagggagggaggaagggagggaaggaggaggggagggaaagaaggagggaaggaggaaaggaaggagggagggtcaaagatgagaaatgtcaacaaaagctttaaagctcaaaaatggtaacacagaagatgagagaaagctgagacccagggtttgggggattaggaaggggtcaacagaggagagagcaggaagcccgtgagaggcaagcacattctcaacatactctaaagaagctcaagaattggggcaccacagacatggagaggaaaagtggaagagggaccgtaagcagggctggctggaagtttctgtcaacagtaccaggccccctcccagacccctacccaactaa

SEQ ID NO: 31136 - DNA, 1079 bp, Artificial sequence
  DNA replication origin
tgcctgcctcggcctcccaaagtgctgaggttacaggtatgagccaccatacctggccaggtatgggtttttataaaagattttgtgagaggataggcacagtggctcacacctataatctcagcactttgggaggtcgaggcaggtagactgcttgagtccaagagttcaagatcagcctaggtaacatctctacaaaaaatgatcagggcatggtggtatgtgcctgtagttccagctactcgggaggctgaggtggaaggattacctgagcccaggaggttgaggctgcagtgagccatgatcacaccactgcactccagcctgggtgacagagtgagaccttgtctcaaaaaaaaaaaaaaagatttttgtgggagtcgctcactgctccctgtgcggtggggtggagggaaggggaaagtgttcttccaaaaagctgagatttgaagaatgaggagtgggaagaaaagggctcgggtggtgggtgtttctggcacagggaaagctgtgggaaatggcctggccaggtgagacaatgcggggagttcagggagggagcagttcagtgtgttggaggcgtaacactgggagagttggaggcctggaggctggggaaggcaggggaggggacaagtgctgcctgcgggcctgttggcagtgggggtgtgggtggataagagacgggccaatggagggcctcacggaggggacaactgcgagggtccgactcaccatgcaggtcctgaataaagccgtgctgggcctggagaagtgtgggtcggggagggatggacactgaacagcaaggctcacctcacatccaggaggccccccgccagccccgccatgccacaggcactgacggttgccactaagcctcagaggccaactgcatttatttggaaatggagcaaggcactggccatgtccaggctggctttccagccctgtcccccaaaatcacagtcttcctgcaattactcacaggtgctggccaatagtgcttaggttctcaaatgcctgcttctactcaggctatcctatccacctgcagggtccttcccctcagccgtcac

SEQ ID NO: 31137 - DNA, 1219 bp, Artificial sequence
  DNA replication origin
gctcttgggagtttctatcccgaaggggctaagtctcagacctgctgttggggccagccagagaccagactccaggatctaggtcacccctgtggcagtacagctgatttatggtggccctgacagcctaatgtcatcaaattatcccacacaatggagagaggctgggccgcccccaggcagtcaccaaaggacgctgagcctggggcagcccggctgcctccgtatcccagacctccctcgggtctgtggggggaggctggcacagaacaagggcacacccaggcgtgccaccttcagctgggggtataagtaggcagccccagggacagctctgtaccctgcacttgggagccggtagcactcctatcactgcttctcaacccgtgagctaccagctgtgtcatgagctgcagacagttctcctcgtcctacttgagccgcagcggcgggggtggcgggggcggcctgggcagcgggggcagcataaggtcttcctacagccgcttcagctcctcagggggcggtggaggagggggccgattcagctcttctagtggctatggtgggggaagctctcgtgtctgtgggaggggaggcggtggcagttttggctacagctacggcggaggatctgggggtggttttagtgccagtagtttaggcggtggctttgggggtggttccagaggttttggtggtgcttctggaggaggctatagtagttctgggggttttggaggtggctttggtggtggttctggaggtggctttggtggtggctatgggagtgggtttggggggtttgggggctttggaggtggtgctggaggaggtgatggtggtattctgactgctaatgagaagagcaccatgcaggaactcaattctcggctggcctcttacttggataaggtgcaggctctagaggaggccaacaacgacctggagaataagatccaggattggtacgacaagaagggacctgctgctatccagaagaactactccccttattataacactattgatgatctcaaggaccaggtaggtgcaggaaactgtctctgtcttggtctctttctctttcattctttatcttccaaaaaagttaaaatgctaaactctaagctcagataatagccagggaatccaccttttggaaatgtacgctttcatcagaaacaaacttgtgtttggtttctggggatcccaggat

SEQ ID NO: 31138 - DNA, 855 bp, Artificial sequence
  DNA replication origin
tgctgcccattcacccaccttgttcctcaggtcctcaatggtcttgaagtagggactgtagtctttgatctcagcaggccgctgcctctggtaccagtcacggatcttcacttccaggtcggcgttggcctcctccagagcacgcaccttgtccaggtaggaggccaggcggtcattgaggttctgcatggtcaccttctcactgcccaccagaagcccatcaccaccagcaaagccaccaccaaagccaccacccaagccagcaccaaggccaccaccatatcctcccccaaagccactaccaaagctgctgctgctgctgctgaagccaccgccatagccgccccccagcccgcaggctcccccagaggagaagcgggaggatgagacagacaggccgcccccgtaggtgctgggggcgcggcaggaccctccggccaggacggaggagatgcggctggagccgcccccgatgccgcccccgatgccgcaggagcccttcatggagctggaggaggtgaactggcggctgcaggtggtcatggtgcagaggagggaggtgagcgagcgagcagttggctgagtgaagagaaggtgctcgggtaaattggaaagggatgcgagtgctttatactcgtgggtagggggcgggtctggcactttccattccccttggctttcatcacccacaggctagcgccaactcccagccaggtccctcctctcatccgcctcatcatgtctgtcatattttactggaaactcattgtttggagtgttttgggctttcttgtcccgccaggcgtgattcacagggggaggtgtgggcctgcaggctacactttcccatcggac

SEQ ID NO: 31139 - DNA, 1885 bp, Artificial sequence
  DNA replication origin
ggtcataagtacctcaagagcacagatattagtacaatgtagtaaaataatttggaaggaatgagttttcagtatgcattacctttgttctcaatataattcatttaattttaagttcgtataatttaatttttgatgagggccatatttaacaatcaccttgcaaaattcctgaaattttaatgtccagctctcaagagccagcatgagccagctccagcgtgccaatgagcctcgaggtttaggccataagcaagagactaggagggacaaagggaaagcttctggataaaacaaagtgaaagagggaaaaccagattgggggaggatattggtgagggaaggggaagaagagttggtgggcccccacggtcagggagacagcctaggtggacaggagcagaggcagcatccagaggctgtgcagccttcacaaggcagaccaggcactgtctgcctcccagggagccacatgggagccccatgggggtatccaagtctgtgctgcctcgttatctcaattatctcatcagtgttctgttggttgttctctctgtcagcatctagcgaggactgttctactgcagcactcagtgtgcatctgtcctttgactgtcccagcttgagtgatgtctgtgtgtcccaagactttggttactccccatctaacttaacccatatgagcaacacccccttcaaagaactggaggagtgattgggggaaaggaaatgatggtgctgggggtgttggaggtactggaggtagtggtggtggtggtggtggtggtggtgatggagatggagatggtggtaatgatggtggtgattgtggtggtcatggtggtgatggtggtagtggtaatggtggtgatgatgtggtggtggtagtgggggtgggggtggtgatggtggtaatgatggcagtgattatggtggtgatggcagtgatggtggtagtggtgatggtggtggtgatggtggtggtggtggtagtggtggtgggggtggtgatttcagtggtggtggtggtggtggtagtggtggtgggggtggtgatttcagtggtggtggtggtggtggtgcaggggcgagtggtgatggtgggggtgatggtggtggggcgtattggtgtggtgctggtgattgtggtggtgatggtagggatggtggtagtggtgatggtagtgatggtggtggtggggctgtgggggtggtgatggtggggatgatggtggtgggggtattggtgtggtgctggtgattgtggtggtgatggtaaggatagtggtagtgataatgttggtgatggtggtggggaggtggtgatttcggtggtgggggtgttggtggtggtggtggtgatggtagtagtgttaatggtgggggtgatggtggtggggggtattggtgtggtgctggtgattgtggtggtgatggtagggatagtggtagtggtaatggtggtggtggtggtggtggtggtggtggcggtggtgatggtggtggtgatggtggtaattatggtaattatggtattggtggtggtggtggtgattatggtggtgatggtagggatggtggtagtgttaatggtgggggtaatggtggtgggggtattggtgtggtgctagtggttgtggtggtgatggtagggataatggtggtggtggtggtggtggtgatggtggtaattatggtaattatggtattggtggtggtgttggtgattgtagtggcaatggtagtgatggtggtagtggtaatggtggtgatgatgatggtggtggtggtgatggtggtaataatggcagtgattatggtggtgatggtagtggtaatggtggtggtgatggtagtgatggtggtagtgataattgtgatggtg

SEQ ID NO: 31140 - DNA, 1117 bp, Artificial sequence
  DNA replication origin
ggtggcggtggtgatggtggtggtgatggtggtaattatggtaattatggtattggtggtggtggtggtgattatggtggtgatggtagggatggtggtagtgttaatggtgggggtaatggtggtgggggtattggtgtggtgctagtggttgtggtggtgatggtagggataatggtggtggtggtggtggtggtgatggtggtaattatggtaattatggtattggtggtggtgttggtgattgtagtggcaatggtagtgatggtggtagtggtaatggtggtgatgatgatggtggtggtggtgatggtggtaataatggcagtgattatggtggtgatggtagtggtaatggtggtggtgatggtagtgatggtggtagtgataattgtgatggtggtgattatagtgatggtgggggtggtaatggtggtggtgggggtggtaatggtggtggtgggggtgttggtggttgtgatggtgatagtggtagtgataatgttggtggtgatggtggtggggggatattggtagtggtggtggtggtaatgatagtgatgattatggtggtgatggtggtggtggtcatggtggtgggagtggtgatgatgagggtggtgatggtggtgctggtggtgttagagaaggtaagtatgacaatgaaacccctgagtcaagtctcttgttctgtagaacagaacagaaccagtttaagcagtcatcaccttgagctagcttaggggtaaaacataccctcttacagtctcattccaccaaagttaacatgtattgaggacttaccaggggccaggtcttaacttcatcatgtcttctaatcctcagagcaacactaaggcaggtagggagtggggctggggttcaagcccaggcagatctgctcctgggggtgggtggggggtggttattctcactgtagagaactcactaaggctgcaattcttgtggccatgtgggcagatagggcaaacaccagccactgtttaagcctctgtaggtccacagcccagtccccacccacttacctagaagaggaggagagagagaggaagcgtcagccaaggcccagctattgagaaagagctcagccagtagg

SEQ ID NO: 31141 - DNA, 681 bp, Artificial sequence
  DNA replication origin
tagtctttgatctcactgggccgctgcctctggtaccagtcacggatcttcacttccaggtcggcgttggcctcctccagagcacgcaccttgtccaggtaggaggccaggcggtcattgaggttctgcatggtcaccttctcactgcccaccagaagcccatcaccaccagcaaaaccaccaccaaagccagcacccaagccaccaccgaagccagcaccaaggccaccaccatatcctcccccgaagccactaccaaagctgctgctgctgctgaagccaccgccatagccgccccccagcccgcaggctcccccagaggagaagcgagaggagacagacaggccgcccccgtaggtgctgggggcacggcaggaccctccggccaggacggaggagatgcggctggagccgcccccgatgccgcctccgatgccgcaggagcccttcatggagctggaggaggtgaactggcggctgcaggtggtcatggtgccaaggagggaggtgagcgagtgagcagttggctgaaagaaggaaaggtgctcaggaaggctgagagcgtgctgtggctgcctccaaccccagagacctttatatgcagctggggaaggcggggccctcctaactgctgactccaggttcccctctggatttcatcactcccggtcccgtccaact

SEQ ID NO: 31142 - DNA, 1302 bp, Artificial sequence
  DNA replication origin
aggggagatggtgcttggagacccaccgttgttgattggcaggtcaggggtcagcttagaccggcataaagagtaagtctggggagagtttggaagggggtgcttgcctctcccaagggctggagattttcagggggtggtccaggctgcgctagacctggggtggagttggtgtatcaggtgcggtcctaggtggccactgcttgccctgtgagtagctctgtgacctcgagaagttaggcagtcacttcccctcactgagccttgctttctcatccataaacggatgggaagatctcaggtgtgggagcctgaatcctcagagatgactcactcaatcagttgttcctcccggtcctgtgggccgtgccctacccctagatggggcaggaggtgggcaagggctgggataagcacaaagggagggtgggtgggggaggcaggctgggtggttggggcccagactcctgtgtgagtctcaggaaatccccaagagaggcccccattgcctccgccctgggaatgtgagtgggaggctggcgttttcagggaaggctacggaccccaggcaggtgtgggagaaagggtggggcctctctcagggatgcttcctcacatggtcagctgttgctcgggatggggacggggtggagtgggggggcactgcagatggggtggctgtgcccagggagcagtgccactctccctggcagtctgggtcctctttggttccccactagggacaggggtggcgtgagggagggtagaaactgcctcctgggaaaatgagaaggaacagtcctgctccagccactcccggcaccctctgagctgaccaaccccagctcttgctggtggcagcaaacgtggctgtggggaacagtctgtgggagatgagcctgacacctggaaatcttccttctagtaaatccggaaactgccaggcgggttggcctgctttcctggttttcttcaagcagggggttcgtgggaggaggaggttgcctccacctcatcactgctggacctgcggtgtctctgctgctgcggaatcagaccagggcccccaaacaccctctctctcctcgtgcctggaggctgggggttgggcccaggcctgaggaaaatgggagtgaccagagccctctgagcctgggttggtgggggtttgggactggcagaggccagggatgggggtgggtactgaccactggggtatgggtgactttgggctggtcacaggccctccctggaccttggagctaagacatcctgggagagagtttctctctgcaggggaga

SEQ ID NO: 31143 - DNA, 1002 bp, Artificial sequence
  DNA replication origin
cagcagctgtgcgagctctgctgcgacacggagcaccaggaccacaagcacaggtccttctggacgtgaagacgtggctggagcaggagatcgccacctaccgccgcttgctggaggttgaggacgcccagtgagtgtgtaccagggtgcctgttggggtgggctgggggcccgcttcacccagggagaagttggtgtctgagcaccagcgaaattcaggaggtgtgaatgtcggaacctgttggggtttgcaggaggtgatactgacgatgcaggctggagtctggctgaggagccttgaatgccaagttaaagcgtctggactagatcacgtaggcaatggggagccatggagggatttggagcaggagagtgaaatgaacatcaagagattttagaacattcactctggctgcagagggagaaatggatcagaggggtcagggcggggccagagagatgtgtcagggggctggagcagggagtctggccagagaagtcccgtgcggtggtgggtagtggggcaggggaaggaaggtggtgcacgcagaagagaggttatagctcaaaacagcgggactggatgcctggatctcggggtaagcatggctcacagtcaggactcagtaagtgtcgggagaacacatgaaggagcaggcattgatggccctgggtttctggttctgatgactgtgtgagtggtgaagagcaaggtgggtggtggttgggtttgcagttgggaagggtgatcaggccttcagctgagagtgtcccggagtctccatgcttagtcacacgttgcagctttttgctccccggaaatggtgaagtccatctatagtctaacaacagtctctcctgctttaattgggtctatttgttgggccctctgggttatggaaaaaccacttgctcagcttctccttgtaaattcctggtgagtagccacagagtgccgccagacctactgctgtgctgtttctttttcttcttcctgctgtg

SEQ ID NO: 31144 - DNA, 1227 bp, Artificial sequence
  DNA replication origin
ggcacagccctggtgcgtgctgcgcggcggggttggtgatgaggtgctggctgatcccgaagatcaggagcactgactcaccagggctcccctgggttccccgctgccagaaccaaccccaatatctgatctggcactgccagtatttctgcttccaaggggagattgcaggaattcccgcctagtggaggtcccgggcaggagcagacaaagcccctcgtaggcagcaccaggcctggctctccacccaggaaactgagcaggcctaaccaccagggccagctgggcctaacctgactcccgcctgcctcccctggctcccctggcccccctggccaccatactcatcacttgcactcctcacctgccactggtggctttgctctgtaggaccctccagggcagggtttgtgcagaagacaaagtggccatgtttacagaatgccaaagccatgttcttagaggtcatgagagagagtgtgtgtgtatgtgtgtgtgtgtgtggtgtgtgatgtgtgtgtggtgtgtggtgtgtgatgtgtgtggtgtttatgtgtatgtagtatgtgtgtatgtggtgtgtgtggtgtgtggtatgcatgtggtgtggtgtatatgtgtgtgtggtgtgtatgtgtgtgtgagatctgtgtgtattgtgtgtgtggtgtgtatatgcgtgtggtgtgtgtggtgtgtggtacatgggtggttgtgggtatatatgtgtatggtgtgtgtgtagtgtgtatgtgtgtggtgcgtgtggaatatgtgtggcatgtgtggtgtggggtgtgtgtgtggtgtctgtgtgtatgtgtatgtgtgtgtggtgtgtgtggtgagtgtgtgtgtgatgtatctatggtgtgtatggtgagtatgtgtgtggtgtgtgtggtgtttgtgtatgtgtgtgatgtgtttggagtgtgtgtgtggtgtttgcgtgtgtctgtgatgtatatgtggtgtgtgcgtgatgtgtgtgtggcgtgtatgtgtgtatgtgtatggtctgtgtggtgtttgtgtgtgtatatgtgtgtgatgtgtgtgtgctgtgtgtctctgatgtgtgtggtgtgtgtgtggtgtgtgtgcgtgtacgtgcgcgtgtatgtgtggtgtgtgtggtgtgtatgtgtgtgatgtttgtgtagtgtgtgatgtgtatgagtgtgtgtgtggtgtgtggtatgtttgggtgggtgtgtatatgtg

SEQ ID NO: 31145 - DNA, 875 bp, Artificial sequence
  DNA replication origin
gagatctgagctgtgccctcctgcccggctggcccagctggcccggcctgtcctcagcatgtgaggcttctctgggttgggggctagagggggattcacaggcagtagagcctctaacgagcagtagcaaaggggcctggggggggggtcagtggcgtggggaaactgaggcccagagaggaagaggagcaggctcgcggcccaaagcctgtcaggggtgaggaagcttgtgggggctaaatggtggtattgggggttggaggccttggtgattttagaggcagaaagaagagtaataaactctctgctccttcaaattgggcctcaagactaaggtctgggtactctggaagtggggttcccaggcagggtgagcactggcggtgtgggctctacggggaggcagaggggtggtggcaccccacgacctggccccctccctagggccctggctttgccccacatttgctgctggaaggcggggcagtcccttttgtgagcccagagtgaggcccacctgggtagcccagctggcctaggggaggatggggcctgggaagggaggggttgttaggagaggatggggatggggagggtcttggtttcgtgtctcttcgtgtgtgagtgcctgctggtgcagtcttgactctggcggctcaggtgagcacgggttttactgggtctctctcctccccgaagacagtcctggattgccaggaagtccttccagatgtctaacctcgtgctcatggtggtctgaccttgctctctagccttggttttgaacctccccccatccccgcccagcaccttcacaggctgggcgggagcagtaaaatcagggctcaaccgctctcttccagatagctcctgcc

SEQ ID NO: 31146 - DNA, 930 bp, Artificial sequence
  DNA replication origin
gaggtgtcccacgggtgacccccgaggcctgggtttcctgtccgtgatgtcctccccactcattcccactggtccccagccttccctccctccctcccttgctctgtcctcccgccctgggcctcatccgaggcattcagtcctctaggccctcttttgggaagggcccctggacagctgatgtgctgcctggaagggtggggtgttcctgggtgtccgtatcctacgtcttggatccgccacaggctgacagttcctggaaaccagtcagaggtgagtgaggggtgcagaggggaagaaaggctgggtccacttacccctgggtaggggagcccctggccaagccctgggtatacagggggtgctgggggatccccttacctctgtctcttcaaactggggcagaggctcagggcacccagcaatgttccgaatctcccagggccctgggaaggtggagggtgggaggatctgggtggggccgcctggggcctcaggatagaggcaggaaacagaatagaggaagcaggattccacctgtggaggcggcaggtgtggctgggtgagggtgcacttctcaggcgatgctgggccaggggtgggagtgcctgggggtgagcgaggggcaggagatctgtgacctccaagggccctgcaggtgacaggggctctgtgtctgaggggtgaatggaaaggaccccagtgggtcttagtgacaggggactaggggtggaatgagggtctctggggttctctcctcatcagcgaagccaaggtctcagctgggagcccgttctgggctccagggcctctcactttccctgaccacctgatactgacccttttccttgaggggaagggtaggtggccatgtccctttcctgggaccttgtctcctccccagtcactgctcaggctccatgaccctaa

SEQ ID NO: 31147 - DNA, 1404 bp, Artificial sequence
  DNA replication origin
ctgcctggaaggccggcatctcctgtgtctcctgctgtgctggacctgctcagatcctttccccacctgtcctgccttgaggctgggtcagggacccctcatgggcactcccacaggccagcctgcacaggtctccacggtgtctcgtgaggtccaggagctccccaagatcagggcctgctgtgtgtcccctgtcatgtccccaggtcaggctctcccacgtatgggctggggagtgagaggatgagctagtgagtgggtacaggaagcccggggagttcctctgaggcccagtcctggccccgattctgcttcctccagtccaggaggaatatccctctaccttgggactggggtctcctgggaacattctagaaatctctcttgcaatcagggaggatacaagcccctcctctttcctgatgaggatgtaagattaacaggccagagtggcaatggcgtctttgtgtgagtgtgtaaggtgtgtacccgtgagaggttgtgtgaatgtgaaagtttgcgcgtgtgtccatgagtgggtgacagtgtggacatgagtctatgagtgtgagtgtgagtatggggaagtttgtgagtatggggaagtttgtgagcatgtgctggtgtgtgtgagtctgggaatgtcagtgtatgtgtgtgaatgtacatgtgagcggcacgtgaatgggtatgagtctttgagtgtgtgtcagcctgtgagcatgtgcctgtgtgtgaatctgggagtgtgagtgtgtgtatgagctgtgtgtgaacgtgtgtgtgagtctttgtgtgtgcatgtgtctgagagtgtcaatgtgtgtgtgaatgtgtgtatatgagtctttgagtgtgtatctgtgagcatgcgcctgtgtgtgaatctgggagtgtgtgtgtgagctgtgtgtgaacgtgtgtgtgtgagtctttgtgtgtgcgcatgtctgagagtgtcaatgtgtgtgtgtggatgtgcctgtgagctatgtgtgaatgtgtatataggagtctttgagtgtgtgtgtatcgatctgtgagcatgcgcctgtgtgtgaatctgggagtgtgagtgtgcatgtgaactgtgtgtgaatgtgtgtatatgagtctttgagtgtgtgtcagcctgtgagcatgtgcctgtgtgtgaatttgagagtgtaaatgttcgtatgagctgtgtgtgaatgtacgtgtatcagtctgtgtgtgtctgagagtctcaatgtgtgtgtgtatgtgcatgtgagctatgtgtgaacgtgtgtgtatgagtctttgagcatgtgtgtgtcaacctgtgagcatgcacctgtgtatgaatctggaagtgtgtgtgtgtgtgtgtgagctgcgtgtcgatgtgtggcttatcctgcaggagtgctgacccgggac

SEQ ID NO: 31148 - DNA, 1092 bp, Artificial sequence
  DNA replication origin
gtttcctgggaacctgtgatgggcccagggtgggcccagggtggcttggtctgcagaaatcacttcccaagccttggtgggaaccagcagttcctggccctgggcccagggtgggcgtgggaattctgtcctgcagggaggacaggaagggtgacagcagggctgtgggagcagaggctgagggatggggtgggacactggtcctgggcatctagcgtagcctccacggtgagggcggcaggctgagctccaggcagctgggttggggggcagggaccagagcaggtgcagccccctggccccacctagccccttgcagagcagtggtgggcaagcctggctgaggtgtcccaggctggggcagagaccccttggctcctctttctgggggcagctcctcacttccccagctttctttggctgagccctggggctggctctggggtgccccattccaggggctctctggggaccttggctgctttccctgcttctctgtccagggccttgtggcaagaggatagaactttgtcctggctgggtgctgcctgcagtggaaggaagtgcctcagctcctgaaaaccctgctctgtgtctgtgtcctgtggttgaggatggctttgtgtgtgtgtatgtgcatgtgtgttgatggcgtgtgtgtgtgcatgtgtgcagacatgtgttgctgggatgtgagtgtgtgttcatgtgtgttggtggggttcatgtgtgtgtgcatgcatgtgtgttggggtgtgtgtgcagtgtgtgtgtatgtgtgtgtatgtgtgtgcatgcgtgtgtgttggtggggtgtgtgtatgtgtgtgcatgtgtgttggtagggtgtgtgtctgtgtatgtgtgtgcatgtgtgttggttggtggtagtgtgtgtgcatgcgtgtgttggtggtgtgtgtgtgtgttggtagggtgtgtgtttgtgtgtgtgcatgtgtgttggttggtggtagtgtgtgtgcatgcatgcgtgtgtgtgtgttggtggggtgtgtgtgtgcatgtgtgttggtgggggaggcacttgtttctgtggggtggtcttctggacattcgcactggcgtccc

SEQ ID NO: 31149 - DNA, 1103 bp, Artificial sequence
  DNA replication origin
gccctgccgcagttgggagaagcctggctgggggaggggacgtggcaggggcagccagaacctgtgggcttggggacccttcccctccactccagttccccaggagcttctgagtgagcacagggcagcggggctgttgtctcagcacctttgactgtgaggcccccaacctcagcctctgctccacccctaagactgtgcgcccggaaggtggagaagggctggctggggtgagagggtctgtgcttgaactacagcagagaaagagagcagagggagaaagttctctctggccagcccagctgtgggagggctcagggagggaggccagtgggccctttctttgcaggcagggagggatgggagattctaccagcgccagacctggggggctctgcctcctgatccccagggtctgggtgggcaccgtgaggcactccagcgtcgcgtttgggggctggctgggtgggcaaggaggtggatgtcagggcctggggaggctggggtaaggtggcgccaggaggggacgggcagtttttctggccttcactggcctgtggtttccgcagtgcagggcatgggactgtggggcgatggagcaaggaggatggagtttctgtccctgggaagcctcttgtctgaggggagacatgccccgagccttcagggaccgcctagtcggagggggagacacagcccttgtcctggggagtttggaataaccgtattggggccagggacagaggatgatggagtcaccctgctctgcatggagcacgggaccacccggcctcacggggctgggcagacgcttctgtttcttctgcatggagcacgggatcacctggcctcatggggttaggcagacgcttctgtttcttaggaagaggtctgtttgcttctcaaatgcttcccgggaacctcctccaccactgcagccctgcactgtgggcaggaatgtcactagcccccttttacggatgaggaaactgaggctcaggcatctgggaaaatgtgctgtgggcagcccccccggacagagctgtgctggcaccctccagacagtgcaggagaagggcaggtcccacagagtccctgctgtt

SEQ ID NO: 31150 - DNA, 1956 bp, Artificial sequence
  DNA replication origin
gtgaccttgggaagtccccgcacgcctctggctgcagctgccgcctgtgaaagaaggggctgcacttcctggatggtggaaggttgctaaggtaaccacaaagtgcccgctcagcagcagctgccgtcatcatcatagttattattattagggtttcgtcctgtgccagcatttgacaattctaaccccacctggaggcctgctaagagagcaggcgagggctggtgatcatttagggatgcctaaaatgtttgcagggggagcaggagagaggaaggacaaaggatgttcatgagggtcaaagacctgggtttggggcttctcggggcgagggggtgcggagggagggccccagatcgcgccttctccctttaggtctggtcccggggtggcggcgcgcgtgcgcaggaggaggccgtgggcccggccagcagagggcgccgcgagcaccacgcccgggcttagctgtgcggggctccgccttgctgcgcagtgggcaagccggtctggctgcgatgggggagggctacgctggggagctgcgggtaagggcagctgtcaccgttttcagttgttggtcggtgtcctgtgtggcattgtgggtttgcctgtaaccaccacatgttcattcatttaactagcacgatcaagcacccacaagtttcagccactgctgggagtaaagaggggaacgaggtgcatgcccggagaacccgcacccaccatccaggtgacagaggtcagcccagggctgggggagcttggaggaggagccgcctacctggagagaacaggcgaggcagacagaaggcaggaagcacagagagcccgctcgcagcttggcaatgtggggagctgaacagagcaagaactgtttggggccatgctctcgaacactggcccagggccggcgatgtcgaagccatgatgaatccaaggctaaactacagcagacacaacggctgtccctaagggggttataattgcgtgcgtgcgtgcgtgtgtgtgtgtgtgggtgtgtgtgtgttggggggggcgctgggggtgggaggctggggcgtgtaggcaaataccaggactggaaaaagtagagtcctaggatctcgaccctcctaggccggcgggggtgtcttgctgcctccctgtgaaggtagatgggctgcatgggggaaggagggccaggtatgtgagtgggggagtggacagaggggtggggtaggaaccaagggcagcagggagtccaggtgggagcagttgggacggggatggagcagacagtctggtgggagagtgaggggtgggggggacagtggggagagggtggcaaagactgcttgagcctctgagcctcagttaactcagaggaggttggcataacacagagggcagtaaggacagggacaatgggaaaaaaaaaataaagtgaagaccatcttggttccattatgaggagtagagtgcctggatcaaggaggtgatgatggttccatgtgtcctgggtaggtcagagagcaggacctgagagcattagaactggtggcagcctttcaggccatcttatctgattcctttcttttatatatagggaaactgaggctcagagaagggaaggaaaggctactccccccagaacagagttcagctcttaatagcacttttttttttttttttgagatagcatcttgctctgttgccctggctggattgcagtggctcagtcatggttcactgcagccttgacctcctgggctcaagtgatcctcctgcatcagcctcctgagtagctgagcctacagatgcatgccaccatgaccggctaatttttaatttttttgtaaaggtgggcggtgggggcggtctccctatgttgcccaggctggtctcaaactcctaggctctagcgatcctacagcctcagtctcccaaagtgccaggattacaggctcaagctgccgt

SEQ ID NO: 31151 - DNA, 974 bp, Artificial sequence
  DNA replication origin
cgcactattcaacgtttctcgaccctagtggagtacccggtcccctggagatgttgtgcaggagggtcccctctctagggctgggggctttagggctggggaagaggcaccaggggcagagcctctggaccccacctggagtcctgtagtgagtgcgtttcctccccttcccagcggccccttttccaagagagaacttgcggaggggggagggggtggggggtgaggaaggagcactagggagggagtcggcgggtttgggtcctggttctgtgctgcggtcctgggcaggtgtggtgtgtaacgggaaagggcctgtcacaaagcgtggcaaatgtgctcgtggcagatgcccacgaacgtttgtctccctgtcctctggcctccacctcccctgcaattttcccaaaggcaaaatgatgggttggacaaacgataggaaatgtagccacgttcgctgcgcatggggcaaggtgggggtgggggtggggtttccggggcaccagatcgctctgctcccatctcaaggcccctgcttctggaggcagggttagctccacgtaggcagaggaaacaccccgggtttcttaggattcttgctgtgtgaccttgggaagtccccgcacgcctctggctgcagctgccgcctgtgaaagaaggggctgcacttcctggatggtggaaggttgctaaggtaaccacaaagtgcccgctcagcagcagctgccgtcatcatcatagttattattattagggtttcgtcctgtgccagcatttgacaattctaaccccacctggaggcctgctaagagagcaggcgagggctggtgatcatttagggatgcctaaaatgtttgcagggggagcaggagagaggaaggacaaaggatgttcatgagggtcaaagacctgggtttggggcttctcggggcgagggggtgcggagggagggccccagatcgcgccttctccct

SEQ ID NO: 31152 - DNA, 712 bp, Artificial sequence
  DNA replication origin
tggcgccgagttgagtgttggatcatgtcatttgaaggccatcctaccgaactgtaagctctttcagggcacgggctgcgtcttgtccctttctatgtcccttgtagcctcagcatggggcccggtttcactcaacccaagggtgacccggcatttcaggttcaatgcagagcggcctgacaggcacacttcctgcaatggccacaggatggcagcacagaccgggtttcggcacctaggcgcgcctcccgcacccaccgcactattcaacgtttctcgaccctagtggagtacccggtcccctggagatgttgtgcaggagggtcccctctctagggctgggggctttagggctggggaagaggcaccaggggcagagcctctggaccccacctggagtcctgtagtgagtgcgtttcctccccttcccagcggccccttttccaagagagaacttgcggaggggggagggggtggggggtgaggaaggagcactagggagggagtcggcgggtttgggtcctggttctgtgctgcggtcctgggcaggtgtggtgtgtaacgggaaagggcctgtcacaaagcgtggcaaatgtgctcgtggcagatgcccacgaacgtttgtctccctgtcctctggcctccacctcccctgcaattttcccaaaggcaaaatgatgggttggacaaacgataggaaatgtagccacgt

SEQ ID NO: 31153 - DNA, 886 bp, Artificial sequence
  DNA replication origin
gcgctcagggtccgaccccggggcccaggccttgatcccgctgccctgcgaccctggtcaagtttcccctgcccgagcttacgaaggcccggagcgcttggcaacttcccggaacacgtctccgggcccggaaggccccgctgccccacccgggcccgcgacctttcccatagcttaccgaaagagtggaggttctggatagcggacatacgatacgattccttttcctcggtggaaacggcctgcggaaggcggcggcggcggtggcgggagaaggcgggcaggggggaacggaacgtcgggaagcgagggggctcaagggggaggctgctgaatcctcggcggcggctcagtgactggggcagaggggcggtgcctgtgtttagttatatagccgcgcctctgacgccagcgcgctgccctcacgtcctgaccccacccacagcgtcgtgccccaagcgcccaggcggcgccgcttccaattggtttggaggcggggacatgggatggcgcttgcgcaggaagtctgcggcaggagggcgtcctcttgactctaggagagctgggagggggagggaaagcttgatctgtctcggagcctgcgcagtgcgagtggacggtgtctgggtgccgagaataccggcccaggtttcgagcgcgcctacgcactgtgtcctttggtacgttccaccttcttgaccctgttgcatccctgtcttctcgaaaaggggagtttcatatggtaaatgaacactccttagagaggatttagatgatgagcctcccaaacacgagaaatccccgttgtgtcaaacccacctacctacccaccctactacccacggagtcacagcgggatttagggcggcactttgattaatcaaca

SEQ ID NO: 31154 - DNA, 1108 bp, Artificial sequence
  DNA replication origin
gggccttcgtaagctcgggcaggggaaacttgaccagggtcgcagggcagcgggatcaaggcctgggccccggggtcggaccctgagcgcgaccggaaggagcaggcggtaggtcagcccttgggcgggcccggcgtctcagtggcgcatttactaatggctcctgggcctcctcgggccacacccgcccctcccgtcaccattgcgtcacgtccgttacgtcaccacccgttgtcacggatccggagggaaaggcggtgccagccctaagtggcaagcgggtgcaccaatgggggtgggaggcttagccccgcctcgggagctcgggttccggcgggttgcatcagctgggtggggcaccgcctggcagcccggactcccccgacatgtgatcggcttcccagggagggcgggaggcccgggcgttccccgagcctggggaagctggccgtcccggactgacctgctcggggagagccagcaaaggacacattcggcctggcccaagccctgacgatttcagtgttgttttctgcacgcgcaaaacacctggggaccgaggggatggcagtggcatcctatctttgacagctctgaacgagcttaaccttttttttcagacccctttgctgatgcaagtaagggtgatgacctgcttcctgctggcactgaggattatatccatataagaattcaacagagaaacggcaggaagacccttactactgtccaagggatcgctgatgattacgataaaaagaaactagtgaaggcgtttaagaaagtaggtcttcagtgagattttgggaaagtcataatggatttgtccacaagggggtgccagctgtgttgtatgtattgttagcggaaggggtgataaatgcgttcatgctcttgctaggcctaattcgttttcctttgtgcttgcagaagtttgcctgcaatggtactgtaattgagcatccggaatatggagaagtaattcagctacagggtgaccaacgcaagaacatatgccagttcctcgtagaggtgagttcagtcactacttgatttgtgcctctctgctggcaaatctcagatcctgtctgttagcttctgctgggga

SEQ ID NO: 31155 - DNA, 977 bp, Artificial sequence
  DNA replication origin
ttgagatggagtcacgctctgccacccaggctggagtgcagtggcgcgatctcggctcactgtaacgtctacctcctgggttcaagcgattctcctgtctcagcctcccgagtagctgggattacaggcatgcaccaccacactaggctaatttttgtatttttagtagagatggggtttcaccatgttggtcaggatggtctcgaactcctgaccttcaggagatccgcccgcctcagcctcccaaagtgctgggattacaggtgtgagcggaaaggatttttctgcacccccttttgagagcctctgcctgactggggagaagagaattcagaagggcccatgaaggcatgtgtgagtggtgaatgtagggcaggttttgtaggtgggggtgatacctgtcctggccaccagcccacttaaatctccccagtggcttgatttttagtttccggtggaagcggcttctccccaaggccagggctgtggtgagtgttggggggaggttgagagggaaagaggaggcaggggtcaaagctgtgctgcctcctagcttgggttaggtagaaccatggctgttctgggcttgttcatgtgtaggaagtgggagttgcctgctttgctgggggctggggctatgccaagataaaggggtgctgccctgtggggattggcgagaaacgagagtccgatttaggcctgggctaatgtcctgctggagttgacgaggcagtgctgccaggctgctcttgatggggaactggctgtcctctgctctgaagcccaagagacctgagataggcagctgctgggagggcttttctggtgatggaggtgggggtcatgtgtgctgcctgtcagccagagccttggccctctagggaggagctggtgtcagattgttctccagacctgcctggttctggtgtctctgccaactggacatctgacaccagaatgggcctggatttggggtc

SEQ ID NO: 31156 - DNA, 1267 bp, Artificial sequence
  DNA replication origin
gagatctgagcaaggcggggagggatccggacaggtgcctccggggtcgcgcctcccccggggcccgcgcagctcgcccgacgccgcgtccctgactctcgccctgggctggcgggggagactttgctctgcttcgactgcgtcccagggctcacgctgcagtcaggaatttaccgtttggggaacttgctgccgctggtctctttggggccaccctcaccccaccccacgcgtcatcctcgctttccctccctccctactcccccaggcctgggtggggccctattgtttgcgcccagcttgcccaactgtgggggccgagcgcacattttcccagcgactctggccccacctgccgagcaggtgagcgcacggagtccagaggccctgccctccagctcccagagcctcgtcgatactacctgcggcgcctccctccacgccggtgggagcccggctctggcttcttcagcggaggtgggatggagtgactggggggtgcagggctcggctcagtgtccagctggtgtctggcacccgtggctcgccctggggtctggggggtggggtctgtgcacggatgaagaattcagggtcacctggcccagtttccagtagctgtggctgccagagtgttggtaggggaacaggacccgtcttctctaacctcttattgttggaaaaaatcacccaaaacaaactttgcaggaggaagtattcacagcagctttatctgggggttttcccgtctccttgcccaaaacttcctttaggcttagggggtccttcctggtgcaaaaccccttcccccagccggcccctggctgaacctgggccggtgcctgggctccgaccctgtcttccctgcccccacattcatcctgttcgctgggccccaggggcctgaggtaggggccggggtggggggtggaaagtgctgagaggggaagcagcttcttccttctcttcctgcctcctgggaccaccacaccccctcagacaaggcctgcgtaagtggttgtctctcaagctctgccccctccccaggaatgggggtggggcagggctgggccaaactgaggaaggtggggggagtggttgttcttgtctttttttttttgcctctaccccatcccccacattacttagctggctggttattgaggcagaagcgcatgaggctgtgggacttgccttccatttgatttctgaattgtgaaggtgcatgctttctggaggcctgcacagacctttcccacccgctttc

SEQ ID NO: 31157 - DNA, 946 bp, Artificial sequence
  DNA replication origin
agggtggccccaaagagaccagcggcagcaagttccccaaacggtaaattcctgactgcagcgtgagccctgggacgcagtcgaagcagagcaaagtctcccccgccagcccagggcgagagtcagggacgcggcgtcgggcgagctgcgcgggccccgggggaggcgcgaccccggaggcacctgtccggatccctccccgccttgctcagatctctggttcgcggagctccgaggcgcgctcggcccgaaccgcgcgacccccaagtcgccgcgcccaggaccccagcgcgccccctgccgccggtgcagggtggcgctcgatggcaccggccctcacctgcccagggacggctgggaccggccccgcggccgctcgccacccctctgtccccaacgatacctgcgcccccgatagcccgcacctgagtatggggcctgaccgggccgggtcggggtcgggccggggtgggagccggcgcggacagcgaactgagctcggcgtggtcgggcggcggctgctccggactctggccaaggcagcaactcagtaaccgaacaaaaggcgaagagacctgacagccaagccacgcccctcgccacctcgaagctccgcccctgggggagacgcccaccctctggtgcgagctcactggctatctcgcctgactgtcccgtggaggggcggagcctcgcctccagtcctcttccacggccgcctctgtttatccgcttgccattggccccggggactgccagtcggctctagggatggactctaacttgaggtctcatcctaacattgcatctattggcagatagaaagttacttcctcctgattggacaaggctctgtcagtaagactaaggaaaaaaccaatggaagggatggggtgtgtcttgccccacccttgctctgagcaggtgagactcattactctcccct

SEQ ID NO: 31158 - DNA, 1496 bp, Artificial sequence
  DNA replication origin
cagtacgagggagagagctggcgcgagagcgcgcgctacctggaggcggcgctgcggctgcaccggctcctgcgcgacagcgaggccttctgccacgccaactgcagcggccccgcgcccgcggccaagcccgatcccgacggcggccgcgcagacgagtgggcctgcgagctgcggctcttcggccgcgtcctggagcgagccgcctgcctgcggcgctgcaagcggacgctgcccgccttccaggtgccctacccgccgcggcagctgctgcgtgacttccagagccgcctgccctaccagtacctgcactacgcgctgttcaaggtgggagcccgcccccacccggggacctgtctcgggctgggcgtcgtggctccccacagatcggtcgaaggagcgttatcttcacccaaggcacgaagcccgccgtgcgctcggggccgcgagctccggtcttgctgacccgctcccccaccccctaccccccgaccaggctaaccggctggagaaggcggtggcggcggcctacaccttcctccagaggaacccgaagcacgagctgaccgccaagtatctcaactactatcaggggatgctggacgtcgccgacgagtccctcacggacctagaggcccagccctacgaggtggggtggagggtcaggaggaggcttgtagaggagggctagtagaggaggggagatgttgggggcgccctgactccccctgccacgccccttccaggccgtgttcctccgggctgtgaagctctacaacagcggggatttccgcagcagcacggaggacatggagcgggccttgtcagagtacctggcagtctttgcccggtgcctggccggctgtgaaggggcccatgagcaggtggacttcaaggacttctacccggccatagcaggtatctgccacccagaccacggtgggcggtcctctcacccacagggcccggtaaggcagatgtccccttcatgcacgtggagcactgcgaatgcggaggagccagccgggaggaaggccttgtctgttgagaaagacgctgggtgcaggggccccagctgggagtgtccaaggggctggatcagtgagtagaggcagtgacatccctaaagggtttgggaagcttgggttcataggccttccaggcagagggcagtgcagatgcaaaggtgcagcggtgagaagtaacccagcagatgtgtgcagaaagcagttgataaccagaaattacacctagtcttgggatctctaaccctggggtccctcgagcaggggcagaaaggactgtacttggccaggtgtggtggctcacacctgtaatctcagcactctgggaggccgaggcaggcagatcacgaggtcaggagttcaagaccagcctgaccaacatggtgaaaccccgtctctactgaaagtacaaaaattagctggtcgtggtggcgggcacctgtaatcccagctactcgggaggctgaggca

SEQ ID NO: 31159 - DNA, 1528 bp, Artificial sequence
  DNA replication origin
catcaggtcattacatacagccctggtaactacacaaggcagttcaccttgattatcgagtcctttccgggatgtggagagcttgtgagaaagaaatgggatcctttgagaagtgagggtttggaagtgggggcaggagggtatctttggggagatgggtgtctgggaggccccaggggtgctgtctagggttagagtattgggatgcagagcttaaaagaggcaacaaggaaacaggaccccgggttcaggggacggagtggtgaatccgggggcgcccaaccggggttaccttgaatcaaacttcttgccatcttcaaaagtgccgttgtagtggtagcgcacaaaatcccccatctgcacttcccggggacaggccctggggatgtggtacctctcgatgaccacatcttccagggggcccccggccgggctggcgcggcccagccccctccccacggcctgcaccaccagtagcagcaactgcagcagggggagccggaggaggctgtggctgggggggcccgcggggaacatggtgcctggagttgggaccgccggcagtgagggcgagcgagggagtcgccaccaacctccttccccccgcctcccagaactggctccccctcttcctgtcctctttccctacccccgccctggctggtccacgtggaatgggggctgggaagactgagctggcctggccgggaggagcgggggagggggttgcaataggaggagggggccaggctgagtgtgttagagtctgagggaggcactacaaagaactctaggttccccctccccccatctccatccctggctgcgagacctggggcctggccagggagagaggctcgggaaagatgagaactctgagtggacaccaaaggaaaaaaaaaaaaaaaagttcaatgactttttccggagcccccgggtcctaaagccgggcggagatgaaccttgcttctttcgcgggcacttcgaattctagtcccctccaggtgggtggtgaagccgcggagtgtgagaggcatctccgtgctcatccgtgaccccagctgtactccaagggaaggcatctccagggaagagcagcttggtcccgcaaaagctggactgaaagaaggactttgtgacttgggatgtgacgggcacggagatggagtggggggtggtggcagcgcaaggtgtgcaggtgacagcaggtgtgtgcctccgacgtgggcgggggagacactcggagggtgcaggagggcgcagcgacggaaggcccggctccagggcttccttctcgtatgggcagcgcagaggaggcggccctcactcagtgtcctgatctcaggcgggggcactgtttgcatggggaggggcttcctgggcttcccatctctggcgggaagcgctccccgacgcattctctacctaggggacacccccaaggcaggagcccgggccgacggagaggacttaacgacactatcggaccctctgggaaaagaggggagacgtcgtgacccaggccccg

SEQ ID NO: 31160 - DNA, 1163 bp, Artificial sequence
  DNA replication origin
gccggcccccgcacgccccagaggtacctgtaaccggtctccgccgcccttgcggagggcgcccacgatctcctgcacccgcccaggctgccgcatcaggaccgtggccttcatcagggtgctcacctgtcccgagacccgagagaaccactgacccctgcgccacgctgggcccgaggggagcccggggctcgctcgggcgcgcgtgtgaggcggggccggggtgcgcgagggggcggctactggcctgggtgaagcggcggtgcctcggtgaccagctggggggctcgaagcgccccgggggtcggagtccgggcccgccccactccggacgcttcctccctcctcacctcctctgccatcccgttcgaggcctggtcggcggctcgcgggacaacgacagccccgcgaccgcactgcgcaggcgtcgcctcccgcctggagcccgggcgggggttggtggggccgggggcggggcgggggtggggccgagaatcgagcggtcccggagatggccgcgatccgggtgggcttgccggttgcgctaggcaaactggaggagggttctatttattatgaagagcagggtgaaggtcccaaggtgttggggttacgtgggtaggtagggttctgccactctttgtggaggaaaagccttgccaaacgtggtcatttccaggctgaaagtttgtgacaaaaacatgactggggctgggcgcggtggcccatacctgtaatcccaggactttgggaggccgaggcaggatgatcgcttgagccgaagagttcgagaccagcctgggcaatatgacgaaaccctgtctctacaaaaaatacaaaaattagccgggcatggtgacacgcacctgttgtagtcccagctactcgggaggctgaggcacgaggatcacttgagcccgggagatccaggctccagtaggccgagatcataccactgcactccaccctgggtgacagatgacaccctgtctcagaaacaaaaacagaaaaaccacacggctggatgggaggagagatgaaggagccataaactgaattctgttaatcacccagaaagggctctgttaactaggccattcctcattccagaagaaactgagtgactaacccatccagcgggctgggagacccgggacagcttt

SEQ ID NO: 31161 - DNA, 1606 bp, Artificial sequence
  DNA replication origin
gagcagcggcgccagggcctcttctgcgacattaccctgtgcttcggcggggctggaggccgcgagttccgggcccaccgctcggtactggctgccgccaccgagtacttcacgcccctgctctcgggccagttttccgagtcccgctcgggacgggtggagatgcgcaagtggagctccgagccggggcccgaacccgacacagtggaagccgtaatcgagtacatgtacaccgggcgcatccgcgtcagcacgggcagcgtgcacgaggtgctggagttggccgacaggtaggcgagggaggcgggagcgcggagggcggcgggcgcggagagggggagatgctcgctggcggaggggagggcagtgcctgccacggcagctcgcgagtcctgagtgaatgcattggtttcacactcgctgagcgcctgcttgggggcagccaccgcggtgggcgaggaggatgcaccatcaggtccggcgagggcgccccgcgcccaaggagctcagatactaggtgatgggacaaaagtgatgaaaaggaaagtcagtatgtggtaactgttgtgctgacgttcaaaaggaatgaaaggctagggattgaataaagatctttctgaagaggtgaagtttagatcgacctctgaatgtcaaaaaataactgaccgtgcaaagatggggaatgaatattccagacagcgcaaacgccctcaggcaggatccagtttggcttagagaagagaattaaaatatagtccagtgaggctggatctagtggatgaaggggagaaggatgcgtgagatgcgttggaataaggagtttggatttcactaagtgtgataggaagctgggtaaagaaatagctcatttaaatattttaatattattctgccactgtgttaaacggattgtagggagcaggaatgctccagagactggttagaaggcaggtaataccgtttatagagatggagaggcgtttgttttggcaattatcatcttacagatacattaacaaaaatgcctattgagcgcctattacgcatcagctcagatgcgggattctaaggtgctagggtttcagcagtgatcaaaacagacaaaagtccttttccttatcgcacttaggttggtagatggacggtaaataagtaaaatgtatagcctgttggatgattgttaaatgtatagcctgttggatgattgtcatcactgatgaaaaataaagcatggggggagtacatagaaactgctgggggagaggaagtgttttccaaattgggtggatagagaatgccctatgaagaagacgttttgctaagaaccgaaggaggtaaggtagactgtgtcaggtaggggacacaggtacagaggctctgaggtggagcttgtatgttagagaacagtggggagccagtgtggctgtatcaaagggatgcaggatgagaggaacaggagaagccccaggatggtaatgggcagggatccagatcccgtagggccttgatggcctgtggaaggacatgagcttttactctgattgaaatgggaaggtttggggcagaggaatgatgcagtctgatttgatgaatagtgctgtgctga

SEQ ID NO: 31162 - DNA, 1161 bp, Artificial sequence
  DNA replication origin
cttaatccatttaaccctgagtggacacagcacatgtttcagagagcacagggttggggataaggtcacagatcaacaggatcccaaggcagaagaatttttcttagtacagaacaaaatgaaaagtctcccatgtctacttctttctacacagacacggcaaccatccaatttctcaatcttttccccacctttccccctttctattccacacaaccgccattgtcatcatggctcgctcgcaatgagctgttgggtacacctcccagacagggtggtggccgggcagaggggctcctcacttcccagtaggggcggccgggcagaggcgcccctcacctcccggacggggcggctggccgggcggggggctgacccccccacctccctcccggacggggcggctggccgggcggggggctgacccccatctccctcccggacggggtggctgccgggcgaagacgctcctcacttcccagacggggtggctgccgggcggaggggctcctcacttctcagatggggcggctgccgggcggaggggctcctcacttctcagacggggcggttgccaggcagaggatctcctcatccccacatctcagacgatgggcggccgggcagagacgctcctcacctcctagatgggatggcggccgggaagaggcgctcctcacttcctagatgggatagcggccgggcagagacgctcctcactttccagactgggcagccaggcagaggggctcctcacatcccagactatgggcggccaggcagagacgctcctcacttcccagacggggtggcggccgggcagaggctgcaatctcggcactttgggaggccaaggcaggcggccgggaggtggaggttgtagcgagctgagatcacgccactgcactccagcctgggcaccattgagcactgagtgaacgagactccgtctgcaatcccggcacctcaggaggccgaggctggcggatcactcgtggttaggagctggagaccagcccagccaacacagcgaaaccccgtctccaccaaaaaaatacgaaaaccagtcaggcgtggcggcgcgcgcctgcaatcgcaggcactcggcaggctgaggcaggagaatcaggcagggaggttgcagtgagccgagatggcagc

SEQ ID NO: 31163 - DNA, 902 bp, Artificial sequence
  DNA replication origin
gaggagcgtctctgcccggccgctatcccatctaggaagtgaggagcgcctcttcccggccgccatcccatctaggaggtgaggagcgtctctgcccggccgcccatcgtctgagatgtggggatgaggagatcctctgcctggcaaccgccccgtctgagaagtgaggagcccctccgcccggcagccgccccatctgagaagtgaggagcccctccgcccggcagccaccccgtctgggaagtgaggagcgtcttcgcccggcagccaccccgtccgggagggagatgggggtcagccccccgcccggccagccgccccgtccgggagggaggtgggggggtcagccccccgcccggccagccgccccgtccgggaggtgaggggcgcctctgcccggccgcccctactgggaagtgaggagcccctctgcccggccaccaccctgtctgggaggtgtacccaacagctcattgcgagcgagccatgatgacaatggcggttgtgtggaatagaaagggggaaaggtggggaaaagattgagaaattggatggttgccgtgtctgtgtagaaagaagtagacatgggagacttttcattttgttctgtactaagaaaaattcttctgccttgggatcctgttgatctgtgaccttatccccaaccctgtgctctctgaaacatgtgctgtgtccactcagggttaaatggattaagggcagtgcaaggtgtgctttgttaaacagatgcttgaaggcagcatgctggttaagagtcatcaccactccctaatctcaagtacccacggacacaaacactgcggaaggccccagggtcctctgcctaggaaaaccagagacctttgttcacttatctgctgaccttccctccactattgtcc

SEQ ID NO: 31164 - DNA, 1847 bp, Artificial sequence
  DNA replication origin
accgctggactcccgtgtccctccgcgcaggcgggcggccccggagcgctggtgccggcagaggcggcgacggtggcgcccctcctcatcatggtgagaggccgggcggggccgggcacggggtagcaccagggcgggaaacgagtgtcggggcccctcgggaggaagcgtcttgcaaacgaggacccggggctccgggttcgacttccagttttcttggtactcagggcggccctgaggtctgggagaagcggaggggttttggggtgccggagaggccgctgtaaagggaaacggtggtgtttctcaggagggaactcgggaccgcagaagctgctgcgcctctgggagcctgggtgggcctgggccgggagcccgggagctgctcccgaccccacgcaggcccgcgctggggcagccgcttcggcgccccctccccgggcccagtctcatcacgcggaaccgctgccccgcgcccgggtgcgggcgggaggtggagccagttcagaggaggggaccctttacggtaaaagctgccgtcccttgtggcttctagaagataggaaaacaagtggctccgagaggcgcttctgacacacagcacagcggcgggtagagctggatcctaattgcaggtgccctgtgctgccctgttctggacaggcacaaagaccacgactttgtgggggccgggagagggtagaggaggaggtggcaggcttggtgaaagagggcctttgtccagtgctctcctgccctgccccccaccagcccttctgtgggaccattgtacccgcatgccagacaagagagtattatctgttgcggccattgttgggggaagggaggcagtcttggggtaacccttctccactcccccccttctctgtgcactcagccgtggcagctgtggcttggcccagacacagagacccccacctccaaagaggacgtccttagtaggtgccaagcatataagagtgaggccagtcccagaaccgcaggctcctggcgcgccccgcatgcctccagcacgtttacctttccgaagtggcaggaatggggaaagcgcacgcttaggagagcttcagacaagcttccctcttcctcctccacgaccagaagcggaaaggtgctcccggaccgaaagggaaagaaggtccagcactgccccgcttgggaaggcacccacaaccagtctagggactaggggtaaggccggcggggagcccgcgaatgacctgggctgacatctcttcccctccttacacagaacagaggcttctcccgaaaaagccacacattcctgcccaagatcttcttccgcaagatgtcatcctcaggggccaaggacaagcctgagctgcagtttcccttccttcaggatgaggacacagtggccacgctgctagagtgcaagacgctcttcatcttgcgcggcctgccaggaagcggcaagtccacgctggcacgggtcatcgtggacaagtaccgtgatggcaccaagatggtgtcggctgacgcttacaagatcacccccggcgctcgaggagccttctccgaggagtacaagcggctcgatgaggacctggctgcctactgccgccgccgggacatcagaattcttgtgcttgatgacaccaaccacgaacgggaacggctggagcagctctttgaaatggccgaccagtaccagtaccaggtggtgctggtggagcccaagacggcgtggcggctggactgtgcccagctcaaggagaagaaccagtggcagctgtcggctgatgacctgaagaagctgaagcctgggctggagaaggacttcctgccgctctacttcggctggt

SEQ ID NO: 31165 - DNA, 1018 bp, Artificial sequence
  DNA replication origin
agggggttggggggcagggcagcagagggagggaccctgaagagagcaggcagggcacagcagagcaggctggagaagcgaggccagcaggccagtgggccaattaagggcaaaggccaagactcacctccccttcccagggcctaccccagggtgaggacccagtctgtgtgctttggatgtatgagctgtggatagaggaaggggaagagtcgaggatgatggtcttggggtccttgggctttgtcatcttgttcccagtctgtctgtctgtccattagcacatgagcagcaggaggcacaaagaccgcctggccgggaagacccccaagccctccagccagcacagcaagctgcagaagcacgcagcgctggctgtgagtatcctcaaggtatctgtctccaggcaacagagctgggactgggtcaggaggggagagggtgggctgggagggccagatgggggggctgcggtggggcaggaaaagaggccaccctgcaatgaggctgctgggcagtgacagagctaggcctgggaactgggatctgcgcagaggaatttccggggaggtgggttgggatagtcatcttaggggcaagagtgaggggtgggcgtgcatctcctagagaccatctctatcccgtaaatcctcctcccttctcccatgctgagactttcctccctctggacaggaagacaggtggtggagaaagcccttcggaatgaatgtttgggggtgggaagggaggaggatttaggtttggaactctaaaaggcacgctttccctgcagcaaaaagcttgaggatgggccccagggagggggtggggttttctggggtggagactgtgtccattcctttcttttccgtgtagtctaaactggccttgcagaagcaactcaccaagacgttggcagcccgcttcctgcccagcccgctccccaccgcagccactgccatctgtgctctgccagggcccctggccctccgccctgcccctacagcagccactaccc

SEQ ID NO: 31166 - DNA, 756 bp, Artificial sequence
  DNA replication origin
ggaaggcagctatttgtagtgcagaaaggcctttcataggaggggctggcatgaaaggacagaagctgggaggggaaaccacgtgtggctggagggcgatgtgtgcacagagcagccgtgaggcttacagggagagccaaattgcatgagtgtggagggggtctctgtggcccctgcaaccccttcctgctgctgagagactgccttcttccctctccaggagccaagcaccggtggatgatggaaggtcagcgaggggctccccggaggagccggggccgcccggtgtccaggggaggtgccggacacaaagccaagagagtcacagggggccggggcggccggcaggggcccagccctgccttccactgtgctctctgtcagctccaggtcaattcagagacccaactgaagcaggtgggagaagtgaggctgtgactggggttggagccaggggagggggttggggggcagggcagcagagggagggaccctgaagagagcaggcagggcacagcagagcaggctggagaagcgaggccagcaggccagtgggccaattaagggcaaaggccaagactcacctccccttcccagggcctaccccagggtgaggacccagtctgtgtgctttggatgtatgagctgtggatagaggaaggggaagagtcgaggatgatggtcttggggtccttgggctttgtcatcttgttcccagtctgtctgtctgtccattagcacatgagcagcaggagg

SEQ ID NO: 31167 - DNA, 1152 bp, Artificial sequence
  DNA replication origin
actggcatccatggaccctgacgccagcagcggacgctgcacctaccgcggcgtggagctgctcggttactccgaggctgcggtccggggcttggagtggctccggggatccttcctggactccatgcggaagggcctacaggactcctaccccgggccttcgctggacgccgtggccgccttcgcagcgatcttcgacccccgacgctacccgcaggcgccggaggagctgggcacgcatggcgagggggcgctgcgggtgctgctgcgcggctttgctcctgccgtggtgcgccagcgggcgctgggcgacttcgcgctgtttaagcgcgtagtattcggccttgggcggctcggcccgcgggccctgtgcacccagctggcgtgcgcgcactcggagctgcacgagctcttccccgacttcgccgccctagccgccttggctttggcgctgcccgcgggcgctggcctgctggacaaggtcggccgcagccgggagctgcggtggtgggggcagagtggggccggggaaggccgggggggccacatggtgaagatcgcagtggatgggcccccgctgcacgagtttgacttcgggttggctgtggagttcttagagagtgggtggggagagggcttcctggggtcgcagctcacctgagggtggcctccttccctcggcccatccagcctggggccctgggcactgtaagggccaacctagacttgaccatgctgcacccaagatgatctgctgactgcagcctcccaggggcctgaggccatccacccgcccttctggagcttcccaccaaccccccccaccctgtgggctgtggaggaagggactggctcaagaggggcctgggcgggtgggcagagatgctaggatctggggtaccctaaatcattcctggcctttacacagttagatgaggagtagctcacccttttcccttctggactcggggcaagtttgggtccccccaaagatgggagtttttggcttggggaaggaagactaggtcttggaaattgagtggctgagggaacggacactggtccttggtccttggctgtttctttctttttcttttctttttttttctttttttgagatggagtcttgctctgtcgcccaggctggagtgc

SEQ ID NO: 31168 - DNA, 1682 bp, Artificial sequence
  DNA replication origin
gccacggcgtccagcgaaggcccggggtaggagtcctgtaggcccttccgcatggagtccaggaaggatccccggagccactccaagccccggaccgcagcctcggagtaaccgagcagctccacgccgcggtaggtgcagcgtccgctgctggcgtcagggtccatggatgccagttcctgcaggaagccctggaggcgggccccacctgagccgcgctgagcttggagggaggccgcagccgccatcaccagaggctgcagcaaggccaagtccggctcttctgcctgcaggacaagggagagcttctgcacagagggcagggcatccagcagcaggtgggtgaaggccacgaaggtgaactggcgcagggccagggccagtgaccccgccacaggtgaggcaagggctgcagcctccagggtgggcaccaggccaggccaggcctcggccactgcttccactacaggcagcagggaggcccagggcactggccgaggccctgccaagtcaatagctgcaaggtccagtgctgcccggagctcagggaccaagtgggaactagggccaccatggaggcggaatagggcatccaatatgctctcatattgacccaagtaggccgggggctcaggatctgtccggccagggagacaatgcagctctgccagcagtgggcaagtggcccggagctgtgggcccacactccccaggcgctcactggggaggcttgagctgagccaggccagcttgggtgcagatacgccgaaagcctgcaggatgtccaagagctggccagcagtggcctcgccctcctgtagctccacactgcccaggaaggtggtggcgggctggccatcacagggggacactgaagtggcaaacagggccaggctgtgtgactccggccagtctctggtctcgtccaacaccagccccacatatggggatgccttcaggcgctggcaggcctctgtgtgcaagacactggcaatggccacctgggacagccagggaaagaaagggagggaggactgagttaggcttgtcctgagaggcggaggcaggcagtgcggggtggtggaaagagcccaggccttgaggttagacagacttagggactaatcctggctttgccacttactggctgtgctaccttcggccagtcacttcacctctccgagcctcagttttctcatctctacagctcctggcctgtctaagaatatcctcccaccccggcctcccaccacacccggtctagttttctcagctcttatacctgctgtcagctaataccagcccgaaatcttctcaaagcttgttgtgaattataaacatcaacttttgttgtggtaaaagcactttatgaatcataaagagctctaggaaagctagttttttcactgtgtttttctatagcatcatcctagtctgccctattcctgggggtctccctccactgtccagctcagtgattaactgataggcacactcactcccaactcccaaccagtcaccctgggtcccagctgtgtgctgtttctctatttgtcatctctgtaggatgagatccaactcccccacctccaacccagcccataggacttacacagttagtacctaggacagagctgcaatttgcatgcttccaggggccatgtgagtgatattgagcttgg

SEQ ID NO: 31169 - DNA, 1165 bp, Artificial sequence
  DNA replication origin
gctggggggtggggccggggccgggctgagcgcgctgggcgggaggcgccgcaggtgggcgcggccaggtgagccccgggggcgccgcccgccctgcccgggaccctggccggcgctggctgctggcgcctcttcgcccccgttgccgctagtggctgctgtcgctccgtggagcccaaggagaccgcggccagagcgtccaccgcccaagatggtggctcctgtgtctccgtgagtgcgagcggacggggcgggggcgccaggccgggctggacgccccctcccggagcgggcgggacgggcgggcggaggctcagtgcctctgcgggacccaccgagggctctgtcaccgcgcgccccccagaggaagttcctcagccctccccgtcccagcccccgggaggatgcgtgagaagaggtgcaggggagccccttctcaccagggctgtcagagcagggggcgcccggccctgtctgctgagtgctggacttctcttagtggggtcccaaagcaaggggcccccaggagcccggggaggaggctcgggacccacattctggggccacatgaatactgtttgaggcttacatgccttggggtccttgtcaagttgttcctgctcccatccggctggtcagggtgtggagagaaatgagaggagacctgtgtctgcagcaagtgtgccctcctggtcagccttggtcacaactggacccatggagttttgtttacacctcactccactcagcctgtttccttgaggttgaggtggggagaatgtcaatggaatttgacctgtttatagcagctctgtccaatagaactttctgggatgatgtaaatgtgctgtccaatgcaatagccactagccacattggctactaagcacttgaaaagtgcctagtgtgagctgaatgctaatgttttatttaattctaagtaatttaaacagctgcatttacaatagctgcagtggccagtggctgctgtgttggacagagccgttttagaatctccaccttcctgggctctacctacctgccttttgttctgcagaatgggcaggataggcagcttcgatgtacatggaaaggatctgacaaaattccagaagggcatcaccttgcttttgcacccctctgcccccattctgagatcctgtgc

SEQ ID NO: 31170 - DNA, 1517 bp, Artificial sequence
  DNA replication origin
gtgagaaggggctcccctgcacctcttctcacgcatcctcccgggggctgggacggggagggctgaggaacttcctctggggggcgcgcggtgacagagccctcggtgggtcccgcagaggcactgagcctccgcccgcccgtcccgcccgctccgggagggggcgtccagcccggcctggcgcccccgccccgtccgctcgcactcacggagacacaggagccaccatcttgggcggtggacgctctggccgcggtctccttgggctccacggagcgacagcagccactagcggcaacgggggcgaagaggcgccagcagccagcgccggccagggtcccgggcagggcgggcggcgcccccggggctcacctggccgcgcccacctgcggcgcctcccgcccagcgcgctcagcccggccccggccccaccccccagcccctgccgccccacgcgcggcagcaggagccagaggctagaccgcaggcagcgcggtgccggggttcattcggtccgcgcatgtatccggggttcctcgaggggctcacagcctaagccacagacaggtagagcgcggtagaggctgcaaagtgttctgagagtttggaagcaagtgctttgggatcacgaaggagcgggcgaccagctgaaggtctgcagggcgggtcaattagggttcgcagcattctgggtaagtgaacttttactaggggaagggcactccaggccgtgggatggcagagcaaggattcctctggaagttgacaggtcgctgcaggttcatgaagaattggggtgggtgggggcagtgcctgatgctggatggctctaggggaatgctggggattttgaccttcccacctggtgggaagcctcctccggaggagttggaactgggaagcttattgttttagcctagtgagttatttgcagtggggttgacagagtggggaagagggagggaggttggcgtgacctttttctaaaactctgatacacagccgaccctcatcccggtctgcgttactctgagaggtgaattgaggagcttccctgcaagaggaatgtgcagacgtggaggtgtggagtccagaggcctgggatggagctccagttatatttaactctgaggccttggactggacacttagctatgagcctgtttcctcatctgtaaagtgggaattacaacttggggaggaggctagggcaggacagaaatgggtctgaagaccaaatgaggtgctaggtgtggaggccattcagagagggggctggcctgctgctgtggatcaagggcatgtccagacaatgacccagtctccccttccagacagcacaaagtcacccagaaatgccttccagtcccctcacaattgggtacgctgctcttctgcaaaaggcctagggtgcatgttgatttgaggtcccagccccaccagtggctgctgggaactcctctgccccagcatcctccatgcagcactgctctgtgccacccaccgtctgcctctga

SEQ ID NO: 31171 - DNA, 2492 bp, Artificial sequence
  DNA replication origin
ctgacagggggtgggggaaggcagccagtttggggtccccttccctgagctctgggacaccttgggagccctcaggtacgctgggcctggtcagccggggtaggcgggatactcacccgtgcgcgcagctcttcagccaggagagcctccgagtctcccctctcttcctcccacccggggagccccaccgctgagcccctctcccgccaaggctgtcctgggccggcgggggcggcgcggctcctggcacctgctcccgtcgggccgcccgggggcgggctcggagacgctgtggctgtcccgggagagcgcggggccgggagctgcgactcaggaccgccccgggtggccgcgagcggctggacgcagccgggtttgtccggagcgctctccaggtaggcgcgggcgccggactcgggcccgcactccccgccgcccatcccggacccacgcgccgcgggggcagagccggcgggagggggcccgccgcgtgctcagcacttaggtggttctgcagggctgggggcagcggcggagacccttcttgcctggtgaccgggaaagaaccgcaacttaaccggaaactgaggtcgcgaggaggacaccaagggtgatggcaagaaggacttccagctcccattagggggagagagggagtacagggtgagactccccctctactcccacccaccctaaggagaggaccattctccggagatagggggcgcgaccagataacccaccgtcttttcttaagaagtttagagaatccaaaagttgatccacccctatcaacactgagatggaatagaagggaaggggtaggggagggaagagcaacaattatcttttggggggtgcaaaaagtactcctgctcccccaccctccacctcattcacagtcattggaggacttcctgtcccgccccttcctacccccaacgtgcagaatgtctcagcttcagcaaggggcatgggggggcccctggccagaacactctgcccccacccacaactcaggaacagtcccaggagctcccaaccctcctccttctggcttccaggacttaggctcctgccctgacttggacgtggtgactagtggaaagcagggagtggggtttgagggagctccccttctgggtcctatgggattgggcagggagagcaggagagcaggcaggagataaacccgggctgtgccaggatcctgagccctggtgctcctaggagggggcatggggccggcgggtctcctctgcctgctgagtgtgaacagggcaataggtcagatttcctgggctttgcctggcagcagaggcaaggacagggggtatggagacaaccatcccaccttacaagcagctgctctgtgttgccactatggaccctgcaaggagagatgcaggttagacagcaagaaggacttccttcctgagggtaggggtctttgggggagtgtcagtggccagcagagccagcccctgtctttgggggtgtcaggagggactgaggccctctggaggatgcagacaactgggggtgaggacagagcagaccagggaggggaggcggtgggggacagtgacttcatctctggaccatactgctccttcacctcctgtgccctctctccctcccttggagctggagtgttggctttcagcagctcactcctgaaatctccagcacccagaaggccccaggggaaggcgacaggcttcctctgtcaccacttcagatgggaagacagacatggtgccttgggtgtgtccagcggaacccctcacctggcacctggagcagctgttgcctagcccccgggcctcctgttctggcaaagcaggggtgtatgtgctggggtctggcgcaggtgactcctctggatcctctgaggggatctcagggtgtggccctgggtgaccccagctccctgggcccatggaatagctgggatgggtgccactctgtggtggccacaccactaaagagggctgtttccccttcctcgccctggggaggtgtcagtgctgggagagggcagtggggaggtggcagggtggagaagccaaaatgctcattgacggcccctcagggacactcagcgggtacccaggcccaggagggcttgcactctgctaggacaggaacagatgaggcttctcttcttccaggtgcttctctctgcagctgggctggtagggagggccaggatcccacactcctgcctgtgaccccatgaatgactgggatggggcctgccagggtcctcaccccctgcctttgcctcatagaatggaggagacctggccctacctacttgcctctctttgtgatgctgagcctcagttgcctcatgtgtcaagcctcgcaggattgttctgaggattcatggaggcgatgtttctgttgtgctccagggacaacaggcgcttgccaccaggtgcacccaccctgcctttctcccaggctaaggcagaatcatatacctt

SEQ ID NO: 31172 - DNA, 1838 bp, Artificial sequence
  DNA replication origin
ggtgggtgggagtagagggggagtctcaccctgtactccctctctccccctaatgggagctggaagtccttcttgccatcacccttggtgtcctcctcgcgacctcagtttccggttaagttgcggttctttcccggtcaccaggcaagaagggtctccgccgctgcccccagccctgcagaaccacctaagtgctgagcacgcggcgggccccctcccgccggctctgcccccgcggcgcgtgggtccgggatgggcggcggggagtgcgggcccgagtccggcgcccgcgcctacctggagagcgctccggacaaacccggctgcgtccagccgctcgcggccacccggggcggtcctgagtcgcagctcccggccccgcgctctcccgggacagccacagcgtctccgagcccgcccccgggcggcccgacgggagcaggtgccaggagccgcgccgcccccgccggcccaggacagccttggcgggagaggggctcagcggtggggctccccgggtgggaggaagagaggggagactcggaggctctcctggctgaagagctgcgcgcacgggtgagtatcccgcctaccccggctgaccaggcccagcgtacctgagggctcccaaggtgtcccagagctcagggaaggggaccccaaactggctgccttcccccaccccctgtcagcaccaccttccgcccccggccgctacctctggcaagcaggcccctcttttgcaaggaaactcagggagtgggaggaagttgacattcatggaccacctgctgggtgccagggggatcacactgaaacctcagaaccactctgcccagagcggtgcagttccccattttacagaccaggaaaagaaagattggggacttaggtaggcacggtggctcacgcctgtaatcccagcactttgggaggtcgaggcaggcggatcacttgaggtcaggagttcgagaccagcgtggccaacatggtgaaaccctgtctctataaaagtacaaaaattagccgggggtagtggcacgcctgtaatcccagctactcaggaggctaagatgggagaatcgcttgaacctgggaagtggaggttgcagtgagtcaaaaccaccccattgcactccagcctgggtaagaaaagtgaaacttcgtctcaaaaaaaaaaaggttgtggaccttaagtaactggtccaaagtcacacaggaagtgggcaccaaatgggagactccaggctgctcctaggcactgtctctggaggtcaggggagacagccagagtctgctggggagacttcaccagtgtgtgtggctgagagtcctttctgattcctcccagggaatcaaagcacagggtccagcacacagtgggcacacacaggggcatggagccaaccaggaagagcaggaggcaggggctggtggcacgacctcctaagagcactgtcaccattctgttgttggagaagcaataacagggcaagagagcaagaaagagccaaggaaagcggacacagagggctcttgcagccaaagaagaagtggcggtgccatttacctgcctggcactggggcaggcctactggggaccaggccacacagagaggaggccccatggtggggagcctcagggatgcctcacccacggtgccaccaagtctcctagcacttcctggttcaccaaccaccaactcacccctgccttgggccttgcccctgctctcccctcagtctggaacatcctcccaacattcacagagatacctccttgtcactcaggccccagctcaaatgttacctccccaggagcccctttccccagcttc

SEQ ID NO: 31173 - DNA, 1126 bp, Artificial sequence
  DNA replication origin
aggggactcaggccaggagaggtttctgagctttcttcttcgtgtgaggggtctttatatgaagtcaccctctccagggcatctgggcgaggctgtctgaagcggggaattcccacccaccccccgcaccccctggagtcctaacttcccagccttcagaactcgagctccgggccctccctgtggctcagatgctctcccgggacttcccacctgaatgagcccgcgcaccccaccggcggggcctcgagggaggggccggcccggctccccctcccagccccgcccctgccccgccgggccccgcccctcccagccagccccacacgcagcgttcccagccaggcgagagcaggtggccgcggcgggctccgtctctgccccgcaggtaagacggcgacgcgggctagtccacgccgaggacctcgagggcagcgcgggagaacgaggcagcctcttccacctgtccggtcctctcgcctcaaaattgggggaccccaagggacagtgaggatatccctatctcggctctgagcgccgacgttgggcatctgctgggcgggactgaactctggggcagttagagggtcctggctggttatccctgatgccaggcgggctccaaaggatggaaaagaaagagccgggcattagacacgcagctttctggagtggggcaggttggggatggtgaggacgggggtccggagtaaggaacctcgttgactgagagtgcgccatgcctcatccaagggcagcctcttccccaccctagggggtgatggcttgacccaaactgggcttctgttccgtgggctaatgaggtaaaagccgccgcatagctgagctggggcctgggattttctaatgagccccagggcacctgcatcatttatttacatctgggtacaagggggtgagcaggggattaccccgatggcctagggaacccggaaagtctgggaactcagtagatcttttctgtgtctgtgtcacagagccggctggggaaggtgatcgcagatgtggccttattgcagacaggggagcatttgcaccctcagtgttgggatttgggctgtaggaaaggggtcctgcctcccaggacctcgaggaagccttcctg

SEQ ID NO: 31174 - DNA, 978 bp, Artificial sequence
  DNA replication origin
ccaacctgccccactccagaaagctgcgtgtctaatgcccggctctttcttttccatcctttggagcccgcctggcatcagggataaccagccaggaccctctaactgccccagagttcagtcccgcccagcagatgcccaacgtcggcgctcagagccgagatagggatatcctcactgtcccttggggtcccccaattttgaggcgagaggaccggacaggtggaagaggctgcctcgttctcccgcgctgccctcgaggtcctcggcgtggactagcccgcgtcgccgtcttacctgcggggcagagacggagcccgccgcggccacctgctctcgcctggctgggaacgctgcgtgtggggctggctgggaggggcggggcccggcggggcaggggcggggctgggagggggagccgggccggcccctccctcgaggccccgccggtggggtgcgcgggctcattcaggtgggaagtcccgggagagcatctgagccacagggagggcccggagctcgagttctgaaggctgggaagttaggactccagggggtgcggggggtgggtgggaattccccgcttcagacagcctcgcccagatgccctggagagggtgacttcatataaagacccctcacacgaagaagaaagctcagaaacctctcctggcctgagtccccttccatctgagctcttcgggcctggcagggttgggtgtgagacgggacactcctctaaagtaagggtgccctctccagggctcagctgtgtaggggtttaggccgctgagggggccattaggcaaccagaccatctttatcctcagcccatctccctccctgccacacagcccctcctccgcccccagcgccagcccaggtcccccagctgtcactgtttagccctggaatgacaggcgtcctgactccgtgagtctagccacattcaaggcctttgagcttagcacccctgag

SEQ ID NO: 31175 - DNA, 907 bp, Artificial sequence
  DNA replication origin
agcctcgcccagatgccctggagagggtgacttcatataaagacccctcacacgaagaagaaagctcagaaacctctcctggcctgagtccccttccatctgagctcttcgggcctggcagggttgggtgtgagacgggacactcctctaaagtaagggtgccctctccagggctcagctgtgtaggggtttaggccgctgagggggccattaggcaaccagaccatctttatcctcagcccatctccctccctgccacacagcccctcctccgcccccagcgccagcccaggtcccccagctgtcactgtttagccctggaatgacaggcgtcctgactccgtgagtctagccacattcaaggcctttgagcttagcacccctgagcccctgccccctccctctgcccccagtcgctaattttattgacctgtaaaaggcacgttgctggcaggcagtatactaactgaaggcaaagtggggagcggatgggcaactctccccccgggaaggcagctggagatgggacaggagggaggaggaaggagactcctggatccagggccaaggacactttgagaggaggaagaggggggccttgggaaagagaagtacactgtctatgggagatggtagccaaaaagacgggaacgggaatttcagccctcaatcagacaagaggcctacagaaaaaagaaaatgctgggagaagacagggtgcatttctcatctacctggggacagaaccaagaatgtagcaggagggaaggaggttggacggcaggaaggactgccatcctgctctcaaatctctgccctagccccctcccttcctcttgaaggtgtctcctgcctgctgggccttgtactacagaaatagccctttccctgatgaagcaacctagat

SEQ ID NO: 31176 - DNA, 1056 bp, Artificial sequence
  DNA replication origin
cagtagaggaggctggaggaactggggggccagtagaggaggctagaggaactggggggccagtagagcaggctggaggaactgggggactcttcgggatgagtcaggagtgggcagctgacctgggacctttccagggacagtttgaaccctcacagtgccccaggaggaggttcaggagcaggaggtggcaagtggcacgtgctactcctctggtgctcccaggtgagggacgacagaagttgggaaatacttatggatggactgggtcatgaccatccaccccccagggtttctccaaggacatcaaggtgcccaagagccgctacctgggctacatcaaggactacgagggagcgacgctgatggagtgtgagctgaatccccgcatcccctacacggagctgtcccacatcatcaagaagcagaaagaggtggtgtgcacacatgcgcatctgtgggatttttcatgaatgggcatgcagagggcgagcacacgtgtgtagacctgttctacgtctacatgcatatatgtgtgtgagtgaggaggggcaggccaggatcttggctcttgctctgctcccttggggaagttatgaggggaggtgctggattaggtggcgttgcagctgggtgggtgcagccagtggctccgactgtggccctgggaggggttgttgttggggctggagttggcccctcagtcccttccttccctcagatcatcaagaagctgattgagcgcaaacaggcccagatccgcaaggtctacccggggctcagctgcttcaaggagggcgtgaggcagatccctgtggagagcgttcctggcattcgtaagcaggggtctcagttgcagggtagtgggggcacgatgcttggggtgtggactggcattcttagagacattctcccacttcccactttgcaggagagacaggctggaagccattggggaaggagaaggggtgagtgtcaaaggagccgggttgggggtggggcagagggacttggagcctcagacttggtgtctctcgccccaggaaggagctgaag

SEQ ID NO: 31177 - DNA, 1513 bp, Artificial sequence
  DNA replication origin
gcagtgaggggaaggcgcgggaagactacaactcccgtcatgcgccgcgcagcaacgcctgcgcactgagcgctggttgcccatgcggccctagggctgggagcgcggcgccgctctccgctgcgggggaggccatggcggaaccttcccaggccccgaccccggccccggctgcgcagccccggccccttcagtccccagcccctgccccaactccgactcctgcacccagcccggcttcagccccgattccgactcccaccccggcaccagcccctgccccagctgcagccccagccggcagcacagggactggggggcccggggtaggaagtgggggggccgggagcgggggggatccggctcgacctggcctgagccagcagcagcgcgccagtcagaggaaggcgcaagtccgggggctgccgcgcgccaagaagcttgagaagctaggggtcttctcggcttgcaaggtgggggcggggcctggggtgaaggggcggggcttggggcatcccagggctctggtgggaatggggtcaaagctctggctgcggagcggctcttgccccagaggtataggtcattgactgatccttccacctccaggccaatgaaacctgtaagtgtaatggctggaaaaaccccaagccccccactgcaccccgcatggatctgcagcagccagctgccaacctgagtgagctgtgccgcagttgtgagcaccccttgggtaaggcaggcagcgcccttggagctgggggcaggtgctgggtcctgcttggacagggtgacaagtgccacaaagcttcatctctgaaaaaatcaaagatgcctcgaaggagggattgggttgggggggggtgtgcaccaaggggggagaaaggaaatctctcagcccagaacaggcccaggcaacccaacggttgatatcggagcagtcagtctcactgttggtcacactggttggaggaacagagtgtgtatcttgcttggctgtgaagagggtcaagaagccttgttgatttcttctatcaatttttcctaactctgccatctgtcttgcagctgaccacgtatcccacttggagaatgtgtcagaggatgagataaaccgactgctggggatggtggtggatgtggagaatctcttcatgtctgttcacaaggaagaggacacagacaccaagcaggtctatttctacctcttcaaggtgagcttccactaaaggagggtgtgagtgaaggaggtggggccttgaggggttgtctgcagctctgcccccctcccctctatgcccccttcctcttctctctagctactgcggaaatgcatcctgcagatgacccggcctgtggtggaggggtccctgggcagccctccatttgagaaacctaatattgagcaggtgagataggggaattggagatagcggataggagaattggggacagcttggaggagtggggagcctgtgttctccattctcctcaagctgagaacactggggag

SEQ ID NO: 31178 - DNA, 921 bp, Artificial sequence
  DNA replication origin
atgccccaagccccgccccttcaccccaggccccgcccccaccttgcaagccgagaagacccctagcttctcaagcttcttggcgcgcggcagcccccggacttgcgccttcctctgactggcgcgctgctgctggctcaggccaggtcgagccggatcccccccgctcccggcccccccacttcctaccccgggccccccagtccctgtgctgccggctggggctgcagctggggcaggggctggtgccggggtgggagtcggaatcggggctgaagccgggctgggtgcaggagtcggagttggggcaggggctggggactgaaggggccggggctgcgcagccggggccggggtcggggcctgggaaggttccgccatggcctcccccgcagcggagagcggcgccgcgctcccagccctagggccgcatgggcaaccagcgctcagtgcgcaggcgttgctgcgcggcgcatgacgggagttgtagtcttcccgcgccttcccctcactgcctccagcttccagacttttctgtcctgtctcttggcccctgacagccaagtgaggcctgagtgaaggccccacattgacccctcttcacttgtaatctcttttaatggagtccgggagagtcacgatggctgtcctcttggggacaaggagtcttggggagaatcgtggggtctgcctctttcacgcgcctgtctcccacttaaccccctcccccaactcccgcacaggccctgccccacgcggctccggacacggaattgcagctgcggtagagatgagatgtagcaacagttctgcagtagtgtggtggtgacttgggtgtgttctcctcctgacattcacctgcacctttttctgcgcttttcagtatgtatgtatttaatagtatcactcaacaaaaaggag

SEQ ID NO: 31179 - DNA, 1358 bp, Artificial sequence
  DNA replication origin
cgtggggttgtgggtggtcagggagaggtagggtggatgacccaggaaggccgccctcccctggctctgtctaggaacaatccttgccccaggcctggtccttagaaggcaagacagcccccttccagctgggggatcaatctgctgttggctgcgccagggtgcggctccctcgggtctggcctggtcgtggatccagttccttcacagctgcggcctccccgggtccattaacgaaggtggggaagggcggagaaagggtcggagtctgggaggagagcagctgcgggcgcgccagggcgctgacagtctggctcttggaggtaagatgggcgtggctgatcccgaactccgcctgcgtttgcagaagcgaagggaaccgagcgagcggagctgagctcgggtaggccgcgcgaggtccctcctctccgggcgtccgtgcgcctagctctgcgctgggagcctcgcgccctttgacagcagttagttgctgactcggatgcagagagtcggtaacaccttctccaacgagagccgggtggcatcccggtgtcccagcgtgggccttgctgaacggaaccgggtggccacaatgccggtgcggctgctcagggacagtccagcggctcaggaggacaatgaccatgccagagacggtttccaaatgaagctggatgcccacggcttcgccccggaggaactggtggtgcaggtggatggccaatggctgatggtgaccggacagcagcaactggacgtcagggacccggaaagggtcagttaccgcatgtcacagaaggtgcaccggaaaatgctcccgtccaacctgagtcctaccgccatgacctgctgcctgaccccctccgggcagctgtgggtcagaggccagtgtgtggcgctggccctccctgaagcccaaacaggaccgtccccgagactcgggagcctcggctctaaggcttccaacctgacccggtaaacaaacgacgcgatgtgcagcagccttggtgtccgttgtcttttctggggatggaagtcagaggtagagggactggaggcacaggaggcaggaaaggcaccctcaaggtggtggtccaccaagaatcaggcctctgcgggcagatcacttgaggccaggagttcgagaccagcctggccaacatggtgaaaccccatctctactaaaaacacaaaaattaggcgtggtggtgtgtgcttgtaatcccagctgctcgggaggctgagcaagagaatcgtttgaacctgggaggtggagggaggttgcagtgagccaagatcctgccactgcactccagcctgggccacagagtgagactctgtctcaaaaaaaaaaaaaa

SEQ ID NO: 31180 - DNA, 1375 bp, Artificial sequence
  DNA replication origin
catcccctcctctgcaaggaagtcgagtgagcaccttcctcttctaccacagagtcctgttcttgtctgtcatggtatttagcatctggaattgtttatctgtgtacagaggtgtctccctgctagacttactccaagagcgtgggccaggtctgttttatctgtgtattcccaggatggcacctggcacatggtaggcccctactacatatgggatggatggacaggtggatgggcagatggatgacggggttgaagtccactgttggcccttacctgtagggggcgcctgggagcggggccttggcagttcaggcctcctgctgaatcggaatgaaggggcctcagctgtgctgccagagtcctcaatgccatccactatcctgggaacagggcagtgctcatcagcaccatggggtgagggtaagggccagagcagagcagacagagggggactgggggcagcagtgccagggggcggagcaagagcagcagtcaaagtgggttggggttgcaagctgtggttggaagggtgcggtgggcacacgggcagagacggaatgtagcactgtttggaacgccagggatagagcccagagaaggttctggaagccaataggggttttgggaaagcaggggaggctggcgtctcaccggggactgaggtccggaggtccaaaggttcccagtgggggaatgagaagctgagggggcttccaggcagcagagcacctgggggggccgtgaggggaggcactgtggccctggccagccagggcaggggacagggatggggataaggaaggagaggagacaagggctgagaatgggggcagctcctcgcccaaaaggctgaccagggagccccgaggccgtgctgggctgaggttgggcagcaggaggggccgtcggggcctgggaccacccccaggctccgcgccactctcggcctctgtgatggatggcagcgtcttgtctgaggaggagccgaggctttctgagcggggctgcgggcagagggggcagctgatgtcgcaggacagtgaacaacagaccccttcattaagtaagagccttcgccggcggatgcagctccccatccatggaaagggggatgctgctacccatctcaccctctccccagggcaattcaaccccacccaggaagtgggtgttacctgggagaggcgaggggatcgggaaaagcggctgaggccctgtggggacataggagagttcaagctgattcctgccttcccgcggccatagcgcagaccctccctgtcccacccaacagtgttatggggttgagaatgtggagtcttttgtggagctgagtcagaaactataaccctaactcaaacaaacactgcat

SEQ ID NO: 31181 - DNA, 896 bp, Artificial sequence
  DNA replication origin
ccaggcatggcatgcatgcctgtcatcccagctacttgggaggctgaggcaggagaatcacttgaacccgggaggcggaggttgcagtgagctgagatggcgccactacactccaggctgggtgacagagccagactgtctcaaaaaaaaacaaaaacgaaaacaagaccgggcattgtggctcatgcctgtaatcccagcactttgggaggccgaggtgggtggatcacctgaggtcaggagttcaagaccagcctggccaacatggtgaaacgctatctctactaaaaatacaaaaattagcagggtgtggtggtacacacctgtaatcccagctactcggaaggctgaggcaggagaattgctccaacccaggaggcagaggttgtgatgagccaagatcgcgccactgcactccagcctgggcgacagagtaagacttcgtctcaaaaaaaaaaaacaaaacccaaaaaaacaaaaacaaaaacaaagggagggtcctttgaaggagtcaggagtctggggtggggctgaggggtggtcagcaggagatggggcagtagagttgggagtagatggcgatgagagacggccaggggcctgggtgatggccagtgtagtgtcagcggggttggaaggtatgaagcaggtaaggggcaatggaggagggtgcctgggcttcaggcatgtgtttttagggtggagggaggttcatgggactctcaggctggggaggtctgctttggaggaagggactctggaaggatggcggtcatcaggggtgtacatacactggtgtcagagccctggcgcaggttgaaggtgaggtcccggggcaggccagcccggaaggcagccccatactcaggatagagcctcaggacctcagccagccc

SEQ ID NO: 31182 - DNA, 1138 bp, Artificial sequence
  DNA replication origin
atggggcagtagagttgggagtagatggcgatgagagacggccaggggcctgggtgatggccagtgtagtgtcagcggggttggaaggtatgaagcaggtaaggggcaatggaggagggtgcctgggcttcaggcatgtgtttttagggtggagggaggttcatgggactctcaggctggggaggtctgctttggaggaagggactctggaaggatggcggtcatcaggggtgtacatacactggtgtcagagccctggcgcaggttgaaggtgaggtcccggggcaggccagcccggaaggcagccccatactcaggatagagcctcaggacctcagccagccctcggctgctcagctgctgcaggccacagtaggtcagagctttcacatcagcactggtctttagcacgaagtttgggtctgctcccaacccaggctcctgccccggctcagggatatctgctccaatcaggtcccccttccctgtaggtaagggatggggacagtcagctggggcagtgagaacgaaaggatatcagctggaggtgctcagtggatttgaggggtggtcagtgtgtttgaaggatggttgaaggtgggccagtcaatgggattggtggaaataaccaatggaattgggaaaaggtcagtgcagaatgactggtaaggctgggagacagtcagtgggagtgagtagggccagaggaacgatcagtggaattgggtgataaaaatcacaatggccggaggggtcaggtcagttagagggtaaaagtgaatggagtttagggtcactggggaaaggtcaatggggttgggaagtggagcaatgggaaaggatcaattgagctgggggacagtcaccgggaagggttgatgggttgagggatgcccaaggggattagggggaattgtctaaaggcgatggtcgtagggcggagggaccgagagagtactcctcagcaggaactgtaggtatccacgaggggtatcccattccctagaatcctggccattcccaagtcctcagtgggggttgcggggggtggttccagggtaggtagtagagggtgacggtgtccttacccaggatggccagcaccatgttgtctcggagcacctcaagcgagccggag

SEQ ID NO: 31183 - DNA, 850 bp, Artificial sequence
  DNA replication origin
cgtaatacacctgcttcagcctcccaatttgctgggattacaggcgtgcaccaccacagccggccaaattcttgtttctttgcacttgaataagggaatgaaagagctcagggcccagctgatgcgactctcccttctgccaacatttcctgagtgcctgctttgggccagccttggtgctgggcacagagagcttagagatgatgacacttagccctggccctcagggagacccagagtattgagggaggcagaaagatgaacagagagtgccgcgctgaatggggctgtaaaggagggatgtcggtgccttcaggtcctcattgtgcctgggtggggaggagtcaaggaaggtggcaatgccaggtagaaatggccttagggacacaggccagaagtgatggcacaaaagagcagagtgagcgctttagggaactgaaagcggctcaataagcccgcaggaatgggcatgtgagtgctgcggagggagaaggcagggcaggaaggcacgacatgggctgggaggcagcaggcccagctcagggatggcctagaatttagattttatcctgcttaatgtttagactggggagtggtgtggggatcttggagggaatgggttggtgaggtatctctgaggatgggatctgtgggacgtggtaatctcctgctggttgcaagagaggagctcagagtgactcccagttttctggcttaggccaagggtggggatggaggcataacagggggaagatgggctttgggatgaaggtgagagtcccgggtcagaccaagaggagggtatagtgcctgggggaggtccagagagaggctgcccggtaggtagatg

SEQ ID NO: 31184 - DNA, 1572 bp, Artificial sequence
  DNA replication origin
cccgcgaggtggagccacaaggagcagccagggaaccacgtgtggaggcgtggccagcctggaagagggcgggtctgttattcaagccccgcccatcatttcaggcctcccctcccggtgggcgtgccccgaattctctccccgagagacacgcgtgggccgctcccctctgggaggagggctgcccagaggggtgcgggtgtcgctagcggcccctccccgtgtggggccacgtggcgggtgcgggccgagcccgaggggaagaacctggcccgtggggaggtgggggggaccgaaacggcgctgagccgagccgagagctacggggttcggagcagaggcagcggcagcggcagcggcagtaagagggaggggaggaggcaggagggcgcatggggcgccccggcccctccgacagcgcgccccctccggcccggccgcgctgaaagctccccagcgccgcgccttgaacccacgccccggggccatgccggtcatgaaggggttgctggccccgcaaaacaccttcctggacaccatcgccacccgttttgacggaacgcgtgagtgggacggaggtcggggcttgaggttcgagctggggggcaagtatcctcggggccgtctcggatctcctggacatggtgagacccgaggcgaggggagagaatggaggtgcgggtctaggaactcccaaagccgcggtgcaggaacagggcggggagtgccctgcgaggggaggaggggaaagggccgagagcacgggggccaaggttagggggtgtgactcgaggcagaagaggctctttgtgcggcagagcggaggagggtccttcggagccgcccactctcgggcagagctgtgctgggggcgtgtatgggggtatccgagacacagaagtggggcaaagtggccgggcattctggggtctactcacagactccagctcccactacctccagaaaaaaaggagaaaagatcagacttcagcaggacctagtttggattgaggtcgcgcgcccccaaatcgtggggcgtcagtgtctaaggtgggtgaggcaggaggaggggagcggtctgtgcgacggtgggaactcccagctcgcccaacgtagcttgggtttcaggttcagcaccttggacagccacatcactcctcccccgcctcttctcccgccattccctcttcccactctggaacccagagattccccgccctcacctcccccaaccccgccattccctcgggaaccctggccgggatctggatggtgggggagcggtacccgagggcggaaactgagccgccgggccctaccctcttccccaccaccttgtttccatagcgcccatcaccggggcaacaggccctgggatggaagaaggaggctgtgcccagagcccagtgcctcccaggcaccttcagtgtccccatcagcctccctgcccccagacagtcatccctcctagagcaccaggactggttgtgtcacaggccccatctcttagctgagtctctgtccctggatggcccacaggagtccccctggcctcccacccattggagctgg

SEQ ID NO: 31185 - DNA, 1645 bp, Artificial sequence
  DNA replication origin
atccgagacggccccgaggatacttgccccccagctcgaacctcaagccccgacctccgtcccactcacgcgttccgtcaaaacgggtggcgatggtgtccaggaaggtgttttgcggggccagcaaccccttcatgaccggcatggccccggggcgtgggttcaaggcgcggcgctggggagctttcagcgcggccgggccggagggggcgcgctgtcggaggggccggggcgccccatgcgccctcctgcctcctcccctccctcttactgccgctgccgctgccgctgcctctgctccgaaccccgtagctctcggctcggctcagcgccgtttcggtcccccccacctccccacgggccaggttcttcccctcgggctcggcccgcacccgccacgtggccccacacggggaggggccgctagcgacacccgcacccctctgggcagccctcctcccagaggggagcggcccacgcgtgtctctcggggagagaattcggggcacgcccaccgggaggggaggcctgaaatgatgggcggggcttgaataacagacccgccctcttccaggctggccacgcctccacacgtggttccctggctgctccttgtggctccacctcgcgggttttcccgcgcggcgtccacgctgggctggtgtctggttcacagtgccgcctactggagttgacatatttcgcagcacccacaggccagtagctccagcgtgagacagcaagggttaagaggctagtttgctggtagagaatggacaatgggaaggcttgaaaccccaactctagaaagcaccattcttacctcctgcctcagttttcccaagacaccctggcgaactctgcctactgagacacagcatggtggaatgaaaagagctttggagtccaccaggtagagtcccagctctagacaccaatcgtgtgatatcctctccaagcccactttcctcatctgtaaaatggagctgataattcttacctgatgcagttaccgtgagaatgtaataccataatgcatgtctttggtacaaaataagtgtcttgaagggcagttgcctgcctgttttccctcttcctactgtcttaatcctcctctctgctgcccttcaagtggaagagaggctggaggcaagtttgggagaaactacctctgaaaaagatagtttcgaggtgggcagagtcatggcttgcaaatctccaaggatgcacatgtgaactttgacctctaacttctccaagatggaaccagtacagcagcaagagggaccaaagtgagactagacacaggactttctcactacctatgcagaaaattgaggcagctgagttctgtggctgagggtggctgcttcccacgacaaaacagctgaagcagtgaaagtgggaaccctatgggcaaggagggcaggctaaattctccccaccctctgagctaggtattatctgggatgttagattgctaagaagtgccacatttttctgtgtctctacttttgttgttgttgttgttcttgttgttcttgttcttgttgtttttgagacggagtcttgctctgttgcccaggctggagtgcagtggcatgacctcagctcactgcaacctctgcctcctgggttcaagcaa

SEQ ID NO: 31186 - DNA, 1029 bp, Artificial sequence
  DNA replication origin
agacccccccagcgccctgtctccgtctccctaggtctcctgggccgccgtgacgctactgctgctgctgctgctgctgccgcccgcgctgttgtcgtccggggcggctgcacagcccctgcccgactgctgtcgtcaaaagacttgctcttgccgcctctacgagctgctgcacggcgcgggcaatcacgcggccggcatcctcacgctgggcaagcggaggtccgggcccccgggcctccagggtcggctgcagcgcctcctgcaggccagcggcaaccacgccgcgggcatcctgaccatgggccgccgcgcaggcgcagagccagcgccgcgcccctgcctcgggcgccgctgttccgccccggccgccgcctccgtcgcgcccggaggacagtccgggatctgagtcgttcttcgggccctgtcctggcccaggcctctgccctctgcccacccagcgtcagcccccagaaaaaaggcaataaagacgagtctccattcgtgtgactggtctctgttcctgtgcggtcgcgtcctgcccatccggggtggcaaagcgtcttgcggaggacagctgggcctggaagcccggctgtcgggcaccagccttagcttttgcgtggttgaatcggaaacactcttggttggggagttcccagtgcaaggccctggggcacagagagaactgcacaggtgcatgcttggatcgggccatgcgggactcctacgatgctctgctaggcattctgtagcggggactttacccagagacgcggaaggggaaggaaagcaagaaaggttgcagcggtcgggcgcggtgctcacgcctgtaatcccagcactttgggaggccaaagcaggaggatcccttgaagcaaggagttcgagacgagcctaggcaacatagtgagtgagacatctctccaaaaagtttttttaattagcggggtatggtgggcgagaggattgcttgagcccaggagtttgagtttgagccataattgggccactgcactccagcctggg

SEQ ID NO: 31187 - DNA, 1005 bp, Artificial sequence
  DNA replication origin
cggatgggcaggacgcgaccgcacaggaacagagaccagtcacacgaatggagactcgtctttattgccttttttctgggggctgacgctgggtgggcagagggcagaggcctgggccaggacagggcccgaagaacgactcagatcccggactgtcctccgggcgcgacggaggcggcggccggggcggaacagcggcgcccgaggcaggggcgcggcgctggctctgcgcctgcgcggcggcccatggtcaggatgcccgcggcgtggttgccgctggcctgcaggaggcgctgcagccgaccctggaggcccgggggcccggacctccgcttgcccagcgtgaggatgccggccgcgtgattgcccgcgccgtgcagcagctcgtagaggcggcaagagcaagtcttttgacgacagcagtcgggcaggggctgtgcagccgccccggacgacaacagcgcgggcggcagcagcagcagcagcagcagtagcgtcacggcggcccaggagacctagggagacggagacagggcgctgggggggtcttcccacggcgcccgccaccagctcccacgcccaggacctgcccctctggctccgcgccccctccaagcctgcactcctttctggctgtcacttagttctccttgctttgcgcccttgctggtatcggcctactttccctgctcctccttcaagacccagcagagcatctcccccaggaagccttttgagaccccctgggcagagtgaatcccccttttctctggagacttaggccactgtgccaccactagggcacttgccactccacctgaaaacaggagtgtctgtctgcagcagaagttgtaaacttgggaaaaacccgggccctactgagtccccccaacttcctctccacagcagggaaacacatggaaatcaggaactagcaagactccagaatgctctctcatctgcctgcccccttgcaggagtgactgaactccgttgctttgaacc

SEQ ID NO: 31188 - DNA, 1466 bp, Artificial sequence
  DNA replication origin
cgggttgccagcggcgcgcgtccctgggcctccgcgcgtgagcggcgcgcgcgcccccgcgggccccggcgggaggagagtcggcggccggagccgtcaccccgggcggggacccagcgcaggcaactccgcgcggcggcccggccgagggagggagcgagcgggcgggcgggcaagccagacagctgggccggagcagccgcgggcgcccgaggggccgagcgaggtaggagctgcggggcgagccctgggcccggggccgggggagccaggccggggagccagcccgggcggggcccgcgctccagccgctcagccgcccgtcagggccgcgccgccgccatcactcccgggccgcggtggttgcgcgctgggcgaggggcgcgcgcggggagagggggtccgggttggctgccggggaggctgagggcaatgcggggtgcgcgagggggacttgcgaacgccgcggcgccgcggggggcgtgcgctttaaaggctgcgtgcgcgtgtgctgagtgggtgtgtggggaccccgcgccgaccccataggagctcagggggctgctgtcagccgcctcacaccttcacgttgcaattccgaatatccccagccgtcttccttgctttaacttctttctttcaaaagaggttcccgggactccggggatgggatgagcctgcgggggtgcctggtgcggtggggggtattagcaaagcttcaagaaacagggccttataaggaatcaagacaacaaatacgaacgtttcgataagactctggggggcgggatcccacatcaggacccgccaggcctgggctcgtgcgtgtggccgtgggatgcagtgtgctttttctttctagtcagggataaagggttaaaagtgctcctggtgtcggggggtagatatggagagtcggaaggggagttgtatcacaaaagctggtctgaggctaaaggaatctggcaagatggtcggggtgaacaaagaggaaagaactcacacggagcaagaggcggttgcaaacacttgtagccagcagtgatggaaaagccaaagaagaaaaccaagtgtcagcttttagaaagacgggattaatgaaaagcacaagaattttaaagactaaaagagataccgattctctctttgccaaagagccagagtcagttcttttcttcttggtccctgtgatcccgccatacctcgtatcaaataaatagtgccaaaagtgggtcaaagaatgttagagctggaaaggaacccagcgatgatgccattcttttattgtacaaatgaggaaactgaggcccagataggtggagtaagtggcctgctcaggtgacacggctgtttgttgagtatccagggattgaaacttcaaggactctgagattcgtgctcttcccaaagcatcgtgcagtatacagatctttgcctagatacaattccatacattttctctgcag

SEQ ID NO: 31189 - DNA, 1786 bp, Artificial sequence
  DNA replication origin
ttgtatttttagtagagacagggtttcaacatattggccaggctggtctggaacacctgacctcgtgatccaccgaccttggcttcccaaagtgctgggactacaggcgtgagccaccgtgcccggcctacaaataattttaaaaaattaatctgggagtagtggtgcacgtctgtggtcccagttactcataaggctgaggcaggaggattgcttgagcccaggaggttgccttgagctgtgattgtgccaccacaccatgagacctttttctgtgagactgtctccaaaaaataaaaataaaaaaaaatcatcacacccttgacctcccaggctcaagtgatcctcccaccttagcctcctcagtagctgggaccacaggtgtgtgtcgccacaccgggctagaccctgtcctcttaatgactgcatagtccttgtaacctccatttgcattcctagagcatagcatttgttccaaaaatatttattgagtgtctgttctgggcttgaacacgagtaggaggatttaaaagtgaatagcatattgcgtctgcccttggggacagagacagaaacatgaaaacatgaaattgtccttcaacacaagaagtgctgtaatagaggcatgaataacgcggtgggaaacaaggagggaggtcatgctgcctgaagcaaatgtcaccgaagggcagacatcaagaaggcaggacattccaggcagagggaatagcatgtgtgcagggatgaaagctcacaagaaagagaaacatgagtcaggtgcggtggctgatgcctgtaatcccagcactttgggaggctgaggcgggcagattacgaggtcaggagttcgagaccagcctggccaacatggtgaaaccccgtctctactacaaaaatacaaaaattagccggatgtggtggtgtgcgcctgtaatcccagctactcaggaggctgaggaaggagaatcacttgaacccaggaggtggaggttgccgtgagctgagaccgcaccatttcactccagcctgggcaacagagagagactccgtctcaaaaaaaaaaaaaaagaaaagaaaaagaaaagataaaagagaaatatggagaacatggagcacctgagtgtcaaaacatcatgggcagtaactgtcagggagattgccagagagctcggggttggttggcgcatccatcctgcttcctgcttccttctctggcctccaagctccctgaacctactctgtgcaaagcactgtgccaggtgttggcccagagtatgggactgcagcagtggcctgggtagcggagaagggttttttgaccagctggagacctttgtggctggtgtcattctggaggtgaagagaaggccgctggaaagagctgcccagggaggactatgggagaacttgcagctctgggccatctctggacatgaacgttttgcatacacacaggggagctctgtgtgtctgagtgggggcgggaggggtccttctctctcttttggcccctgcagcttggcttctggagctttcctatgtcttgctttagtgctagcccttggagggttgccagggaaaccgctggccagctccgggagatagacgtagcagaggaaaggagagtgggtgactcagcctggcttcccacaaccgcaaccccctcctcagcacgtggaaaggatctgggggacccccttcccctggatcctacagatgaccctgtttattctttcttctctagagagagcagtccctcccgcagctctgactggtgggagccagc

SEQ ID NO: 31190 - DNA, 1172 bp, Artificial sequence
  DNA replication origin
cgggtgccggaggtgccggggcggcagtagagtgtcccctctcggcgcgccgccgaggacgcgccaccgggtcacccacctggtggggccgcaccgtccggcagccgggccggctctgcgccccgcggctctcgctcccggccggggttcctggcggcggcggcagcggcggctgttactacaggaaggagcggagagcagcgatttcctcctcaaaggtcagctgcctgcgatagaccatacacagcgcgcgagcccgcgccagcagccctcccagccccgcttgctccctccctgcctcgccctcagtcgccggctcccctgcaagtgcgcaacagcggcggccgttcccggcgggcggcgccgggcgtgggggctgccccgacggcggggtcccccgggagtcccagcaggccctcggcggcggctcccagggagcgtcccggaaccggggcgggtcagaatagccgggggaatgtggttgtcgggcgttgccgggaaatcccgggctctggaaatcccaaacctgggcctcagttttctcatccgcaaaaagggaggagggaaaagtggaccaattggcgacgccttccagctctggcgcgtgtcatcttttgagcccctagattaaaaaataaatgtgtggggtgtgtgtgtgcacgcgcgtgtgtgcgcatgtgtgtcttgggggccacaggttttgtgacctcagagacaaaactgtagagaggggaagaactggggattctagtgaagccaagatcacccccaccaccgcagcacctccctccttcttttactccggccatctaaactcaaccctgacggaggaactggaaagaatcttggcagtcatgtgtttcagccctccccctctccacaattttgcaggtaagaaatggaagtcctgagagggaaaggggcttgcccggggccacccagggccacacagtaggcacgtggcctcaccagccgactgtgatccataaactagccagcgcccccgttcacccagcctagttacttatgaggctggttctaccttcagaaaagtccagggagggaccgtcttgagtcctcctaacttcgaaactctctacaggccttgccacagcagtgaatatcctgtctagagcctcagtccccctctccaagaggccccttcccacgag

SEQ ID NO: 31191 - DNA, 964 bp, Artificial sequence
  DNA replication origin
gggactcccgggggaccccgccgtcggggcagcccccacgcccggcgccgcccgccgggaacggccgccgctgttgcgcacttgcaggggagccggcgactgagggcgaggcagggagggagcaagcggggctgggagggctgctggcgcgggctcgcgcgctgtgtatggtctatcgcaggcagctgacctttgaggaggaaatcgctgctctccgctccttcctgtagtaacagccgccgctgccgccgccgccaggaaccccggccgggagcgagagccgcggggcgcagagccggcccggctgccggacggtgcggccccaccaggtgggtgacccggtggcgcgtcctcggcggcgcgccgagaggggacactctactgccgccccggcacctccggcacccggagctcgacggccgggcgcagcgcggggatcagtccccggcactgcgagggagttggcccagcgcagacgagggacggggggacgtggggacaggggtcggggatgaaaggcagaggccagggagggcgccgtcctggcacgcctcggagagggagcacctgtcgggctggacccggggaggcactagtgcacagatgggggagcagccgaagaggggagcgcccaagtcctcagccctgtctcctgaacagccccagccacgtgcccgaaaagccctagccgtcgagtgggagccgtcgtggcgctggcctaacttcgggttggaatatctccccttcccagaaaccgggcccgaggtgggctgggggatccttgcagccctctccagggggcctgtgggcctcccgccgtcaagtttctctttcagtttctggccgtccccctcactagggaagctccggtggggcgaggggagaggaagacggggagggcacctgcctctgcagagcaccttcccctccccttcagcgggttccttgttggaggggatgggcg

SEQ ID NO: 31192 - DNA, 1959 bp, Artificial sequence
  DNA replication origin
aagtcctcagccctgtctcctgaacagccccagccacgtgcccgaaaagccctagccgtcgagtgggagccgtcgtggcgctggcctaacttcgggttggaatatctccccttcccagaaaccgggcccgaggtgggctgggggatccttgcagccctctccagggggcctgtgggcctcccgccgtcaagtttctctttcagtttctggccgtccccctcactagggaagctccggtggggcgaggggagaggaagacggggagggcacctgcctctgcagagcaccttcccctccccttcagcgggttccttgttggaggggatgggcggccctccactcctcaccatctctgttcccgcacaggaaagctatctgtgggaggggaggggcctggcctggccgcggtccagggataggtaggcatggcaaggccaggggcaggcccggttccttggcctctgcagaggagagcgcttcagcgctcggctcgccctaggtgaacggccatggcgggctggatccaggcccagcagctgcagggagacgcgctgcgccagatgcaggtgctgtacggccagcacttccccatcgaggtccggcactacttggcccagtggattgagagccagccatggtaggcacgtcccgccctgcccctcctcagagggtccctaccatccaggccctttggcctctagttttactcatggtggtttggtgtgactctggtcctgcctgtccttctttgtgcggaaggggtggtgcccctgggaaaggggaagcctgggaggacagagaatgtttttagactcggatgtctgtggagctgctgggaacaagtcttgtgggccctggagtgccctcggtcatgagcctggggtttccactttattccagctccctgacctccttgcccaaggaggtgccacagtaggtttttctcttctgccctgccccaagggatgccattgacttggacaatccccaggacagagcccaagccacccagctcctggagggcctggtgcaggagctgcagaagaaggcggagcaccaggtgggggaagatgggtttttactgaagatcaagctggggcactacgccacgcagctccaggtgggtgtaggctctgggccacctacggggaggaagcatcatcttgttccagcatcagaacccctgggttttttcctggcctggccactgactcaccatgtgaccacgaacttattgggaacttttcttcgatttcccccaccccctctttctaaattcgacctgtcggatttctttagcatattgcaaagcaagggtgggaggtgtttgttgccaacagagagagatgggtgaactggccttatggaagcagcagaagggatggagggagactgagtcaggattcctatgttggagaagggaagaccagcagactctagaaatgaggccaccagacctccctcttggggtcttttaaaggtgagagaggagccatcccagagacaagagctggacacaagggctttgaattgagggtttagaaataagatgtagcttctttacttgaggggagtgggtatggaggaagagagggagtttttgtggaagcaggaaaggggtgtgggtagtgatgacagtcaagcacttattggaactcacgtatgtttcctagagagcccttcaatacagacagcagggtgccagggaaatacaagtccatcccagaagagggggaaaacaggagaagcctgaggggaagcaatataggaggccaggggcaggatggtgggaagtaccttgaccttggcatcagatgccctgagtctggagtcatctgctctctcacttggttgcgtctggacgagtacataatgtctgagcatcagttttctcatctgtgaaatggggatcatagtttctgcttatgtcctagagtttccatgctgttagtgccttga

SEQ ID NO: 31193 - DNA, 1219 bp, Artificial sequence
  DNA replication origin
ttttacacataaggaaacttgagcatcagagaggctcaatcattttcccaagatcacacagttagtactagagtgaggacttgaccctgctatgtctagcttcaaaatgctctgttttcctggctgatctcactcctcctggacttgggcctaaccagagctctggatcctttgcccgccagccctccaggagtccagcctggggccaagtccccagttcttcccctgcggaccccatgagaacaccacctacttctgtgggtacatgttatagggagcctgggggcacacagctggggagggggcctggtccatgtacgtggcgctgctgcccccagcatctgcagatgcattcacaaacctgcagaaggaagagaacagagcttcagccaccagggaggccggggcagctgacttggggaggggaccgaggggcatgtttgtctttctcggggtgtagacggacaaagtgccccactcggccctggggctccagctacaggagaggggactccctccccagggctgagacaggttccctgggggagcggaaagctgggcccaggatcaggatgggaggcagggtctgggggaggaggaaagaggcagaaggagagccacagccacctggacacttactcagggaccacttgcttgatctgtggtttcacatatccatcaacagctttagctgtcaagggaagaacagtggtgagaaccaaagtctctgggaactcccaagtggggtggaagcccacgccccatgtagtctccctcctgctcacatcaccttgtgttctcagctgggatgagatttcccaaggacccccaataaacaccagctgatgaatcctgcctgagggtcactgagacccctggcttgaatcccattccttctggttctttttctggccatctgatttccctctccctgctcccacccctgtcaaagaatgagaatcaacaagcaaacccaaccaatggatttggggcagctggaagaagagagacttctcccttttgctgcctgcactccactcgggggaaggtttgtgagcagggtgtggagagcagctggtgaggtggggagcggagcactatctgtgggctcgaatgatcccggccactccctacagtgctgccaccccttcctccgagggtgcagaagtgagaatccatgcagctttcactttgcagagaagagagctgggacgggttt

SEQ ID NO: 31194 - DNA, 1108 bp, Artificial sequence
  DNA replication origin
cctctgccggagaaacaggtgaagggggtgcagggtggggccgttggggaggcctggggacccgggggctccgcagcggcagggggcctctgggaccttggggatgttgtgatggacgctgcagtggggccgggagagatgaagagacgcggagggtcgccctgagggaagactcttcgggatgacaggagcgggcctcggaagggactcggggcgctggagggaagtttcgttcttcggagaaacagaacgcgctcgagggggcaccgtggggcgagggcgcactcggttgcggcggcaggagtgagggacagtcccccgatttcctgctccctggggccctggggacgttccggccaccggagcgactgtcacgccgacggggatcaccggcgcgagtggggggtcggaaagcgcctcctccccgcccggtcggcggctcccgctgagccacttcctccgcttgccctgttcccgctccttcaggagacagctgtgcccttttggaggcaggaataggtgtgtctgtcgcctgcagccttacgggctggctggtcgtgggtaggctttattgcataagaatcaagtttcctgtagggaaattgacagaccggtactctttctaaattccctcgcatctttttctaggttaaattatgctccccccacgtccccgccttgtaaaaaagagaaaaaaagacaaaataaaatccccatcaacccgtcaagccagctctagagagagaaataaacctcttgacattgtccttttccaaatacctggtaaagtcggccagaagataaataattgagccattgcatttactggattgtggtgttgcttaattgcataggacggaatgaaccaattgagagtgggagttttctgtctcagagccaagatcttgggtaaatgcagaggagagggaaacaaagacaggctggccttgaaaaaaccatgtgtgcaaactttacatgcatttggggggtgtggttgcactgaagttaacaagattcaaaccgtcgcccaagttggtatttccatgtttggtacacatcactctgtgccatatcaggtcgttgttaagtgtggtgacaaaatcagtgg

SEQ ID NO: 31195 - DNA, 2428 bp, Artificial sequence
  DNA replication origin
gacgaggcggtggaggttgaggaggttattgaggagtcccgcgcagagcgtatcaagcgcagcggcctgcggcgcgtggacgacttcaagaaggccttctccaaggagaagatggagaagaccaaggtgcgtacccgcgagaacctggagaagacgcgcctcaagaccaaggaaaacctggagaagacgcggcacaccctggagaagcgcatgaacaagctgggcacgcgcctggtgcccgccgagcggcgcgagaaactgaagacgtcgcgggacaagttgcgcaaatccttcacgcccgaccacgtggtgtacgcgcgctccaagaccgcggtctacaaggtgccacccttcaccttccacgtcaagaagatccgcgagggccaggtggaagtgctcaaggccaccgagatggtggaggtgggcgccgacgacgacgagggcggcgcggagcgcggggaggccggcgacctgcggcgcgggagcagccccgacgtgcacgcgctgctggagatcaccgaggagtcggacgccgtgctggtggacaagagcgacagcgactgagccgcccccgctgccacccaccccattcctcgctccttccgaacttcctctttcgcattctctctcggctcgagctggctgagatttttctaaattgaaaacacgcccccctccccacacctccaggaactccactcccagtcttagagctgttaggacccgatggggaggcagcccccgcagtggacaacccccgcttggacacagtccgagtggaatgggaagggaatggtcaatccctgtcctggttgtccaagtcgggatctcagaggaaattgcagtgattccacggttaggcccccctgggggggctgccttcccctcagcctctccccacaccacccacccagctgctgtcattccgctcactgagctcttcttcattctcaccctgatccctgggggactcaaagccaaaactgcccaaagaggaaagattgaatcctaaaggggatccctgcccccatgggaggccccctactagaaggacgtgaaagcagcttttgggggaaactgaggcagtggggaagacagagcagaatgagccctcaccctggctgggggtccagcacaggctgtatctgcagagggtcccagaggaacgctggagccaagagaagccctgggaaggaggggtggggaacgacatgcatgtgagggatggcacactgatgtgtttatgcacctgtacacaggagcgcatggccatggctttggaaaggagaatggaaaaatagaagaaggtcggccgggcttggtggcttatgcctgtaaccccagcactttgggaggccgaggtgggcggatcacctgaagtcaggagttcgggaccagcctggcaaacaccccatctctactaagcgaaaacccatctctactaaaattacaaaaattagctgggcatggttgcgcatgcctgtaatcccagctactttggaggctgaggtggggagaattgcttgaacctgggaggtggaggttgcagtgagccaaggtcgcgacactgcactccagcctgggtgacagagtgagactccatctcaacagaaggaaaaaaaaggaaaataggagaaggtggaaatgggtgaagagagaagtcccctcactagctgcatgagaaatctatcttactgtggttctccatgggcagcaggaccatttttcagaatcaagagggaggacagtgtgagaaggcgatgatccaaagaagacagagaggtcagccccacccgatccctcaaatgggctcttggaggcacccccaggggcagcccatttctcaaagtccagaaaattagggtcccagaagggggcagcagcaggctgggagttaggagggagagcagggtgccggccctgccaccaagttgagagctggaggggaggtggggagagaacatcacagagcagccagccctggttcactcctggcagtttcttctcaagctccttccctaggagcatggtggcacgtgcctgtggtctcagctacttgggaggctgaggcgggaggatcgccagagcccaggagtttgaggctgcagtgagctatgagggtgcctctgtgctccatcctaggcaacagagtgatacgctgtttaaaaaggaaaaaatccttccctagagctagtatcctaaagctgcagagctagcccagacctcattggtttccttgtccttggggtgcttttcctgaatctttgcgggtgaagggagtgttgctcccagtccagaggcctgattctgtttggactgggttctcaagacacgaccaggttctcaagacacgagtccccttgttcctccccattaaagggggtttgtcagaagcaagaacagcccctctccccagtcacagcctgaa

SEQ ID NO: 31196 - DNA, 1393 bp, Artificial sequence
  DNA replication origin
ccctcgcgatcgttggggtccgctgtaagcggacactggctgcggggcccgggcctggggcctctgcgcctgcgggcctgatatagcgggtgattcagggctcaggcacgcaccagcgggggctgtgccaagcggggaacgcgaccgccaacctcctccccagaccctgcgcccccgcgcccccacatcggcctcggcggcccacccctgtcccctcgctgctctctgctcctggccaccaggcattttcaggcccttgaggacaccctcacccgcggcgcgctggcaccctgggcctcctggaagcgggcggggctgggcggggaagagtgggcgtcaggagtgcaagaggggctggtggagtgggtggacagcccctgcggggtccggcggtctgggcgcagtctgggcgaggtgaatcaccccgcatgcctgcgggggcgggggccaggcgcagcagcgcagccggcgggaggaggctggcgcccccaccccccggctccgcccggggccacttgttgctttctttgcagctctccccattcttcacacttggataaaaatgtagcttttggatcataacccccaataaacctgggagtctcgggtttctatgctgctcctctccacgccgcttccgcagtgccatcggggatgagattttgggctgggcggcaagtgttccagcctggctcctccccgcctcccaaaggcctgctgatgctcctaaccccagggaggcgggatcgtgtggggcaggggggttagtctatgctcccctctccccttcctctccctgctgaagggaatggaaagaaagggaaggctggatttcccacaccctccaagttagaagacccctttccgggagttgtggctctgctgactgctctggggcctggtcgagccgggttctgagtgaccatctggggtgaggcgagggggtccttggcttggtttccccaggaggagttaagatagatgcaaatcaggacaagtatctgggaagagtagagacagaaaggtgggtcagctggtacctatctgaggtggtgggacagaggcagaagtggcacttgtccccctccccacccttacccacggatgacagactcctcccaggaggcatatacgtggcttttaaaagctttacttcccctacttaagcactatttagatagaaaatgtttgcccagagctatttccacttagtctaactgcttggaggacgcaggatgagaggggggcttttgacgttttttaagagacctgcttagtactggggacattgagaggagcggaacaagacaggggtctgggacagcaagccagctctatatttcctccagagcctggtgtggccgagagccaccatgaagagctcgaggggtga

SEQ ID NO: 31197 - DNA, 1585 bp, Artificial sequence
  DNA replication origin
ggcgccgcagcagctcggcctcgttgacctccagcttcttgatctgccccgcctggcgctccaggctgccgcgcacggtcttcacgttgacgctgaccttgcgcaccttctccagcagcttgctcaccgtattgctcgtggtggcgtgcgccttgcccagcttgctcagctcgccctggatgctctgcactgcgccctccatctccgcctgccgctcctccagctgtgcttgagtcagctggatctggtctacggccccgatgattttgtccaggaggctcagcaccagcacgccgttcacctggtccgacttgatcagctcttctgagccggcccccgacggctcctccgctgcctgagccccagcggaggaaggctccggggcctcggcgtcggggtacccgggaagcggccgctcgacaatatagagcgtggggtcctccatggctacccggagccgtgcgggaccggccgggtggggctggagctggagcgggagacccggagagaagcaggagcggaagggaggagagctagcgggcgagagcggagagcagaggaaactcgagccacgtccgtgcgcaccgggacagcggccagaactgctgggcgggggatcggtgagctccccagctcccgggccaaactccggagtctgatcgctgattggctggccccaccccagaaagggagggaccggggcagaaggggagatcgacgaggcggggcggcggagggggacccaagagccgagcgccccacccttcccgggatggttggaatagttggagcgggagactagggcctccgctggcggcgggagcgggacgggcggaggaatgcgagctgaggaacggaatcaggttctaagagtgttgctctctgtttccctctcacttgaattgctcatccgaaaatcctcaagatctgggagccgggtggaccaggagattctgaaattataggcaaaatcttgtatttgcctttacctagattttgagcacaaaaggacccttgccctttacaatattttctaagaggcctctcggatttcctcatcaccaaccccaaccaggttactaactcaggggtaagcttagggggttgtttgtggggggcggggggagaaagagagaacgtatttggggtcacggtggtggtgaagggctgcgaagctcctctaagttctttttagaattgccctaacagagtagaattaagatgggcaatcaaacggaaaataaagcccacctcccaacccccctttctgagacagggtgtcactctgtcacccaggctggagtgcagcggtctgatcacagttcactgcagcctcgacctcttgggctcaggcaatcctcccacttcagcctcctgagtagatgagactataggcgcttgccaccacgcccagctaatttcaatttttatttttttcaatttttatttttttaagagacggggtgtacactattttgaccaggctggtctcgaactcctgagctcaagtgatctgctggtttcagcctctcaaagtgctgggagccaccgcgcctggtgtaaagccctttttaaaagcccacct

SEQ ID NO: 31198 - DNA, 1250 bp, Artificial sequence
  DNA replication origin
atccatttaaccctgagtggacacagcacatgtttcagagagcacagggttgggggtaaggtcatagatcaacaggatcccaaggcagaagaatttttcttagtacagaacaaaatgaaaagtctcccatgtctacttttttctacacagacacagcaaccatccgatttctcaatcttttccccacctttcccccttttctattccacaaaaccgccattgtcatcatggcccgttctcaatgagctgttgggtacacctcccagacggggtggtggccgggcagagggactcctcacttcccagtaggggcggctgggcagaggtgccccccacctcccggatggggcggctggccgggtggggtctgaccccccacctccctcccggacggggtggctggccgggcgggggctgaccccccacctccctcccagacgggatggctgccgggcggagacgctcctcacttcccagacggggtggctgccgggtggagggggctcctcacttctcagagggggcggctgccgggcggaggggctcctcacttctcagacggggcggctgggcagagacgctcctcacctcccagacggggtcacggccgggcagaggcgctcctcacatcccagacggggcggcggggcagaggtgctccccacatctcagacgatgggcagccgggcagagacgctcctcacttcctagatgggatggcggccaggaagaggtgctcctcacttcctagatgggatggcggccgggcagagaagctcctcactttccagactgggcagccaggcagaggggctcctcacatcccagacaatgggcagccaggcagagacgctcctcacttcccagacgggttggcggccgggcagaggctgcaatctcggcactttgggaggccaaggcaggcggctgggaggtggaggttgtagcgagccgagatcacgccactgcactccagccagggcaccattgagcactgagtgaacgagactccgtctgcaatcccggctcctcgggaggccgaggctggcggatcactctcggttaggagctggagaccagcccagccaacacagcgaaaccccgtctccaccaaaaaaatacgaaaacctgtcaggcgtggcggcgcgcgcctgcaatcccaggcactcggcaggctgaggcaggagaatcaggcagggaggttgcagtgagccgagatggcagcagtacagtccagcttcggctcggcc

SEQ ID NO: 31199 - DNA, 876 bp, Artificial sequence
  DNA replication origin
agtgaggagcacctcttcctggccgccatcccatctaggaagtgaggagcgtctctgcccggctgcccatcgtctgagatgtggggagcacctctgccccgccgccccgtctgggatgtgaggagcgcctctgcccggccgtgaccccgtctgggaggtgaggagcgtctctgcccagccgccccgtctgagaagtgaggagcccctccgcccggcagccgccccctctgagaagtgaggagccccctccacccggcagccaccccgtctgggaagtgaggagcgtctccgcccggcagccatcccgtctgggagggaggtggggggtcagcccccgcccggccagccaccccgtccgggagggaggtggggggtcagaccccacccggccagccgccccatccgggaggtggggggcacctctgcccagccgcccctactgggaagtgaggagtccctctgcccggccaccaccccgtctgggaggtgtacccaacagctcattgagaacgggccatgatgacaatggcggttttgtggaatagaaaagggggaaaggtggggaaaagattgagaaatcggatggttgctgtgtctgtgtagaaaaaagtagacatgggagacttttcattttgttctgtactaagaaaaattcttctgccttgggatcctgttgatctatgaccttacccccaaccctgtgctctctgaaacatgtgctgtgtccactcagggttaaatggattaagggcggtgcaagatgtttttgttaaacagatgcttgaaggcagcatgctcattaagagtcatcaccactccctaatctcaagtacccagggacacaaacactgcggaaggccgcagggtcctctgcct

SEQ ID NO: 31200 - DNA, 1403 bp, Artificial sequence
  DNA replication origin
tacctgttgggcgtggcctcggtcagctcccccggcacggctggcagtggccgcggcaggcgcagctgagagccggaccaggccacgtggcagccacagaagtcgcgcaggtagcggtgcagccccgcggcggccgccacgcccgtggagccgcgcacccgcacgcgcgccgcgccgccgccgcccaggctgtaggtgtccaagcccggcttggcagccagagcgcgctccaccgacacggagaagtcggccgcggggcctggccccagcagccgggccacgagcgcccgcacggccgccgcctcccgggcctcgtcgcctgccgcgcccccggccccggccaggagaaggacccccaccgccgcggccaccgccaccgcctccatggtctcagtcctgcgggtcccgcgacggccagggggtggggcggcccgcgtccaatcagctgccggcctccggccacgtggacccgaaggctaagcccgggctcagggccaggagtcgcggcttccgggtaccaggatactcccttgggggcgtctcgtgaccgcacgcggtggggagcgtgtgaccccggctccagggccgaaggggacccgctggccctcacagagcgccttcgggtaaaacgcgctttcacacgcaaataacttccatccaaccatctaataaatacacatttggagtttattttgtatcaggcactgccatagctacttccctactgatgaacgagaagacggtccctaccgtccccgtcagggaggtgacctagaaaccagatatttaacgtaagtaaggatttccatcatagttgtgatgctgcgaagtagtgcagtaagtagcgaagtagcgaagtaaggtttccaaaggaagtgacttttaatctgaaactcagggatgaataggaattggctagaagagggaaaggaagagccttccagacagaagaaatgcatttattgaaggccctgagaaggcagagagcttgcagatttgagtaactaacaggctaggaggttcgaggagggatggggccatgtgagcccaggccggcggtggagcagggctggcgggcacgttaaaggctgtccattggcggcagcagcagcaacataacaggagctgtcattttgtcagaagtttccaaccagagcgactccatcttgaacaggggctgggtaaaatgaggcagagacctgctgggctgaattcccaggaggttaggccttcgtcacaggatgagacaggaggtcagcacaagataaaaggtcacaagaccccgctgataaaacagaatgcagcaaagaaactggtcaaaacctgccaaaaccaagacaggaaggtgacctctgatcgtcctcactgctcattatacgctaattataatgcattagtatgct

SEQ ID NO: 31201 - DNA, 1836 bp, Artificial sequence
  DNA replication origin
ggccgggggcgcggcaggcgacgaggcccgggaggcggcggccgtgcgggcgctcgtggcccggctgctggggccaggccccgcggccgacttctccgtgtcggtggagcgcgctctggctgccaagccgggcttggacacctacagcctgggcggcggcggcgcggcgcgcgtgcgggtgcgcggctccacgggcgtggcggccgccgcggggctgcaccgctacctgcgcgacttctgtggctgccacgtggcctggtccggctctcagctgcgcctgccgcggccactgccagccgtgccgggggagctgaccgaggccacgcccaacaggtaccgccccgaagcttccccgcgtccgcccgaggcgcttaccccctcccggagccgctgccacccaaatcgggaggctgagcggggagcgctggccggaaggcccagctgcgccgcctccagcagctgtgtggccttgagccagccactctgcctttcagagcctcggctggcccacctgaaaaacggaaagaagacgcctaccgtgcagtgttattgtgaggatttgcacgatgatgggcatagaatttgtggtgcacaattggtgatgagtgaattttcttgccttcctcccccaccttctctttgaacctgcggactgaggaaggacgcctccatcccccaccctacaggcctgtgttccagcgcctgccacactatggagtgatgtgttcacacagctgtcctcccctgcccatctgttagactgtgggggcagggattccccgttccaggaaaacaccgtgcagaggaggggctctggcagtgtggcatgaaagtggaatatgccacccaaatacccgccaggctagagggccctgggagagtgcaggggacgagtgcctcagaagcccagccccggtacctggtctcagctccacctggggtgggtcccagtgtgcagcagaagggccgagtttggagcccctcccctctcctctaggtgggggatgggggatttgttccagggccgtggaccctccagggtgggatgcgcccctgctcatgacactgcccgcaggtaccgctattaccagaatgtgtgcacgcaaagctactctttcgtgtggtgggactgggcccgctgggagcgagagatagactggatggcgctgaatggcatcaacctggcactggcctggagcggccaggaggccatctggcagcgggtgcgtgcccactgtcccttccccaccctcctctatggcgggagccaccgtaggtgttttcacccgccccccagcatgggcgcagtgtctctctctagaagtgctttcagcgtgcacagtggcttgggcctcctaaaaactgaggcttccggccgggcgcggtggctcacgcctgtcatcccagcacttcgggaggcctaggcgggcggatcaggagttcaggagatcgagaccatcctggccaacattgtgaaaccccgtctctactaaaatacaaagaaatagcaacctgggcaacagagcgagactctgtctaaaaaaaaaaaaaaaaaaaactgaggcttccagtttgaggagtggggctccttcccccatctcccctatgcagccaatcacctggtcccttggatccaactcatgggcagctctagatctgcctccctggaagcttctgtgctgcaatggctgctccaggctctgcttaagctcttcacacagttgccctgcccttccatctggcactcttgctccatgaagccttctaaggccttcctgttgggggaaagcccctttgtgccccatctcctcacccatgcgacaaaggcaacacagt

SEQ ID NO: 31202 - DNA, 1486 bp, Artificial sequence
  DNA replication origin
ttttggctcagaacagggtggggagagcgggccagggacccgcaggagggcttatccttgagattgcgtgggagacacaacaaggggtgggggcccgcaggcggggcggggcgaagcaggtgatatccagcccagagccccagcctctccccacagtctcaccatggcctgcaccgtggtgctcatcaccggctgttcctcaggtattggcctgcacttggcaatacatctggctttggacccatcccagagcttcaaaggtatagataggtagggacagggagggagagaagggaaaagcccttggaggccagaagagaagtcagatcttcctcctctcccaaaacctccagtgtatgccacgttgagggacctgaaaacacagggccggctgtgggaggcggcccgggccctggcatgccctcagggatccctggagaggttgcagctggatgtaaggaactcaagctccctggccgctgcccgggaacgcgtgaccgagggccgtgtggatgtgctgggtgagcctcctggaagcatatgggctcctaggagccttctccgccctgcgttgaaaccaacatgtccccaggcccctggagcatgaggggacaggccgtgctgagggtgatgctgaggcgggctggttgggcctctgtccccgcagtgtgtgacacaggcctgggcctgctggggccgctgggggaggacgctgtggcctctgtactggatgtgaatgtagtaggtactgtgcgggtgctgcaggacttcctgccagacatgaagcggccgggttcgggacgcgtgttggtgactgggagcatgggaggattgatgggtgagtggcagggaccgggcccggagctccagattctttgtgtgcagagctgagccttgaaggcaggctccttagggggtggggtgcaatcagcttggaggggcactgcctgccgggggatgaccccctggccgctgcgcctcaggaacctcatcttcccacccaagggctgcctttcaatgacgtttattgcgccagcaagttcgcgctcgaaggcttatgcgagagtctggcggttctgctgctgccctttggggtccagtgagtcaacacccccgtctcctcaaccctcttaactctgacctagagatgccgagcaccctgtcctgcggaagccgctctggtctctgcccggcttacatttgctgcgtgccaggcacttaggctggagcattggcacgcattgtgccacttgctgacctggctgctgaagtgttggtattgttatggggaagctccagccaagagaggttaggtgactggcccaaggtcatgcagcggccggggatcccgccaggttcgaattctgacaccagggctacctggcagcctcagatgggtttgggagggctgtcgagcaataacccgctattcaaatgttctggttatccccagcgctctttccaccttcgggacgcagcggtgctg

SEQ ID NO: 31203 - DNA, 1126 bp, Artificial sequence
  DNA replication origin
gcacgaacacccggaccttccgcctcttgcactaatacctccaccacagcaaggagatctaccgcgaggaggcgcagcaccctgaggaggtggtgaaggtgagcggggggcgggactccgggagcgggggcggtgcgtcgtcctgcgcgcagcccgggccagagctcctctcccgccgccgcaggtcttcctcaccgctatgcgcgccccgaagccgaccctgcgctacttcacaaccaggcgcttcctgcaccagctgctgatgcgcctggacgacccctttggcttcgactacgccgccgccatgcaccgggacgtgttcgccgacgatcccgcagaggccgaggctggggccggggctggggccgaggccgggggcggggccggtgggatgggagaccctgagctcagcgatcctctggccgccccgcaagaaaggctccgtcagccactgtctcccgcgccctcctttgtctcctgggcctgtgcggtccctggggatgggacggcggtgacggctgtggatggctaattaagacagatcacgttagcccgttatatctgcgcggctaggcgcgatggctgtcgcctataatcccagagctttggaaggccgaggcaggaggatcgctccaggccaggagttccagaccagcctgagcaacatagtgagacaccccatctctaaaataaaaaaattagcacagtggcaccattccttgagctcaggagttggaggctgcagtgggcatgatcgagctactgctctccagcttgggcgatagagtgagacactgtcaattaattaatctaatcaaccaaccaacccaacaacccagaaaccaaggtccagaaagaagccagcccaggatcatgcctcaagtccacagtaaagcccagacacagtcactggatacccaaggggcatctgcaggacgagttaggtgggacttgggttggggtagagtcaggttgtgacctgcactccattagccatgagacctcaggcaagttccttgctttctctgagtgctttcctttcctttcccttttcttttcttttttgtttttcttttgttttgagacggagtttcactcttgttgcccagcctggagtgcaatagcg

SEQ ID NO: 31204 - DNA, 1548 bp, Artificial sequence
  DNA replication origin
tgggctcatgtctgttttggctcagaacagggtggggagagcgggccagggacccgcaggaaggcttatccttgagattgcgtgggagacacaacaaggggtgggggcccgcaggcggggcggggcgaagcaggtgatatcaagcccagagccccagcctctccccacagtctcaccatggcccgcaccgtggtgctcatcaccggctgttcctcgggcatcggcctgcacttggccgtacgtctggcttcagatccatcccagagcttcaaaggtatagataggcagggacagggagggagagaagggaggagcccttggaggccagaagggaagtcagatcttcctcctctcccaaaacctccagtgtatgccacgttgagggacctgaaaacacagggccggctgtgggaggcggcccgggccctggcatgccctccgggatccctggagacgttgcagctggacgtaagggactcaaaatccgtggccgctgcccgggaacgcgtgactgagggccgcgtggacgtgctgggtgagcctcctggaagcatatgggctcctaggagccttctccgccctgcgttgaaaccaacatgttcccaggcccagggagcacgaggggacaggccgtgctgagggtgatgctgaggcgggctggtcgggcctcttgtctccgcagtgtgtaacgcaggcctgggcctgctggggccgctggaggcgctgggggaggacgccgtggcctctgtgctggacgtgaatgtagtagggactgtgcggatgctgcaggccttcctgccagacatgaagaggcgcggttcgggacgcgtgttggtgaccgggagcgtgggaggattgatgggtgagtggtagggagtggcctcggcagctccagattctttgtgtgcggagctgagccttgaaggcaggttccgcggggggggtggagtggggtgccgtcagcttggaggggcaccgtctgcccggggatgaccccctggccgctgcgcctcaggaacctcgtctccccacctaagggctgcctttcaatgacgtttattgcgccagcaagttcgcgctcgaaggcttatgcgagagtctggcggttctgctgctgccctttggggtccagtgagtcaacacccccgttccccgaaccctcttaactctgacctagagacgccgagcaccctgtcctgcgggagccgctctggggcgatctccctggccctctctgcccggctcacattagctgtgtgccaggcacttgggctgggcgcatggcacgcattgtgccacctgctgacctagctgctgaagtgttggtattgttatggggaagctccagcccagagaggttaggtgactggcccaaggtcacacagcggccagggaccccgctagattcgaatcctgacaccagggctcccttgtagcctcagatggatttgggagggctgctccggcaggaacccgcgtttcaaatgttctggttatccccagcgccctttccgcctcacttcccagcgcagcggtgctgctcgcggt

SEQ ID NO: 31205 - DNA, 1279 bp, Artificial sequence
  DNA replication origin
cttctaccaatacctcgcccacagcaagcaagtctttcgcgaggcggcgcagaaccctgaggaggtggcggaggtgagcgccgggctggactccaggagtgggggcggtgcgtcctccggcgcgcagcggtggccacagctctcctcccgccgccgcaggtcttcctcaccgctttgcgcgccccgaagccgaccctgcgctacttcaccaccgagcgcttcctgcccctgctgcggatgcgcctggacgaccccagcggctccaactacgtcaccgccatgcaccgggaagtgttcggcgacgttccggcaaaggccgaggctggggccgaggctgggggcggggccgggcctggggcagaggacgaggccgggcgcggtgcggtgggggaccctgagctcggcgatcctccggccgccccgcagtaaaggcttcctcagccgctgtctcccgcgcccttctttgtcccctgggtctgtgtggtccctggggatggggcggcggtagcagctgtgggtggctaattaagatagatcgcgttagccagttttaccagcgcagctaggcgcgatggctgtcgcctgtaatgccagcgctttgggaggcggaggcaggaggatcgctcaagccccggagttggagaccagccagagcaacacagtgagacccccatctctacaaaaataaagaaaatttaaaaatcagcacagtggcaccattccttgagcccaggagttggagggtgcagtgagcatgatggggccactgcactccagcctgggtgacagagtgagaccctgtcaattaatcaaatgaaccaaccaaccgaaaaactcagaaaccaaggtccagaaagaagccagcccaggatcacacctcaagtccatattaaaggccagacacagtctctggataaccaaggggcatctgcaggaggagttaggtgggaattggcttggggtagagtcaggttgtgacttggaccccattagccatgagacctcaggcaagttccttgctttctctcagtctttcttttctttctttctttcttttttttttattttctgagacagagtttcgctcttgttgcctaggctggagtgcaatggggcaatctcggctcaccacaatctccgcttcccagattcaagtgattctcctgcctcagcctcccaagtagctgggataccggctaattttgtatgttcggtagagacggggtttctccatgttggtcaggctggtctcaaactctcgaccttaggtgatccgccc

SEQ ID NO: 31206 - DNA, 1696 bp, Artificial sequence
  DNA replication origin
cctgtggtggaggcctttggaacaggtaataactggggaaggctgaaagtggcctggagtgaggagctagccaggcctctgtgctcagttgtctgtctgtgttgtccagatattctccataaagatggcatcatcaacaggaaggtcctaggcagccgggtgtttgggaataaggtaaacaataacttcctaagggctcctaagccgctactagacccaggggtcagggtccagtggacctctctggtctggcccagaatgccatttccattgatctgttcccaacaccaccttgctcgggctggctgcctcttctagagaaggtaacctctgccctctgttcccctccccagaagcagctgaagatactcacggacattatgtggccaattatcgcaaagctggcccgagaggagatggatcgggctgtggctgagggtgagtgggagggaggatggcaacagctaaggggacagttaagctgtttcttcccctgggagcttccctgcccaacgtgggactgtctgttcaccctgggactgtgttctgcctgggagaacgtcggcactgctggcggtgactggggtctccccacaggaaagcgtgtgtgtgtgattgatgccgctgtgttgcttgaagccggctggcagaacctggtccatgaggtgtggactgctgtcatcccagagactgaggtatctcgccccaccccccacaccatccctactgcagatcctatcctgtgagctggaattcttcctgacaaatgtctcgtctgtgctcaggctgtaagacgcattgtggagagggatggcctcagtgaagccgcggctcaaagccggctgcagagccagatgagcgggcagcagcttgtggaacagagccacgtggtgctcagcaccttgtgggagccgcatatcacccaacgccaggttggtgcccagggcaaggccgggttgtggggaaggagtctccagtgggtactgcctgaccctgccctctcttcctcccaacatcctggcctgtctgaaggtggagaaagcctgggccctcttgcagaagcgcattcccaagactcatcaggccctcgactgaaaagttctcagtggggccagactggctcctggagctgacaagcgaccccgtggtgaggagaaatgggggccttgatgctcaccctggttcaggcccagaggtccaagctatactgtgcaggacatggccaggcctggtggacacaggaagcctacccaacacgctggtatttggccaacactgaggatgtggttcatgggggagcagtcccctccccactcttgcccatgggtgactcttacccacagctgactagggccagcgcaaatactggaacctgtaacagaattaaaggtgaatgttctgagatgttgcttgtatggtgtctgcttcctgttccaatgcccctaagtatctttgggatccttaagccacaagtgcagggcccaggcctgagctggaagcctgggcaatgcagtggttaagagaatggcctttgaggctagccagaggcgagctttggccctcccactgaccagctgtgttcttctgagtaaggtgtagactttctaggtactgccgtgttttattgtttttgttttgtttttaatatgagaggccgcataacctagctagcaggttctttgcaagggttcattcc

SEQ ID NO: 31207 - DNA, 1034 bp, Artificial sequence
  DNA replication origin
gtccggtgggtacaagatgacggagccgggcgcctctcccgaggacccttgggtcaaggcaagccccgtgggcgcgcacgccggcgaggggagggcgggtcgggctcgtgcacgtaggggggccggaagacgaggggcttccctcctgtccccaaagtcccccacgctctccgtgccccggggctgcagagaagacagctctcaccccgcgtgtgccaaggtggggagacaaacgaggcgtgtgcgcgcgagtcgggggaacggggcactggggtggagtaggggcggaagggatcatacacaggggaggcactcgcacgccctagcctgtgccagtctcgggggactcattaagctgcccgcgcaccccgggctgtgtgtgtgcaagcgcgcagggtgacagaggcgccttcccggaatggggggcgcgctgtgcgtgcctgcagtggaaggggcgcctccccctaggggcggaggtctgacgggcccttcccgtgctctgtgccgcaggtggagtatgcctacagcgacaacagcctggaccccggtgagtagctgccccatcttaagctctagagggacactcccgcccaggctctctagattcttgtggcgttgccaaccacgcctgagcacagtccactctccctgagcagagttcctggcttgagacagcaggagctgaaggacaagggcagaaaacaactgagggtgacacctagttccctctgctctggaacagggaagtggtggaactgatcactcaccactcagtggagcagctgatcactcacaccctcatcacgtccacatgcccgtttgtgagccaggggggtatcatgcaggcctatggagcagtgtagacactagggagcagagcactgcagcgtggtctggcaggaagtggggggcccagtatggttggctttgggttgaagggaagaggtcagcatttaagaaagccattgtgtggccgggcgcggtggctcacccctgtaatcccagcactttgggaggccgaggcaggcggatca

SEQ ID NO: 31208 - DNA, 1755 bp, Artificial sequence
  DNA replication origin
gctcatgcctgtaacccagcactttgggaggctgaggcaggtggattacctgagctcaggggttcgagaccagtccgggcaacatgacaaaacccctgtctctactgaaaatacaaaaaaattagccgggtgtggtggtgcacacctgtaatctcagctactagggaggctgagccaggagaatcgcttgaacctgagagaggcagaggttgtagtgagccgagatcatgccactgcactccaacctgggcaacagagtgagacttagtctcaaaaaaaaaaaaaaatcttaagtggcatttacagtgtttgtgattctagatcaggctacgtttcattccataaaataaatagaatgagtgttcagatgagtcaagcacaggttagtttttatggacaaaaaagggtagagaaaaatagaaacagaaggaaaaaaagcagatgggtcctttcaaagttacttttcttgtaaaaggacttccgtatcatgccggctcacactggcttgtttggggttttggctcttccttccctctcctgattcctctgaaggtttgataaacaacttagtgttgcttagtgacatagaactttagcgtgagtgactccattttggtttggtctgttgagccaagcacaggagctcagtgcaaatcaatggcctcctataaaatttatttaactgaacccttgtgcattgctggtgggaatttaaaatggtgcagctaccatggaaaatcgtatggcgattcctcagaacattaaacacaattaccatatgatccagcaattctacctctgggtgtatatccaaaataattgaaagcagggactcgaacagatatttgtacactcacattcaaagcagcaacattcacaatagccaaaaggtggaagcaacccaaatgtccatggagggatgaatggttatgcaaaatgtggtacatctatacaatggaatattattcagttgtaaaaaggaaggaaattctgacacatgctacgaaatggaaggatcttgaagatattatgttaagtgaaagaagccagacccaaaaagacaaatactgtataattccactcatatcaggtgcctagagtagtcaaggggaagttactgtttaatcgcgatagagtttcagtttgggaagataagaaagttctagaaaagaatggtggtggtggttacagaacaatgtgagtgtacttggtgccacagaactgtatgcagtacttacaaatggttacaatggtaaatttaggccaggagtggtggctcatgcctgtaatcccagcattttgggaggccaaggcaggaggattgattgaggccagtagtttaagaccatcttgggcaacacggtgagatccccatctctataaaaatacattttaaaaatttaaaaattagctgggcgtggtagcacacgcctgtagtcccagctactcgggagactgaagtgggaggatcacttaagccagaagttcaaggctacagtgagctatgatcgcgccactgcactccagcctgggcgacagagcgagacccttctaaaaaataaaaaggtaacatacatgtgtatgtattgtaacaccattaaaaaacagaaatttaaacgaagaaaagttggcttctagccctttgatctagcaaagctgacagtgtcctcacctaccaatataggtagatgactccttacacgtggacaagcacatccacctggccgcttctcccctttcctcccctcccccgtt

SEQ ID NO: 31209 - DNA, 999 bp, Artificial sequence
  DNA replication origin
cctctgcaggctcttgtggacctggggtgggcataggagcagtggaggtggcctctcctctacccctgcaggtccagggcgcgggatgaaggggcctcccctacctgggtggggtccacctctccctggatgatgttgaggatggcgatgtagcagtggttggtctggcggtctcggcctgtggacaccatcacgttcttgggctgcagcagccgcctcatgacatccaggaccgtggtcttcctcacgctggccacctgatgggacagtgagacagggacccggccagcgctcagggcacagtccctttggcttctctttggcagaagccaaaggcagagggagggtggagagaaagtcagcaagaaagtcgcccgctctgtgccagtccctgagcgcagtgccttggggcctgcaaagggcagctcctggggcagtggggaagagagaaaggctggggcagggcctgctgggcccagggccagcctggcctgggacactgaaggctgctcttactgactggtctgtagtgagcggggtgtagccggtcatgaggaagtggagccgtggggtgggaatgagcgaggcgatgaggccgatgaggtcattgttcatgtagccggggtagcgcagggtggtggtgctggccgacatgatggtggacacctggggacaggcgtgccatgtcatggggctcggcctgggtgggaccttccttccccagatgaccctccagcaaggagggcttccagtccaaaggagtccgggagtgggggcccaccagctggttgatctgggagaaggacgggttctggatgtgcaggcggtctgtggcaatccggttcagggctgtgttgtccagcaccacctggggggacagaagagcatcacagcatcttgaggataaaatgggcatagaaataagatattggcttagcccctgctgaactccaaagccaggaagtaggtttgttagtttaaaaaaaaaaagtactgagg

SEQ ID NO: 31210 - DNA, 955 bp, Artificial sequence
  DNA replication origin
ctcggtatgacgttctggagctgagcacggtgagggggagaagggagaaggggactctggcggcccaagccccacacctttgccccagagccacaggtcccacggagtgtcacgtaattccccacatccagaacagctacccatctcaaaccccaggagtcaccagcccttgggccctcacatccctggagcctcagccccctccacacacgtgctgtgaatcatagggggatcaggatactcctgctcacagacacccatctccccctaccaaaaataacgctgggctcctccttccaccctgactctgcctctctgtctgcaggagcctggtcggggtgctccacagaagctgtgcctgggcttgggagccaaggccatgtccctctcccggccaggggagacggagcccatccacagtgtcagctatggccatgtggccgcctgccagctaatgggcccccacaccctggccttgagggtgggagagagccagctcctcctgcagagcccccaggtgagtgagaagaggagttgtgggaggaggagagaagggaagcgatgtcaggaagcatttacagaacaccaaacctgggccaggtagagctctaagcactggggatccagcagtgatcacagacaagctgaaggagcttacactagagtggagtcagacaataaacaaggaatcccaggctatgaagacagtgagaaatgctacaaaggaaagagtgatgtgacaggaagccagggaagggttctcaaaaagggtgccatttaagctagccagggaagacctgggagaacagcattccaggtagaaagaattgcaaggtggccgggtgcagtggctcatgcctgtaatcccagcactttgggaggccgaggcgggcagatcacgaggtcaggagatcgagaccatcctgaccaacatggcgaaaccccatctctacta

SEQ ID NO: 31211 - DNA, 931 bp, Artificial sequence
  DNA replication origin
atcactatggcagccccgcgggaggcttgactggaacctagacctgctcagattccgcgaggcgttttcgcgacggttccgccgccgctcgtacactgacgccgggtgcctcccctgcaggctcacgctctgctgctgcggggccggccgcccccacccgacgacacgctgcgcgccctggcggcgctgcgcctgcagagcctgcagcgggacttctctccgcgggtgcccctgccccgcctggaccgcctgctcccgcccccggccccgccgcgcgaagacccgccccgcccgacccccaggccgcccccttccgctgccctgctggccggggcgctctggagcccgggcctggccaagaggcgggcggagcgggcccggcgcggcggggccggccgcactgcgggaagcattgcccgcgagggaggaggcggcgccggcacggcagctgccgtgctgggcggctggaagcggctacggggcatgggccgagctgaggccatggccgcctacctggccctggcggcgcagtgtccggggttcggcgctgctcggtatgacgttctggagctgagcacggtgagggggagaagggagaaggggactctggcggcccaagccccacacctttgccccagagccacaggtcccacggagtgtcacgtaattccccacatccagaacagctacccatctcaaaccccaggagtcaccagcccttgggccctcacatccctggagcctcagccccctccacacacgtgctgtgaatcatagggggatcaggatactcctgctcacagacacccatctccccctaccaaaaataacgctgggctcctccttccaccctgactctgcctctctgtctgcaggagcctggtcggggtgctccacagaagctgtgcctgggcttgggagccaaggccat

SEQ ID NO: 31212 - DNA, 801 bp, Artificial sequence
  DNA replication origin
gcagcgccgaaccccggacactgcgccgccagggccaggtaggcggccatggcctcagctcggcccatgccccgtagccgcttccagccgcccagcacggcagctgccgtgccggcgccgcctcctccctcgcgggcaatgcttcccgcagtgcggccggccccgccgcgccgggcccgctccgcccgcctcttggccaggcccgggctccagagcgccccggccagcagggcagcggaagggggcggcctgggggtcgggcggggcgggtcttcgcgcggcggggccgggggcgggagcaggcggtccaggcggggcaggggcacccgcggagagaagtcccgctgcaggctctgcaggcgcagcgccgccagggcgcgcagcgtgtcgtcgggtgggggcggccggccccgcagcagcagagcgtgagcctgcaggggaggcacccggcgtcagtgtacgagcggcggcggaaccgtcgcgaaaacgcctcgcggaatctgagcaggtctaggttccagtcaagcctcccgcggggctgccatagtgatgaaatgagacggcctagaaaaccaggggttcaggcttgggggtctgtttggaggcgtgaacgccggagagcctcacctgctcaaagaggaaaggcagttcgtgaccgtctggggacagcccctcagggtgcagaggtccgtgaagacgcagacatagtctccacccggagtcgggcgagtcctccaacccagcttcctccgcggccaagctgcagaagaggagcggacgaagcgctagggagaagccgga

SEQ ID NO: 31213 - DNA, 1768 bp, Artificial sequence
  DNA replication origin
cagaggttgagagtctggctccgtgggaccactgctttcccttcactcttcctgtcgttcgtaccctcccctccctgccaccccatccccttatattccctctgaccttcccctggttcatgccttcctcccagggcgcagctctgtgtcccctctccaaaccgtccctccgcccccaccctcccacaggtccgggctatgcacccctgcgcgaggaggcggtgcggctgttcttggcgctgcaggcgctggagggggcgcggcgccccgggcccttgatgcagggtgtgctccaaacctgccgggacttgcccgcgctccgggatgaactcttcctgcagctggctaagcagacctcgggccctgcaggtccccccgggctcccggctacccaagaccctgcggccctgcggtactggcaactcctcacctgcatgagctgcaccttccgacctgggggagctgtgcgggggcacctcctggggcacttggagaggtgagaggggcgaggtgggggttacggcctaggcgaggagctaccgggctgggagagaatgaaaggtcttttgcaaaagacttggtaggtaaagaaccgagtaatacatacagtgcctttgtgggagatacaagatcctatcgcagttgtgagcggatgaattacaataaaacgccccccttgggctgaggagttatgaaaaggctgcttttcctccagctgatgcaggccagcgccagggcttaggaaaatgtagtaaagtggctggatttcgatttcaggccgaaggaagatcacgaagacttttggaagtggtggaggcagttgggagaaagctgccaggggacttgaaaagtaattcagctctatgcaaagcactggggagagatttagaagagccttcaaagaacttgagttggggcggggaggaaatcggctagataaaataaactataagagaagcaggcaagagggagggggagaagaaagcccttggagtattgatccctgggttcctcctaacccaggaccgagcaggcactcccggactcggaactggcggaatatgcgcgcttcatccggaaagcgctgggccggacgcgcggcagagagctggtgccctcgctggcggagatttccgcgttgagccaacggcaggagctgctgtgtaccgtgcactgtccgggggctggtgcctgtgctgtggccatcgactcccacaccacggcgggggaggtgaggccagagaaaggccccatgacctccaacccaccctgccagcttctcacgcctgtctctccctcttcctggaccctaggtttgccccgagtctagattattttggtaagggagggagtggtggtgacaggactaagagaccccttccaattgaatcaacccctcccagaatcctggcaagacctctgagtggtctcccctcaccctcctcttctaggtggctcgagagctggtggggcggctgggcttggcccggagccgcaacgcattcgcgctgtacgagcagcgaggggcccaggagcgagccctggctggggggaccctcgtggccgacgtgctcaccaggtttgagaagtaaatgtccagccccagccctgctctctattagcccatccacttctcagctgaggtcagtctctaagcggacattatccagcgcttgcccctggccctgcgctgtggtgttcgctggtttacagacggacctgcccgccgcaggtttgcagtccgactgcagcatcacctccgctgtcg

SEQ ID NO: 31214 - DNA, 1039 bp, Artificial sequence
  DNA replication origin
ctcggttctttacctaccaagtcttttgcaaaagacctttcattctctcccagcccggtagctcctcgcctaggccgtaacccccacctcgcccctctcacctctccaagtgccccaggaggtgcccccgcacagctcccccaggtcggaaggtgcagctcatgcaggtgaggagttgccagtaccgcagggccgcagggtcttgggtagccgggagcccggggggacctgcagggcccgaggtctgcttagccagctgcaggaagagttcatcccggagcgcgggcaagtcccggcaggtttggagcacaccctgcatcaagggcccggggcgccgcgccccctccagcgcctgcagcgccaagaacagccgcaccgcctcctcgcgcaggggtgcatagcccggacctgtgggagggtgggggcggagggacggtttggagaggggacacagagctgcgccctgggaggaaggcatgaaccaggggaaggtcagagggaatataaggggatggggtggcagggaggggagggtacgaacgacaggaagagtgaagggaaagcagtggtcccacggagccagactctcaacctctgcctcccaggaatccccttcccaatcccactaagcctgcatttggacttagggagacggacggccgggaagggctgtagattcacaccccagattctgtaactccatactgaggctcaccaccataggtcagaaaacaggctggactaggagtcagaaaaccggggttcctctcccagcaccctttaatcctctaactttaggacctgggccagtcactacaccgtttagggagaagtacagttggatgaggccagcacattctacaaaagtggtagcttttctaccacttgtaaaggtaatatggcatagtctcaagaggataatgaaaaaataggggagtgtacaaactcctgaaggaacatcagtagtcagaatgagacccatagagaaggtggccaaagggggcccttttgtgtgtgctggcttcctctcctccaccct

SEQ ID NO: 31215 - DNA, 1723 bp, Artificial sequence
  DNA replication origin
ccctcctccgcggggctcccggtacagccaacctgggggccggagagggagggaagggacatcagtagagacattaatccctagggggttgggattgggggcctccagagtgcactgaggggggtctctacctttcacaacgatgtccgggtcgtcctccggcagccctttctccgggatgaggctccaagtctcctcccagctctgcagcctgggccagaggggagggaaggttgggtctccactctgcctctagggggctcctctgtaggggctccccagaccgcacgggtgtctgctcccaagctgggcacccctcccccaggctgtgggaaccgctgggccattctgacctcgaaccagaaatagccccgacccccctctttctccccgcgcccccagccggaccgccccccgggaccccagccaaaccacagcgtccggcatagggcctctcccttattgcacaaccgctaggggagacagagaggatgggggtcccgggaacatgctggggtcgccagactatgggacgtaggggcgtagctcacctgttggagacaggcccgctcctcactggctgagtcagcgtcacttccaggggaccctggggagacaggcggggaagccctcagggtcagagcccttcctgcgcaaggttcgtgccttctgccctcaggacagggctgctcaggggattgaggaaggaggagtcacagagtggggtcgtgactagggtggagcacgctggagcccctgggctcgcccctcccgccagtcttaacaggacaagctcttcagaacagcaggagctaaggagccaaggctcctctcagttaccctttgaaaatacaatcaggggtagggtagggtggaaagagcactgggcagagagtcaggagacctgggttccaattcccgccccaccactaactcactgtggaaccttgggcaagtctcttcccgtctccgggccttagtttccccatctttgaaacaggagaggtgagctcgttctgccaggctccaaggcaccctctcctcctcattttcccttcttccacactgcctccctggccaaggcaggacaggtggtaggcacagaggtgaatgaagggcagagggaccctttcagtatagggctttctccaaaagcgtcttacattctcccatagacactcctgagactcaatggtgagcagagaccctgcccctttgctggggcttaggaagggcgggccagactgaggaatggcacaccctctggaggcaggtgtagttcagggttttgccctccccctccccctcctcctcccttccccctgtcctggaacttcaactgtagactggggtctgagagaggccacaaacccaacccggaggccagtcaggcgggaaccgtgccatcctcatattgctcccagactgctagagccaagagggggaggtgggggagggggccagggacacctgtccccaggctcagggaaggggggagttgaggtggagcatgagggaggcaatggcctggtaaagccgaccctgcccaagctggaagcttggggacgcctgggtcctgcacccttcctacgtgaacctccacctattttctggaaggtctgagtggggctgtcagccacaccacatgtggcaggtactgaccaccctcttaggctaactcccctaatcgcagtgccctgcttccctccctcccccctcctct

SEQ ID NO: 31216 - DNA, 1272 bp, Artificial sequence
  DNA replication origin
cgccagtgtgcaggagggatgggggaggagacgtcaagggatggaggtctcccacaccaatcgtgcctccgtttccccacggggagattcgacaaaaccaggcagcagcccagtgtccctcaccatccatcccctcaggggtttcccaggagcctcacccgggaaagccgagagttctgtcctgagtggcagggtaatgaggaggggtcctcaaagagctcccacctccctctccttggggtccccgccacagaccccaatcctgggatgacttctccccctcgtccaggtctccgcagcgggagctctcgcatctggcctccgcacttgcgaactgggagcggagggggacccaggcgttcgagccgcccagccggcctcgccacattcctcggcgctggcggaggcggaaggagacgggatgggacgcgggcccagcggggaagggagaggcagggccaggtcgggccacgcgtgacgcctcccctgcctcagggcccccagcaggtggatagcgcccagcctgcagcgggaggcccacaggcacatcccgagtagggctgctgctccgagagctcccgggggctttggcccccaggcaaaaaactctccctcatccctagttcgccaagcgcgcagcgtgtggctggaggctggagcggatcagcgtgacggccggttacagcgagagtgattgagacgaggctccgaacccccgggacttaccctcccgccgcccgctggactcggggtccgcagctcaaaggtttcctcgtcctcgtcctcgtccccgtccccgctaagctcgccgtccccgtagtcccggtgcagaagagtgaagcctcgacggcagcagagaagccaccatagtcccccggggagaggcatccgggcgaggagctgcggatgggggcgcgggcagccgcggccgagcagtagggggtcggaggaactggcggggctccgacccgagcaggggaaagatgaggtgggaggagcagaagggagaagaggacagggaggaggcagtgtcctgggctggggtgcaaggggacgctagccagacgctgaggggggctcagtgtctgggcccccggaggggggagggggaaaagcgtccagggccccgggagaggagggagcaatgtccggagctgggaagtagtgtccgttggagtgtccagccctgtggggggcagtgtccggtgcagcgtccgaggtgggcagttgtccaagctccagggagggtcgtgtccggtagggcgtccggtg

SEQ ID NO: 31217 - DNA, 996 bp, Artificial sequence
  DNA replication origin
ggtgaaggagttgaggcaggcactctgggaaggtgcagacctaggccggaaataaaatcgaatatagagctcacagctcaccgaactcagctggggagactgacttggattctaaggaattctgtggtctccgaatacagtggaggcctcttagggctaatatcctgcggctctgtataggaaggggttaactcaggcgctaggcggccggggcggggccgcggcctccgcgggcgcgcgcgcgcgttgctgactcagcggcgattccagagatcttggatggagggttccaggtcggtccccagtggctggcgtgtgggaccctttgaggatcggcgccgtctccgggccttccctggatcctggcccctagaggccgtgggggaccccttttcgccgctgctgcgggaggctctgaggactgctagcctgggcagggctgggctgggcggggaggggcggggaagggcgggacgggcggggccgtcaggccagcacctcccttgagacctcctcgccacgccccgcccttctcgaccctagactccaggctggagcggtggggacagctttgctgaccgatattaaaccgcgagaactgtcgcacgtgaacaccatcctgcccgttgtgattgtgtaaaacaaagaccaggaatcaatgcgagcgtgtctaggaggccatctcggccgtggcctctctccacatgagagtggcctgtactgagagattacctaggaatggagataccacaaccatcttccaggtctggatcccaggcccttgcctgcagagaagttttttcccatatccaacctctctctttccggccagctcagtgcatttcctctgacccagtccccagagaagatggagaacagcaaatatccctcacccccaccacacccgtgataactactctggaaatttgcagattgcaatccctcctaggtttttcttcaaggtggaaaaacttcaactcaaattttacaattcat

SEQ ID NO: 31218 - DNA, 954 bp, Artificial sequence
  DNA replication origin
caggctaccatgacgcccagcggcagcgcgaagcccagggccacctgcgccacggcgctcgcccccttcaccgtctgcgtgaggccctcggggaagatgaggcgacagcgtcgttggccttcccgctgcccatcctggctgaagagcagcgcaggcagcgccaggagcagtgacagcagccacacgatgacggagaccaagtgtgcgcggccgggagtggagggccgcggcccggctgggagcgctcgcgcgatggccacgtagcggtcggcgctgatacaggccaggaagaggaagccggcgtggaaggaggccgagtagaggccagagatggtgcggcaggtggcacttcccagactccagccctgaagagcccctgctgccgcgaagggcagagtcagggccagcaagaggtcggccagggccagctggagcaggtgggcagaggtgggcgagcgcgctgcgcgtcgggctgccaggtgggtggccaggaccaggccattgccggccagacccagcgcagccacggtcagggagacactgggttggaaggcccggctgaaggcctggacatcggccttgtagcaaagctccggcagtggctcagccgagtatgcgtcctcttcatccccagagtaatggccccaggaaacctgggagggtcaaatgagaggcgggatcttatgagacacatctgaccacacaactcccccgcccacacttgccttccaagctgagagctcctgtgtggccagatgtaacagtacacggggagacataagctcttctccagactcttcctagcacaccttcagcaggccttggcttcccttgcacccctcctacctctgcttccagcttcctgggtgaccttgagcaagccacttgctctttctagacctcagttacctaacctgtaatgttgagattataaatcctgaccagcccacctct

SEQ ID NO: 31219 - DNA, 990 bp, Artificial sequence
  DNA replication origin
aatcttaacattttcggaaggcaaattatgctctaggagtggtgctgggcactgtgaatttagcatttttgccctactccactttgcagatgaaaaacctcaggctcagagaggtcaagaaacttagtcaatatcacacagcaaatgattatattccgaagcccgttctttcttcactgacaaagacagtaaattattttttctttctttcgttcattcttttttctttctttccttcctttttttctttctttctttctttctttcctctttccttcctttcttcttctttttttttttttcgtaaaatccagatcctgcacaagagagtgaagtcttttggaggaggtggaatgggaaagtgaccccgtagaccctaatccccacctccctctcggcccctctccccgcctcttccttcctgtcccgctagtagtttaacttctaccccctgtggctatacctcagaaacctgtgtagccagagatggggacggaggccacagagcaggtgggagtgggggcagggagggggagaagggttacagagagggaggagacagggaaggaatgggattccccacctggcaatgggcctctgccatcctatggcttattcaggattcttggcgctgtctcagactaggggtcctccagataaatgggctggtggtgtgaggctggggttgtgggacagggactagggctgaggggaaaggcgggttgaacctagaggtccagggtcccacctgggccctgaaaacctgagtcccaaccctggagacccccttggcatgagtggttcagtgtgctggtattggaggtacagggaaggtgggtatggaagggaaagaagagaaacagaaacccactccagacggaggttggagtccagggctcaggtctgaggcaaagcctgcatatgggcatccttccaggagagggcgctgcaaagggaactgaagctgtaggatttattaataatacaaac

SEQ ID NO: 31220 - DNA, 1440 bp, Artificial sequence
  DNA replication origin
gagagaaaagagagaggagagacagagcgcttgggggcgaaaggagagagggagggaagggtgggtaaggaggagagagcggtctgctgcaaaccccaggaggagagcttggagcccaagccagaactcgagccctagccggagccgttcacagggaggcggctgccgggaccgtcagccctgcatgatgcatctccggctcttctgcatcctgctcgccgcggtctcaggagccgagggctggggctactgtgagtgttgggcttggaggcaggtggggttgggcccaggagtccagagcctgcagggcggccccgaaccgcattgcggctgggtggtcgcgggtccttcccggccggcgcgcgcccgctggctctcatcttttcctgcctctcccccgcgctccgcattgcagctctgaggctgccgcgcgcgcccggggctggggctgggctctgggaagaggatgaagtcagcgggcagggatttggggttgggatccaagcaggagctggtgcctgggtttgaggctagggctgggggataagtgtatactggtgaccgatactaggattaaggttttgccagggcttaaggctggactttggagctggccaaggggtggggtttgtggctagggctggggtttgtggctggggctgggttttgtggcagggatccaagcaggagctggtgcccctgactgatgctaaggctggacatggagctggtgatggtgctagcactggctgaggttgggtgcaaggcctgtatttggggatggtgcaggttttgggggccgagttggattgaggctagggttggagctggattggtgtcttgggttgacttaggttgtggaagatgctgaggtttaggattgagtttgggaaagtactaaaccagggcaggtattgggctagctagggagggtctggccttgggcctataggtgtagcctaggggtttgcctagaaggagaaggtagcctcctctgagcatgcagctgttgctgcagccaggattgaatagatggctttaaggtagggctgggtgtgcctctgggggcgggggttgggggcacggaaggggaagcttcggtcgctaagtgggccggcctttggaagggtctgggaggggccagcgctgactaacagtcggtttccctaccctagacggctgcgacgaggagctggtgggtcccctgtatgcacgctccctgggcgcctcctcctactacagtctccttactgcgccgagattcgccaggctgcacggtgagctccgcggaacatcagctgccaactggcagcgcaccgcggaagggtgggggcctccggaggacttcggggagagggatagccggttaaagctcctgtcctttctataggcataagcgggtggtcaccacggattggggatccgaatccctggctccag

SEQ ID NO: 31221 - DNA, 787 bp, Artificial sequence
  DNA replication origin
tactgcgccgagattcgccaggctgcacggtgagctccgcggaacatcagctgccaactggcagcgcaccgcggaagggtgggggcctccggaggacttcggggagagggatagccggttaaagctcctgtcctttctataggcataagcgggtggtcaccacggattggggatccgaatccctggctccagatagacttaatgaagaagcaccggatccgggccgtggccacacagggctcctttaattcttgggactgggtcacacgttacatgctactctacggcgaccgagtggacagctggacaccgttctaccagcgagggcacaactcggtactctgggcgccaaggcggtaacacttggggagcttcctctgctccaggctctgggccgggcaccagcctctgggaaaatggagggggtggtggtgagggctcggacaaggagcagtgactccactccagggactctgtccagagggactgtcagcttaggacgtgcgcgaaacactcggttcacagggtttaacacactttagggtaaaacctgggagagcttcctaaggaggtgacatttgatttcaggtctgaggaaataataggattgtgggacagggcactttatggaaactgtgcgggcaaagccgccaagcagggaagaccaaggagtgtttactttccagaagtcgagattggctgggtgtgaaagttgtgggctgggaggctatggagaaagaagcagaggggggccgggcgcagtggctcacgcctgtaatcccagcac

SEQ ID NO: 31222 - DNA, 1212 bp, Artificial sequence
  DNA replication origin
ggcgccgcgctcaccgcccagcaggaggaggaggcggagcgctgccggccgcccgactcgggtcctagggagacgcgggccgccggcgcgctccacccggagcgaggccatcgtgcagcaaggaggcgaggagcggcggcggcgctgagccgggcccgggtgtgggggcgcctatatccccagcccaagctgcaggaagccgcgccgcttcctcggaggggctgggacggcggcggccacgtggggggcgggggcgacgctcggggcccgcggctggagggggagtcgctgcctcacccgcgcctggcgcccgcggctccctccgcctcgccggcgttggcccaccctctcgtagctcaccccgcgaggctggacagctcccggaaccccggaaccgggatctatttcgggggctcggctgcgtggcgcccaggactctccagggtctcccaggatcgctccccgaattcgagtcgccccctctctctttcgggtctggaggggtcggcaagctgctctcccagacgtggagaagagggagggggctgggagctccagcggcctctcgacgccgctgcttctaaggggctgtcctgggttgtgggggaaggggcgcctggagctgagccatgcagctcagggttccttatcctatccctaggaataccagctgatgtcagtccgccagccaaaaccagggaggagaagcgggagccagccctctggagtcgggagaaggtctggggagtggggtagaggggaaagcaaagtccaaataccttcccttcagacacctcctggggcctagaccccacaaacctgttgtggggagggcaaaatacgatgactacgttcccaggaagaaggtgccacagctcttcaggaccacggttgggagaaagaatggaggggttttagaaccttcagtgtgcgacttcatgtgccaggtgagtgtaacaccattttacagaccgagaagctaaagctcagggccaacagcccgggatttgaattcagaagctctgggttctaattctgtcttcttactccccagctatagagccttgaatgacacgtttaccttcaggacttctcatgtgaaatagggacattcccctcctcactgtatgatggcagctgtgaaagggcactgcactcgctaaatgctagtttcctttcctcttttcctaagtgacttatctaaggtcacac

SEQ ID NO: 31223 - DNA, 1890 bp, Artificial sequence
  DNA replication origin
acgagagggtgggccaacgccggcgaggcggagggagccgcgggcgccaggcgcgggtgaggcagcgactccccctccagccgcgggccccgagcgtcgcccccgccccccacgtggccgccgccgtcccagcccctccgaggaagcggcgcggcttcctgcagcttgggctggggatataggcgcccccacacccgggcccggctcagcgccgccgccgctcctcgcctccttgctgcacgatggcctcgctccgggtggagcgcgccggcggcccgcgtctccctaggacccgagtcgggcggccggcagcgctccgcctcctcctcctgctgggcggtgagcgcggcgccccgaggcccgggcgggaggcgcgagaggccccggaggggagaggggagaggggagaggggctggatggccgaggccggaacgggccctggggtgcgggttaggaccgacgtacctagcagcactggccctcggacggtccctgaccccacctcggggcgggcgcagcatgagctgcttcccacccagggaaagctggggtgctggccccggcccctcgaagagggcttaggaggacggaagctggccagagatgagggggctttgggcctgggtgtgagtgacaaggagctggtgccagcccctccctccccggcactgaggcgtccgtgggggctagattattcctccttttcttccaaggtagcctattttcggagggtctcagtcccccaacccccctcgcaggctccactgccggggtccccgctatgttaccctcctctcccgtttcttcccacagctgtcctgaatccccacgaggccctggctcagcctcttcccaccacaggcacaccagggtcagaaggtgggtacccagggtgtggaagggtggccgagggtaaggacgagagcaagttcagtggggagggttcctttcccacgaggcctgcccaaccccagctgatgccccactacactcccctctgttctttcttggggttcctcgtggtctttctccctgtcctcctacaaagcccctgcacggctctgagctgcccacctcacaagtgggcgagaagaccccaggaaaaggtgtacgtggaagttcttatcaggctgggatggaaagtgcttagcacatggaagtcattataggattcctgagctgggactctgtcctcagccagaatgttttgctagggaaactttctgaagggttcccacgtttgaagacaggcagttcaccttgcaagcacctgggcaggagggtttgtagggaggggtaggggtgtggtcattgtgtagcatctgtacctacaggggggacggtgaagaactatgagacagctgtccaattttgctggaatcattataaggatcaaatggatcctatcgaaaaggattggtgcgactgggccatgattagcaggtaggggcagtgatggagggtggctcaggccagggggtggacctgctcattgcaggtagaccctgagtgagagtggggcactcttctccctgggtccaccccctctctcactcaagtcctcttctgcccctaggccttatagcaccctgcgagattgcctggagcactttgcagagttgtttgacctgggcttccccaatcccttggcagagaggatcatctttgagactcaccagatccactttgccaactgctccctggtgcagcccaccttctctgaccccccagaggatgtactcctggccatgatcatagcccccatctgcctcatccccttcctcatcactcttgtagtatggaggagtaaagacagtgaggcccaggcctagggggccacgagcttctcaacaaccatgttactccacttccccacccccaccaggcct

SEQ ID NO: 31224 - DNA, 1636 bp, Artificial sequence
  DNA replication origin
agtgcctgggaagtgtggatggcagctgtagcagtatagatggcttatgcataccctgcctctgggaggtctcggcttccagccagagcactctcctcagaggccttgggcctcaggagctgattgtctctgcctatctctccctgttcagagttccacgggctggatgaagccactctactgcgggctctgcaggccctacagcaggagcacaaggccgagatcatcactgtcagcgatggccgaggcgtcaagttcttctagcagggacctgtctccctttacttcttacctcccacctttccagggctttcaaaaggagacagacccagtgtcccccaaagactggatctgtgactccaccagactcaaaaggactccagtcctgaaggctgggacctggggatgggtttctcacaccccatatgtctgtcccttggatagggtgaggctgaagcaccagggagaaaatatgtgcttcttctcgccctacctcctttcccatcctagactgtccttgagccagggtctgtaaacctgacactttatatgtgttcacacatgtaagtacatacacacatgcgcctgcagcacatgcttctgtctcctcctcctcccacccctttagctgctgttgcctcccttctcaggctggtgctggatccttcctaggggatgggggaagccctggctgcaggcagccttccaggcaatatgaagataggaggcccacgggcctggcagtgagaggtgtggccccacaccgatttatgatattaaaatctcaactcccactgcctgcctcttaaattactacagtactggaatggggatggggagggctgtgaagtgttgccacctgagtaaatcccagcctgggagaggggagagaaaagaaagcttatggcttttgtagaagaaaaggtcctccagggccctgtgggctccagtgagcctgtggttttacatctgctgggtgggctgtgtggaggagtgctgatggaacacagcttggggacagactgctttctctctgaattggagtcacttaagggctcccccttccctcaccatctccctcatggaagtcctgaactactctgaagcccctccctccacccatctggtctgggtggggtaactgtggccaaggggagctgaggggggtaagccggatgtggactttggtttattggagactggcaaacagaaggggaggaaggagagcccatatagcaaaaacagccactctggccagggttaggctgcggccaaggtggcctggaggggatggatgaccgggctctcggtttgggggagggacttatcctggggagtacacacccattccctatgcagaccagagggacaacaacgtcagacctttccactgacctctccgttcggcctggggctactccggacagttaggagggggtggtgctgccttatctggggtgtgcaggagggtggtagcctccccctaagtaatcccccactagggtccgggtgtcgttctctcctgccctcctccgcgcacaaacaggtttgctcactcttagtgcgggaggatgctccgcggtctcccactcagttctggcctcagagtgagactgcggccgggggctcgggaaag

SEQ ID NO: 31225 - DNA, 1430 bp, Artificial sequence
  DNA replication origin
gccgcctcctctccggccgtctgattttctacccttcggcgccctgctcttcctcatgttggcatccccggccacggagaccaccgtcctcatgtcccagactgaggccgacctggccctgcggcccccgcctcctcttggcaccgcggggcagccccgcctcgggccccctcctcgccgagcgcgccgcttctccgggaaggctgagccccggccgcgctcttctcgtctcagccgccgtagctcagtcgacttggggctgctgagctcttggtccctgccagcctcacccgctccggacccccccgatcctccggactccgctggtcctggccccgcgaggagcccaccgcctagctccaaagaaccccccgagggcacgtggaccgagggagcccctgtgaaggctgcggaagactccgcgcgtcccgagctcccggactctgcagtgggcccggggtccagggagccgctaagggtccctgaagctgtggccctagagcggcggcgggagcaggaagaaaaggaggacatggagacccaggctgtggcaacgtcccccgatggccgatacctcaagtttgacatcgagattggacgtggctccttcaagacggtgtatcgagggctagacaccgacaccacagtggaggtggcctggtgtgagctgcaggtgcggctgggagccccctcggtggcaccttgggatgggactctggaggtcttaggatgacagacagagggtgggggagacagcatcaagggaagcatgtatttttccagtcaaatgtctatagacacctctgctgtctttgccctgaatgatctggctgactctgggctgcagaaggagagattgaggcaggtggtgtctggtgactcccccatgggtatgaacattctcactttaaagtctccatactcaaccctgagaggtggaaaataggatgggaagttaggcaggggagccagttcaggtcagtttcctgctggtgggtacccgcaatcccttcctctcccctaagtcctgagatcctcagttatgaccctggtcctcttgatcccctcactcctcccgtcccccacctatttgcagaccaggaggctgggatgcgggaagccaggagctgggcaagggtcatctccaactccagaagatttagggcagttgtggcagaatagggccccctaaccccttctggagcagtcagacttctggacttctccacagctgcgaggagggggacatagggagctccagctctcgagtgagtccagttctgctcctcatcccactgcctacctgtgctctcccttcccagacctaaaggcactaagcccatgggctttagggggaccttcctcccattgctcccatgctacatatgggttaggagaacccagtcaacttggggcctgaagcttccgat

SEQ ID NO: 31226 - DNA, 1716 bp, Artificial sequence
  DNA replication origin
ggaggaaggaatggcatggaccctcctggagagacgcaccgatgacactcttggcaaaggaggcgcgcttgagcgtggccaggcccaggtccccgattttgacagagccagtaggtcccgtgataaagacattgtcgcacttgagatcccggtgcaggatgggaggaacccgggagtgtaggaaatgaagtccccgcaggatttggcggctccagcgctgaaggacccgcggcttcatctcccggaaccgcctcaggtacctgggggagggcgcatagccagagtcctggtggggggacacgtcctccgggaaggagccccccactgggaagttcccccctgccgcaccctgctgccgcctccgcatcttctgccagcattctcctagcctatgtctgcccggccccagggagaaactgagtcagggggcatggtggatagacatgacgttaccaaacgggttgggaagtaaattgatagatagggcctcggccaaggtgctgtgggagcgcaggaagggatgactaactgccccaagcatgagggagagcttcggagaggaaatacttttgtgttgcatcttgaatgatgagtaggagctcaaaggtgaaagggggaagggatggagacttcccaggcagacaggacaccgtgctcaaaggcacagaaaaagccagtgacaaggcagggtgggaggaggtgccaggaatttggtgtgtctggagcttaggctgaaagtgaggctgtatcctaaggactttgtgaacaggtgagcctgtgtgggctttattccaaggccatgagaaactttgaaggggttttaaggaggggagtgacagttcagattttcaactgggaaagattctccaggctgcaggaagataggatcgcttagagggtggcagagtttgggaaggccctttaggaggctgctgcagggctccagatcagcgagatggcattgaggtggtggcatggatgaagcagtgaaagccaggtggggagaggttaaggaaagacttggggacagactgatgagggggcagagtggagaaagaggagtctggggagacacccaagtattttactggagtgctgggtggacattgccactcaccgaggcagggacaaaggttgggtgagagggagatggtgaacctggttttacacctggatattagagagtttgaggagcctgggagttcaggaagcagtgggcacacatcccagcctccctctccccacccactcatgcgcagagctcacgtcttgagcgtgcccgaggtcatgagttcggtgaccagcacgatgcaaacctggcccctcagcaccgacttccacgaatcatagaagcggacgatgttggggtgctgcagccccttgagcatctccacctcctctgagaagcgctgccgctcagctctagacagtttccgagtctgtgggatgggggacgggtgtcatgtcaggcccaggacacccacagaaaggaagagggacacctggagtggggttgggggaagaggtgagggttggagcccacagatggggtggggttaatgggattacttgcccagtgggctgcagaccctgaactctccaacagtcccgcacgtaagctgatccaaggacacacccaacctgggcctggggcagccccctagaccccctgctggacacaagcacctttatgcagcccggtcccagagccctgag

SEQ ID NO: 31227 - DNA, 901 bp, Artificial sequence
  DNA replication origin
catcttccagtagcagtcaggcttttgcaactgcacgcgcagctgcctaaggagggagtggagtaaggggtggggggtggtgtcaagccgagagctggggatcagaggacgggaggtgtcatgcaaccccttccccagggcagaaagccgaacagcttccacaaggtgaagatacccgaggtgaaggagatcattgaaggctgcatccgcacggataagaacgagaggtgggggtgaaagggcagagcgtgggtagaatagggccgcgggccgcggcgggctcggctcacccacgcgtcaccctcaggttcaccatccaggacctcctggcccacgccttcttccgcgaggagcgcggtgtgcacgtggaactagcggaggaggacgacggcgagaagccgggcctcaagctctggctgcgcatggaggacgcgcggcgcggggggcgcccacgggacaaccaggccatcgagttcctgttccagctgggccgggacgcggccgaggaggtggcacaggagatggtgagcggaggacagactgtgctgccactggacgtgtaaaggacattgactcgaggggacagtgcaacagggatggggcgcaggaggggtggcagcgatgggggcggggcacctcacccctctcaaaatctcctgcagcgtctccctacctctccagccctaacttacccgcacgcacacccagttttcctttacagagggagccctgggtcctccagcgtccctgctttacctccagctgatctgttcttcctgggatgcccttcttgccaattcatcttttccttctttcctccctccccatttttctttttctttttcttccaatatgatcagaaccatcgatttcgggaagccgtcccctttggagtcaaact

SEQ ID NO: 31228 - DNA, 1212 bp, Artificial sequence
  DNA replication origin
cgctgctcaaacacaggctgctgtaggagtagttcatccacactgggctgggatggctcaggggttgggggctgcccccaacttggggttccttcccatcatctccttcctcctcaactccagcccccagaccctcagctgcacggtcgctctcagccagagcttccctggtctctggcccgcctccagcactgtcctctgtatctgagctctctgaagtgagctgaggggttgaaggttttggagaaccagagagagtgggggatgttggctgcaagggaagaggctcagccggttccttggatgaagtcacttggaaacgcccaacaagctgcggctttccctctgtagggcgacgaggaagaaggcatgaggaaaggagagcagtgacaggacagacagtgagtagggataatggcaggggaaggtcagtggtcagaggccttaccttcagagatgggcgccagcctggcttcccctgggaggggccgagcaggaggtggtgaggcctagaaagtggggggccatgagaagggaagagtgcagagtggagtctccctaatcatccctcttggttttctactcacctcactctccacctcagctgtgtggggtgaagggctttcctggccaccaggagcaacgggagggggaaggggcaggctagggaggggactaggaggggctggaggagactgggaaaggagcccaggtgagggggacagcagggactgggccacagtcatcacagccagtgagaaggcactagccagagaaaggagaggggctgctgtggtggaggggaaggaagaagtggaggggcacggaggaaagaaaggggaactaagagtgacctgagaacaagtgggagagaacgtaggtggagaagtcgtggggagagaactccagggacactgagagagtgggaccggaaactcgggtgtgctggaggagaatggaagtggagagctggtggggtgtggagagggatttgaggagacctgggaagaaatgggggagaatggggaggggctgggatgacatgggggagaagtgatggggaagatgggacctggggaaatgggggttccaggggaaaatgggtttccaggagacaaaggagttccaggagaagatgaggaggtggagaaggctgtccagctcctgtgctccagggaggtgctgctctggagctcttctgggaaggagggt

SEQ ID NO: 31229 - DNA, 1079 bp, Artificial sequence
  DNA replication origin
agggaccgcaggggctggaggggctgagtgggggctgcagggaacagtgggaggagatgaagttagagagaaaggggtcttgtgggcccctgtaaggttacaactcttactgtgagtgagatcccaccccatgaaaggttttaagcacaaggccagtgtctgacgttcttttctttctttctttctttcttttttttttttttgagatggagttttgctcttattgcccaggctggagtgcagtggtgcaatctcggctcaccacaacctccacctcctgggttcaagcgattctcatgcctcagcctcccgagtagctgggattacaggcatgcaccaccacgcccagctaattttgtatttttagtagagatggggtttctccatgttgctcaggctggtctcgaactcccgacctcaggtgatccacctgcctcagcctcccaaagtgctgggattacaggcgtgagccaccgcaccaggccctcattttcaagtaatcagcacagctgctgtgttgagagactgtagggggaggcaaaggagggagtagaggaggcggcatctgtttggaggctggcactgtaatcctggtgagaggagatggagactcggatctgggggaggagtgggttttggacatacttgatgattgaagggaggagcgagggaaagagaggagtgaaggatgctctgctggggctggaacaaggttctgggggtgccttgctgggcccttcattgctgtggccgtgttgggggaatggggaggtgctgtaagcagacaggaagggtctccaaggattataggggtttagtcaacttgagcaatcagccagttctacagcctcccgccctgcagcctgttttccctaaaccctgtgtggaatgtggtccccttgtttgttggaaccagctcctgacagaccccaactcatagaggaaccagagtgaactttcctcatgactgtgctagagtctgcaccccagcaggagcaacggcttcattaccatcacgtgtaacctatgggctggcatgatgcctcactgcatctggacaattgggacccctcctctac

SEQ ID NO: 31230 - DNA, 723 bp, Artificial sequence
  DNA replication origin
aaaaaaaaaaagccaggtgctgtggctcatgcctgtaatctcagcacttttgggaggccaaggtgggaggatcatctgaggtcaggagttcaagaccagcctggccaacatggtgaaaccccgtctctattaaaaatacaaaaaaattagccgggcatggtggtgggcacctgtaaacccagttactcgggaggctgaggcaggagaatcgcttgaagctgggaggcggaggttgcagtgaaccaagattgtgccattacactgcagcctgggcaacaagagctaaactcctttgaaagaaagagaaagaaagagagaaagaagaaagagaaagaaggaaggaaggaaggaaggaaaggagggagggaggggagggaaagacgatgggaagaggaggggaggggaggggaggggagtggatgggaggggagggaactgagaaataagcagagacttgccagagatgagggcatcaggcaaacaggtatctgggggtagaacactggaggggtgggcagggccaaggccctatggctggagtgtgcttggccttcaccagggaccgcaggggctggaggggctgagtgggggctgcagggaacagtgggaggagatgaagttagagagaaaggggtcttgtgggcccctgtaaggttacaactcttactgtgagtgagatcccaccccatgaaaggttttaagcacaaggccagtgtctgacgt

SEQ ID NO: 31231 - DNA, 1084 bp, Artificial sequence
  DNA replication origin
aggctgaggcaggagaatcaggcagggaggttgcagtgagccgagatggcagcagtacagtccagcttcggctccgcatgagagggagaccgtggaaagagagggagaccatggggagggggagggggagggggagagggagagggagagagagagggcataatgcctatgttgctttatgatacaattatctttccagatgtgttgtctcctcagtcaatcggctcctggagggtgggacttctttttttttttttttttttttttgagatgcagtcttgctctgtcacccaggctggggtgcagtggcacgatcttggctcactgcgacctccgcctcccaggctcaagcaattctcctgcctcagcctcccgagtagctgggactacaggtgcccgtcaccacgcccggataatttttgtatttttactagagacgaggtttcaccatattggccaggctggtctcgaactcctgaccttgtgatcctcctgcctcggccttccaaagtgctgagattacaggcatgagccaccacgcctggccggagggtaggacttctgagattttcagactctatcatgcctagctttgtgtgtagattggcaggttcctggtcaaaggagtgcagttgggaggactagggacctactgaccctcttttccccaggcgtgctcccatgcatatgcccacactctcccacacactcctgctcctgccctcctggcctgtgactcttggtgcctcttcttgcagccagtgtggctgtctgtggactttgataactggagagactgggaaggggatgaagagatggagctggctcatgtggaacattatgcagaggtgagagacaacacctactgtgttctgcccacttgatcattctttgtgtttctctgcacacatgtctctggaggattgtcactggggccaagcagagatatgcaagctctctaggcaggttactcattgatgctgatattctttacgtattttgtgcaatgtttatttaatagggatgagaggaaagaatattattgaaattatatacattgattcacttattcagtgtagagcct

SEQ ID NO: 31232 - DNA, 1228 bp, Artificial sequence
  DNA replication origin
cacggcaaccatccgatttctcaatcttttccccaccttttccgcctttctattccacaaagccgccattgtcatcctggcccgttctcagtgagctgttgggcacacctcccagacggggtggtggccaggcagaggggctcctcacttcccagtaggggcggccgggcagaggcgcccctcacctcccggacggggcggctggccgggcagggggctgaccccccccacttccctcccggacggggcggctggccgggcggaggggctcttcacttcccagtaggggccgccgggcagaggcgcccctcacctcccggacggggcggctggccgggcggggggctgacccccccacctccctcccggacggggcggctggccgggcggggggctgacccccccccacctccctcccggatggggtggctgctgggcagagacgctcctcacttcccagatggggtggctgccgggcggagaggctcctcacttctcagacggggtggttgccaggcagagggtctcctcacttctcagacggggcggccgggcagagacgctcctcacctcccagacggggtcgcggccgggcagaggcgctcctcacatcccagatggggcagcggggcagaggtgctccccacatctcagacgatgggtggccgggcagagacgctcatcacttcctagatgtgatggcggccgggaagaggcgctcctcacttcctagatgggatggcggccgggcggagacgctcctcactttccagactgggcagccaggcagaggggctcctcacatcccagacgatgggcggccaggcagagacactcctcacttcccagacggggtggcggccgggcagaggctgcaatctcagcactttgggaggccaaggcaggcggctgggaggtgtaggttgtagcgagccgagatcatgccactgcactccagcctgggcaccattgagcactgagtgaacgagactccgtctgcaatcccggcacctcgggaggccgaggctggcggatcactcgcggttaggggctggagaccggcccagccaacacagcgaaaccccgtctccaccaaaaccagtcaggcgtggcggtgcgtgcctgcaatcgcaggcactcggcaggctgaggcaggagaatcaggcagggaggttgcagtgagccgagatggcagcagtacagtccagcttcggctccgcatgagagg

SEQ ID NO: 31233 - DNA, 925 bp, Artificial sequence
  DNA replication origin
cccgtctgggaggtgaggagcgtctctgcccggccgccccgtctgagaagtgaggagaccctctgcctggcaaccaccccgtctgagaagtgaggagcctctccgcccggcagccaccccatctgggaagtgaggagcgtctctgcccagcagccaccccatccgggagggaggtgggggggggtcagccccccgcccggccagccgccccgtccgggagggaggtgggggggtcagccccccgcccggccagccgccccgtccgggaggtgaggggcgcctctgcccggcggcccctactgggaagtgaagagcccctccgcccggccagccgccccgtccgggagggaagtggggggggtcagccccctgcccggccagccgccccgtccgggaggtgaggggcgcctctgcccggccgcccctactgggaagtgaggagcccctctgcctggccaccaccccgtctgggaggtgtgcccaacagctcactgagaacgggccaggatgacaatggcggctttgtggaatagaaaggcggaaaaggtggggaaaagattgagaaatcggatggttgccgtgtctgtgtagaaagaagtagacatgggagacttttcattttgttctgcactaagaaaaattcttctgccttgggatcctgttgatctgtgaccttacccccaaccctgtgctctctgaaacatgtgctgtgtccactcagggttaaatgggttaagggcggtgcaagatgtgctttgttaaacagatgcttgaaggcagcatgctcgttaagagtcatcaccactccctaatctcaagtaatcagggacacaaacactgcggaaggccgcagggtcctctgcctaggaaaaccagagacctttgttcacttgtttatctgctgaccttccctccactattgtcc

SEQ ID NO: 31234 - DNA, 1050 bp, Artificial sequence
  DNA replication origin
tcgaagcggctgcagagccggtaacggtggtggcggctgttgggccaaaggcgaaagacgaagaggaggaggaagaggagccgctgccaccgtgcgaggcggtgcgctgggccccagtgggggcggtggcggaggcccggcctggggcaaccgcgtttttagaagaggcgacggccgaggagcctggcgcggccccgggctccccgccggattcgccgggccggacgctgcggcggctgcgggcagagcggcggcggctggactcggcgctgctggcgctgtcctcgcacttcgcgcaggtgcagttccgcctgcgccaggtggtgcgcggggcgccggcggagcagcagcgccttctgcgggagctcgaagacttcgccttccgcggctgccctcacgtcctaggttacgaagggcccggcgaccccgccagcgatgagggcgatgggctgccaggggaccggccatggttgcggggcgaggaccaggtgagtggctggagccgggccgcgaggaatatgggaatagtggggtcgtgtgggtggcgatccagacccggatgatggtgcatgcggggagaagcctccccgactcggtcggtgagtacgtgtgtcggagaccaggggactggagtgcggggccggctgaagggcaagaggacagaggcctgggaacctgagggtgagcggtgtgcacggaggatgtggagagatgtcggtgcgtgatgacgtgagtggtagaggagcggtgagcgaagtgagtcgttgagagggcagcagagcagccaagagcagtgctgcgcccactcacctttccctcacgtatctcagtcttgaacactttggctgctagaggaccccgactctggggattgggaaaattggcaaaggaaaggaaagtgagttggaatccgtggaaatttaggttaactccctgtccctgctttcctgaaatctaggcagtctttacacttctttgggtgggagtttggattaacagcagggtctcttagtaactgaaataaacacaactcttgattagataaatttc

SEQ ID NO: 31235 - DNA, 1311 bp, Artificial sequence
  DNA replication origin
ccttccccagctgtgcactctccatccagctgtgcgctctcgtcgggagtcccagccatgtccgacgagagagaggtagccgaggcagcgaccggggaagacgcctcttcgccgcctccgaaaaccgaggcagcgagcgacccccagcatcccgcggcctccgaaggggccgccgccgccgccgcctcgccgccactgctgcgctgcctagtgctcaccggctttggaggctacgacaaggtgaagctgcagagccggccggcagcgcccccggcccctgggcccggccagctgacgctgcgtctgcgggcctgcgggctcaacttcgcagacctcatggctaggcaggggctgtacgaccgtctcccgcctctgcctgtcactccgggcatggagggcgcgggtgttgtgatcgcagtgggcgagggagtcagcgaccgcaaggtgagcgggttgcgtagggcagggcagggctgcgcaggccactgggcagtggggcacgagtgggcgagcgccgggggtgtggcagggcgggagaaactggcgcggacctgggtgcacgagcgtggaaagcgtagccaaggaacttgtgtttgggggctcctggagagcggcatttatgtggggaggggagacgaaattatcgccccttccccaaccatttttagttgtggccgccgcccagaagctgtgctggtgggggggaaaacaataaggtgcccatgcgcatgcgcacaaccacactaccgtccccaccccccccccccccccccattaaaaccacacctgtacccctacccaccaaacactctctgggtaattgtggtctgtgactatgagtgacggttagtgccccctttccccgagggagcttgaggggctatgtcgtcggggttgggcgggggcacagcggccgtgccagagtcctggtcacatgcagccccgtggtctgtgggggtgtgaggcggcccctcccaaagcaaggccaaagagacgagacacgcccatcacggaggagagagagcctttgctaccccaccgccaccagccttacaccgccgatctgattttggggtgggggaggcgggattgggtcatccgatctttgtcttgggctctgtgtctcccgtgactgcagtatctcctcctcctgtgactcagccctcagccttcgggccacgacccggggctgcccttgggaatgcctggggcggggagtggaaggggggacccacctctgccttcctcctgcagaggacccccacttcagaaaccccagtgccaggggtttggactggaacggagaggtgc

SEQ ID NO: 31236 - DNA, 974 bp, Artificial sequence
  DNA replication origin
tccccttagcatctctctcccgccgtgttcaggaagtggatggctgccccagctcttgtccgcactggtacacctgcgtgcacgcgtgggtacacagcaggcccgagcttcgcgcttgtgccgctcatattctacccctaagaacttcgcttgaactctgacctgcccttatatccgagaaagtcaaataagcccagttcggcctgtcccaaaccggcaggggcccctcagaccacaccggcgggctggaccccggctctgaggcctctgttcccagggctccgcccagatcttctgggccccgccccccggctgcgggggtgggaggaggggccgggggggcgcggccgcctggctgggggcggggcggagggggggccgcggacccggggcgggggctcggcgcgggcccgcgagatgccggtgttggcggcccgagcggctgcagttgcaggggcgggggaggcggcggcggggcccgggagaggggtggcgtgggggaccggcgcgtagccgggaccatggaggggcagagcggccgctgcaagatcgtggtggtgggagacgcagagtgcggcaagacggcgctgctgcaggtgttcgccaaggacgcctatcccggggtgagggacctgcgtcttgggagggggacgctaaggctgctggggggtgggtgacaggggccctggcgacggatgggaatgggtactcgggtaaccagggacaagagacagggggtcggaggacgcggggaggccttgagggctcaggaaggactgcagaggattggggtgggaggaattagggagcagggtgagatagatggggtttgggagaaccagagcatccgggagggagggcgaggggaatgtcggaggtcctgggcaatggagaggggaagaactagggggctgaagggaccagaagggaacaggaggaggtctgggagcttagcagagattctccgggggggg

SEQ ID NO: 31237 - DNA, 1019 bp, Artificial sequence
  DNA replication origin
aagatcgtggtggtgggagacgcagagtgcggcaagacggcgctgctgcaggtgttcgccaaggacgcctatcccggggtgagggacctgcgtcttgggagggggacgctaaggctgctggggggtgggtgacaggggccctggcgacggatgggaatgggtactcgggtaaccagggacaagagacagggggtcggaggacgcggggaggccttgagggctcaggaaggactgcagaggattggggtgggaggaattagggagcagggtgagatagatggggtttgggagaaccagagcatccgggagggagggcgaggggaatgtcggaggtcctgggcaatggagaggggaagaactagggggctgaagggaccagaagggaacaggaggaggtctgggagcttagcagagattctccgggggggggggggggggggcaggagctcccgggatctcccctttgcccaatcccagaccaacttgtgtccaggggctgggctggacggggtgtgggagtgaggagggcatttatctggggtgaggacttggagagatgatctcatctggatccatccgtgtctgcagagttatgtccccaccgtgtttgagaactacactgcgagctttgagatcgacaagcgccgcattgagctcaacatgtgggacacttcaggtagccaagtccctgggggtcaccctgacttccaaggcggcccactctgtcccctcccttggttagacccttaggttccaggtaagcccagcccatccatccaattccaacaggaagggaaaaatcaatattctgctaaaatccagggaaactgaggtagaacttgcagagcctgacagaaaccatgtcctgaaggagaaagcctaggatctgagcccctcagctgggtcctgcctacctgggaaagttgggaaggaatggcttttaatttggaacatgttccttcagagataagactgggtttagaaaagacatttagaggccaggcacggtggctcacgcc

SEQ ID NO: 31238 - DNA, 1250 bp, Artificial sequence
  DNA replication origin
gatcctgcgcagggctgtgccgggcgcctgcactcctctcagcccttgggcagtcgatgggaccgggcgctgaggagcagggggcggtgcccgtcggggaggctcaggccacgctggagctcacaggggttgggagggggctcgggcatggcgggctgcaggtcctgagccttgccctgtgcagggcggctggggcccggtgagaattcaagcggggtgcaggcgggccggcagtgctgggggacccggcgcaccctctgcagctgctggcccgggtgctaggcccctgactgcccggggccgggggtgcggggcccgctgagcccgcgcccacctggaactcgcgctggctggcgagcgctgcgcgcagccccagttcccacacccgcctctccctccacacttccccgcaagcagagggagccggctctggcttcggccagcccagagaggggcccccacagcgcagtggcgggctgaagggctcctccagcacggccagaatggacgccaaggccgaggaggcgccgagagcgagcgagggctgctagcacgttgtcacctcgcattctgaaccacagactctccaactctccggcgcttttcgcccactcggtccctcagaacacgaagggctctctcatcctgtcactaaaacgattagctgtccggagacacggaaaaagtcgcccctcttctttgcaggattcctcccttgaacttctccaaaccctcttagtgtgacgtgaccccacccctagctaacccaggctgcttccttaccagcttcccgccccctggggaggcggcaatgcaaagaccgtccgctgccagctctgccgctatctctgtggggtgaatctaacatggcggacaaagacagtaactagtcccgtttctccgcgttttcgccaagaagattggctcttaccacttgtccctcaaaacgaccaccccattgactggtggcgattgcgtcgacggagacggggcaaaagcaagctgaacccgaaaaataacaaacactggggctgaggggtggaactacgagtgcgcagacatgggccagagcgcatttcccctgccccaggcaaattcggcgctcactgcgtccccgcaggccactgaccttacaagactacttgccccagactcctggggctggatgggaattgtagtctccctaaagagttgtacgtatctttttaaggcctagtttctgctttcaaaatacgaaaacataacactcc

SEQ ID NO: 31239 - DNA, 1372 bp, Artificial sequence
  DNA replication origin
ggccagtggctcacacctgtaatcccagcactttgggaggcggcaggcaggcggatcaccagaggctgggagttggagaccagcctgaccaacatggagaaaccccaatctgtactaaaaagcctctgaggaagagtgggggaaagatgccacagagaaaagactttactgctgaattgtccatggggcccactgagactcaaagctaaggtgggaaggtcttctatctgatcaggacccaggagagaaagatactttgcagatgtttcctgggagccttgggaaaaatgcctccctccctcaacaaagcaggcggggcctgcccagttgccctggcagtaaccacattgtgaggtggttccagttataggcagaggggtctgagtgggaagagacagaggtggtgggagcagtgggctcagcctttacttcgccgcccgagggcggggagaccggccccgtacccgaggggacgaggggcccatgcccagtcagggaagccgaaggcctggaggggcttccgggagcaggggctggagttcctctgccaggcaggaggctggcaccagacacccggcagagggaggcggcgagggcccagcaaggattctccccagcccctgtgcctgcgtctcctgcggcttctgtgcgcggaccgtgtcctgtgctgtgtagggaatgctgcctctctgctcgggacgtggattcctttcccctcctcctcgcctggctacttctgacgcaggtcgtcaggactccgcttgggtgtcacccgtgcaggaagcctcccttagtcaagggccctcggcacccgccccatatgtgactagcagccctcctgtgtatttcatcgcgtccccgttgtttatatcagctattccactcaccacccttctgggcaaccctttatctcccgctctgaaatcccatcgctgagggctgggacccctcctcagtgcttatccctgtttccccgcgcgagtctggcgcctggcgtgtggaaggcgctcagtaaacgtttgtggagcgaagaaacgacgcaaaggtgatgagcacgacgcagttaggaggctattggcccggcgcgggggaaaagggggaaggtcgggctcggggtggcaggaccccagagggcaggggtgactgccggggtgctcttggggcaaggtgggcgtcaaggcccccagcaaggttgggataaagtttctctccgaggcacagactgccgcctgcgggctcagcatttacctctcccttcctccttcctaacgcaacttcagcggagggctgagggctctactgcgcattacctggaaaacttatttcactccacggccctaagaggtgggccttattattagccacggccagg

SEQ ID NO: 31240 - DNA, 1031 bp, Artificial sequence
  DNA replication origin
ggaggggaaaggaatccacgtcccgagcagagaggcagcgttccctacacagcacaggacacggtccgcgcacagaagccgcaggagacgcaggcacaggggctggggagaatccttgctgggccctcgccgcctccctctgccgggtgtctggtgccagcctcctgcctggcagaggaactccagcccctgctcccggaagcccctccaggccttcggcttccctgactgggcatgggcccctcgtcccctcgtcccctcgggtacggggccggtctccccgcccgcgggcggcgaagtaaaggcccagcgcagcccgcgctcctgccctggagcctcgtctttctccaggaaaacgtggaccgctctccgccgacaggtctcttccacagacccctgtcgccttcgcccccggtctcttccggttctgtcttttcgctggctcgatacgaacaaggaagtcgcccccagcggagccccggctcccccaggcagaggcggccccgggggcggagtcaacggcggaggccacgccctctgtgaaagggcggggcatgcaaattcgaaatgaaagcccgggaacgccggaagaagcacgggtgtaagatttcccttttcaaaggcagagaataagaaatcagcccgagagtgtaagggcgtcaatagcgctgtggacgagacagagggaatggggcaaggagcgaggctggggctctcaccgcgacttgaatgtggatgagagtgggacggtgacggcgggcgcgaaggcgagcgcatcgcttctcggccttttggctaagatcaagtgtagtatctgttcttatcagtttaatatctgatacgtcctctatccgaggacaatatattaaatggatttttggagcagggagatggaataggagcttgctccgtccactccacgcatcgacctggtattgcagtacctccaggaacggtgcaccccctccggggatacaacgtgtttcctaaaagtagagggaggtaagagacggtagcacctgcggggcggc

SEQ ID NO: 31241 - DNA, 1382 bp, Artificial sequence
  DNA replication origin
ttcaagtcgcggtgagagccccagcctcgctccttgccccattccctctgtctcgtccacagcgctattgacgcccttacactctcgggctgatttcttattctctgcctttgaaaagggaaatcttacacccgtgcttcttccggcgttcccgggctttcatttcgaatttgcatgccccgccctttcacagagggcgtggcctccgccgttgactccgcccccggggccgcctctgcctgggggagccggggctccgctgggggcgacttccttgttcgtatcgagccagcgaaaagacagaaccggaagagaccgggggcgaaggcgacaggggtctgtggaagagacctgtcggcggagagcggtccacgttttcctggagaaagacgaggctccagggcaggagcgcgggctgcgctgggcctttacttcgccgcccgcgggcggggagaccggccccgtacccgaggggacgaggggacgaggggcccatgcccagtcagggaagccgaaggcctggaggggcttccgggagcaggggctggagttcctctgccaggcaggaggctggcaccagacacccggcagagggaggcggcgagggcccagcaaggattctccccagcccctgtgcctgcgtctcctgcggcttctgtgcgcggaccgtgtcctgtgctgtgtagggaacgctgcctctctgctcgggacgtggattcctttcccctcctcctcgcccggctacttctgacgcaggtcgtcaggactccgcttgggtgtcacccgtgcaggaagcctcccttagtcaagggccctcggcacccgccccatatgtgactagcagccctcctgtgtatttcatcgcgcccccgttgtttatatcagccattccactcaccacccttctgggcaaccctttatctcccgctctgaaatcccatcgctgagggctgggacccctcctcagtgcttatccctgtttccccgcgcgagtctggcgcctggcgtgtggaaggcgctcagtaaacgtttgtggagcgaagaaacgacgcaaaggtgatgagcacgacgcagttaggaggctattggcccggcgcgggggaaaagggggaaggtcgggctcggggtggcaggaccccagagggcaggggtggctgccggggtgctcttggggcaaggtgggcgtcaaggcccccagcaaggttgggataaagtttctctccgaggcacagactgccgcctgcgggctcagcatttacctctcccttcctccttcctaacgcaacttcagcggagggctgagggctctactgcgcattacctggaaaacttatttcactccacggccctaagaggtgggccttattattagccacggccag

SEQ ID NO: 31242 - DNA, 989 bp, Artificial sequence
  DNA replication origin
cggctctgccgccgggggctgcagtgcaatggcgcgatctcacctcactgcggccttctgggctcaagcgatcctcccactgtgcccggcctgaagacagcctttagagaaagaagcagggggagttcttccgaggacagacaagatttctggagtttggaaagggtgagagactgggtcagcgaaaggaacattccggtctttatgttgggatgcaacgtatagatacagggatgagacccaaaagagccggcagaggtttgtcatcgtgctcgcaaggcaactgcgtatggctgatcccgtaaaggatacacatacctagagcggcacgtaaagatgcatccagcatgacgggtggagcacgatgcttggactcgagctctgctcctgtgcgttccgtgatcaatggcttatactacctgcacctcagtttttcccgggcaaaaaaggaagcttgctgccggtgcgttggcacctgccttaaagtgccagctactcagcgggctgaagaggaagaagttcctactaggaagacacgtggacacgtatgtttactgcagcactatttacaatagcaaagacttggaaccaactcgaatgcccatgaatgataggctggataaagaaagtgtggcacgtatacagcatggaattactacgcagccataaaaaaggatgagttcatgacctctgcgggaacgtggatgaagctggaaggcctcattctcagcaaactgacacaggaagcgaaaaccaaacaccgcatgttctcgctcctaagtgggagttgaacagcgagaacacatgggacacagggaggggaacatcacacgccgggccctgacggggcgtggggggcaaggggagagagagcattaggacaaatagccaacgcatgcggggcttcaaacctagacgactggtggataggtgcagcaaagcaccgtggcacacgtgtacctatgttccaaacctgcacgtcctgcaca

SEQ ID NO: 31243 - DNA, 779 bp, Artificial sequence
  DNA replication origin
ctcctctctctgtctctctctctctttccctctctctctctcttccccccccccgcctctccctcgctcttttggtttcccccaccccctcccaagttctggggtacatgtgcaggacgtgcaggtttggaacataggtacacgtgtgccacggtgctttgctgcacctatccaccagtcgtctaggtttgaagccccgcatgcgttggctatttgtcctaatgctctctctccccttgccccccacgccccgtcagggcccggcgtgtgatgttcccctccctgtgtcccatgtgttctcgctgttcaactcccacttaggagcgagaacatgcggtgtttggttttcgcttcctttcagtttgctgagaatgaggccttccagcatcatccacgtcccgcagagcgccctctgtgaaagggcggggcatgcaaattggaaatgaaagcccgggaacgccggaagaagcgcgggtgtaagatttcccttttcaaaaggcggaagaataaggaaatcagcccgagagtgtaagggcgtcaatagcgctgtggacgagacagagggaatggggcaaaggagcgaggctggggctctcaccgcgacttgaatgtggatgagagtgggacggtgacggcgggcgcgaaggcgagcgcatcgcttctcggccttttggctaagatcaagtgtagtatctgttcttatcagtttaatatctgatacgtcctctatccgaggacaatatattaaatggatttttggagcagggagatggaatagg

SEQ ID NO: 31244 - DNA, 830 bp, Artificial sequence
  DNA replication origin
gtccgcgcacagaagccgcaggagacgcaggcacaggggctggggagaatccttgctgggccctcgccgcctccctctgccgggtgtctggtgccagcctcctgcctggcagaggaactccagcccctgctcccggaagcccctccaggccttcggcttccctgactgggcatgggcccctcgtcccctcgtcccctcgggtacggggccggtctccccgcccgcgggcggcgaagtaaaggcccagcgcagcccgcgctcctgccctggggcctcgtctttctccaggaaaacgtggaccgctctccgccgacaggtctcttccacagacccctgtcgccttcgcccccggtctcttccggttctgtcttttcgctgggctcgatacgaacaaggaagtcgcccccagcggagccccggctcccccaggcagaaggcggccccggggggcggagtcaacggcggaggccacgccctctgtgaaaggggcgggggcatgcaaattggaaatgaaagcccgggaacgccggaagaagcacgggtgtaagatttcccttttcaaaggcggagaataagaaatcagcccgagagtgtaagggcgtcaatagcgctgtggacgagacagagggaatggggcaaggagcgaggctggggctctcaccgcgacttgaatgtggatgagagtgggacggtgacggcgggcgcgaaggcgagcgcatcgcttctcggccttttggctaagatcaagtgtagtatctgttcttatcagtttaatatctgatacgtcctctatccgaggacaatatattaaatggatttttggagcaggg

SEQ ID NO: 31245 - DNA, 1343 bp, Artificial sequence
  DNA replication origin
cccagcctcgctccttgccccattccctctgtctcgtccacagcgctattgacgcccttacactctcgggctgatttcttattctccgcctttgaaaagggaaatcttacacccgtgcttcttccggcgttcccgggctttcatttccaatttgcatgcccccgcccctttcacagagggcgtggcctccgccgttgactccgccccccggggccgccttctgcctgggggagccggggctccgctgggggcgacttccttgttcgtatcgagcccagcgaaaagacagaaccggaagagaccgggggcgaaggcgacaggggtctgtggaagagacctgtcggcggagagcggtccacgttttcctggagaaagacgaggccccagggcaggagcgcgggctgcgctgggcctttacttcgccgcccgcgggcggggagaccggccccgtacccgaggggacgaggggacgaggggcccatgcccagtcagggaagccgaaggcctggaggggcttccgggagcaggggctggagttcctctgccaggcaggaggctggcaccagacacccggcagagggaggcggcgagggcccagcaaggattctccccagcccctgtgcctgcgtctcctgcggcttctgtgcgcggaccgtgtcctgtgctgtgtagggaacgctgcctctctgctcgggacgtggattcctttcccctcctcctcgcccggctacttctgacgcaggtcgtcaggactccgcttgggtgtcacccgtgcaggaagcctcccttagtcaagggccctcggcacccgccccatatgtgactagcagccctcctgtgtatttcatcgcgcccccgttgtttatatcagccattccactcaccacccttctgggcaaccctttatctcccgctctgaaatcccatcgctgagggctgggacccctcctcagtgcttatccctgtttccccgcgcgagtctggcgcctggcgtgtggaaggcgctcagtaaacgtttgtggagcgaagaaacgacgcaaaggtgatgagcacgacgcagttaggaggctattggcccggcgcgggggaaaagggggaaggtcgggctcggggtggcaggaccccagagggcaggggtggctgccggggtgctcttggggcaaggtgggcgtcaaggcccccagcaaggttgggataaagttcctctccgaggcacagactgccgcctgcgggctcagcatttacctctcccttcctccttcctaacgcaacttcagcggagggctgagggctctactgcgcattacctggaaaacttatttcactccacggccctaagaggt

SEQ ID NO: 31246 - DNA, 1230 bp, Artificial sequence
  DNA replication origin
acgcgaagagaaaacccacagacccggtaggggtggaccctacattatctcagctacaacataatcaggatattcacgtggactactgagtctttcggtgcccccttgctgttttagttttgtcctgcggccgagtgtttccctcgcttcacgccaacacaatctccgccgccctgtcttgtcatccccattctacagcccagcacggtgtagtatggcagccgctagccacaggtatctagggagccctggaaatgtggtcagttctaatggagctgtgctgtaagtgtgaaatacacgtgggattttgacggcagtgggagcaaaattctcccaatttttttttttttttttttttttcagacggaggttccgctcttgttacccagcctggagtccagtggcgcgatctaggctctctgcaacctccgcctcccgggttcaagcgattccccttagatacagggatgagacccaaaagagccggcagaggtttttcatcgtgctcgcaagggcaactgcccggtggctgatcccgtaaaggatacacatacctagagcggagcctaaagatgcatccagcatgacgggtggagccacgatgcttggactcgagctctgctcctgtgcgttccgtgatcaatggcttatactacctgcacctcagtttttcccgggcaaaaaaggaagcttgctgccggtgcgttggcacctgccttaaagtgccagctactcagcgggctgaagaggaagaagttcctactaggaagacacgtggacacgtatgtttactgcagcactatttacaatagcaaagacttggaaccaactcgaatgcccatgaatgataggctggataaagaaagtgtggcacgtatacagcatggaattactacgcagccataaaaaaggatgagttcatgacctctgcgggaacgtggatgaagctggaaggcctcattctcagcaaactgacacaggaagcgaaaaccaaacaccgcatgttctcgctcctaagtgggagttgaacagcgagaacacatgggacacagggaggggaacatcacacgccgggccctgacggggcgtggggggcaaggggagagagagcattaggacaaatagccaacgcatgcggggcttcaaacctagacgactggtggataggtgcagcaaagcaccgtggcacacgtgtacctatgttccaaacctgcacgtcctgcacatgta

SEQ ID NO: 31247 - DNA, 904 bp, Artificial sequence
  DNA replication origin
gaggaggggaaaggaatccacgtcccgagcagagaggcagcgttccctacacagcacaggacacggtccgcgcacagaagccgcaggagacgcaggcacaggggctggggagaatccttgctgggccctcgccgcctccctctgccgggtgtctggtgccagcctcctgcctggcagaggaactccagcccctgctcccggaagcccctccaggccttcggcttccctgactgggcatgggcccctcgtcccctcgtcccctcgggtacggggccggtctccccgcccgcgggcggcgaagtaaaggcccagcgcagcccgcgctcctgccctggggcctcgtctttctccaggaaaacgtggaccgctctccgccgacaggtctcttccacagacccctgtcgccttcgcccccggtctcttccggttctgtcttttcgctggctcgatacgaacaaggaagtcgcccccagcggagccccggctcccccaggcagaggcggccccgggggcggagtcaacggcggaggccacgccctctgtgaaagggcggggcatgcaaattcgaaatgaaagcccgggaacgccggaagaagcacgggtgtaagatttcccttttcaaaggcggagaataagaaatcagcccgagagtgtaagggcgtcaatagcgctgtggacgagacagagggaatggggcaaggagcgaggctggggctctcaccgcgacttgaatgtggatgagagtgggacggtgacggcgggcgcgaaggcgagcgcatcgcttctcggccttttggctaagatcaagtgtagtatctgttcttatcagtttaatatctgatacgtcctctatccgaggacaatatattaaatggatttttggagcagggagatggaataggag

SEQ ID NO: 31248 - DNA, 974 bp, Artificial sequence
  DNA replication origin
cccagcctcgctccttgccccattccctctgtctcgtccacagcgctattgacgcccttacactctcgggctgatttcttattctccgcctttgaaaagggaaatcttacacccgtgcttcttccggcgttcccgggctttcatttcgaatttgcatgccccgccctttcacagagggcgtggcctccgccgttgactccgcccccggggccgcctctgcctgggggagccggggctccgctgggggcgacttccttgttcgtatcgagccagcgaaaagacagaaccggaagagaccgggggcgaaggcgacaggggtctgtggaagagacctgtcggcggagagcggtccacgttttcctggagaaagacgaggccccagggcaggagcgcgggctgcgctgggcctttacttcgccgcccgcgggcggggagaccggccccgtacccgaggggacgaggggacgaggggcccatgcccagtcagggaagccgaaggcctggaggggcttccgggagcaggggctggagttcctctgccaggcaggaggctggcaccagacacccggcagagggaggcggcgagggcccagcaaggattctccccagcccctgtgcctgcgtctcctgcggcttctgtgcgcggaccgtgtcctgtgctgtgtagggaacgctgcctctctgctcgggacgtggattcctttcccctcctcctcgcctggctacttctgacgcaggtcgtcaggactccgcttgggtgtcacccgtgcaggaagcctcccttagtcaagggccctcggcacccgccccatatgtgactagcagccctcctgtgtatttcatcgcgcccccgttgtttatatcagccattccactcaccacccttctgggcaaccctttatctcccgctctgaaatcccatcgctgagggctgggacccctcctcagtgcttatccctgtttccccgcgcgag

SEQ ID NO: 31249 - DNA, 1729 bp, Artificial sequence
  DNA replication origin
tctgcccagctgccgcctcccaaagtgttgcttgcgattacaggcttgagccaccgctcaccctggcttttttttttttttttccagacaaactctcgctctgtcgcccaggctggagtgcagtggcgcgatctcggctcactgcagcctctacctcccgggttccagcgattctcctgcctcagcctcctgggtagctgggattacaggcgcaggccaccacgcccggctaatttttgtatttttagggggtttcgccatgtcggccaggctggtctcgagctcctgacctcaggcgatccgcccgcctcggcctcccaaagcgctgggattacaggcgtaagccaccgcgccgggctctttcattctgtctttattttctgagatagagtcctgctcggacgctcaggttggactgcaacggcgtgatctcggctcgctgaaacttccgcctcccgggttcaagcgattctcctgtctcagcctcccgagtagctgggattattgacggcagcaccacgcccggctactttttgtggtttttgtatcttctgtcttctgctctttagtaccgcatagagccgcagaagactagcgagtcgaacaaacggcccctcttgcagcagttgttgatcacgggctgccccccggtactcatcctgtgtctctcgtccaaatccccgctcctcctcagctatcacctctgccgatgctggtggtttccctgggtaccgggaaccaaactctcattccccagcgctaagccccccgtgccaggcccttctcaagtcagggttcctgcacattcacagttacggtggccctgggagtaacacctggcacccaaacaggtcaccagagtccacacatagtccacctgccctccctgcgtaagatcagctcttcctcctcccgacgatagatcagggtcaatgatccctgccaagatggcgactgctccagcctgctggtccaacctgtccagccacagctgttgctcgaaggcttgaagttcaatgggaccctctcccgctttctacaaactggttcctttatttttatgtttatttatttgggacggggtctggctctgtcacccaaggctggagtgcagtggtgcaatcactgctcactgcagcatccacctcccagcgtccacccatcctcctggcctcagcctccggaacagctggggtacaggtacgccccagcccgaacaggttttcactaggttgcctgggctctttctttctttgtctgtgtttgtttgttggttggttggttggttggttggtttttgtttgtttgtttcgagacggggctccggctctgccgccgggggctgcagtgcaatggcgcgatctcacctcactgcggccttctgggctcaagcgatcctcccactgtgcccggcctgaagacagcctttagagaaagaagcagggggagttcttccgaggacagacaagatttctggagtttggaaagggtgagagactgggtcagcgaaaggaacattccggtctttatgttgggatgcaacgtatagatacagggatgagacccaaaagagccggcagaggtttgtcatcgtgctcgcaaggcaactgccggtggctgatcccgtaaaggatacacatacctagagcggagcctaaagatgcatccagcatgacgggtggagccacgatgcttggactcgactctgctcctgtgcgttccgtgatca

SEQ ID NO: 31250 - DNA, 993 bp, Artificial sequence
  DNA replication origin
tccggctctgccgccgggggctgcagtgcaatggcgcgatctcacctcactgcggccttctgggctcaagcgatcctcccactgtgcccggcctgaagacagcctttagagaaagaagcagggggagttcttccgaggacagacaagatttctggagtttggaaagggtgagagactgggtcagcgaaaggaacattccggtctttatgttgggatgcaacgtatagatacagggatgagacccaaaagagccggcagaggtttgtcatcgtgctcgcaaggcaactgccggtggctgatcccgtaaaggatacacatacctagagcggagcctaaagatgcatccagcatgacgggtggagccacgatgcttggactcgactctgctcctgtgcgttccgtgatcaatggcttatactacctgcacctcagtttttcccgggcaaaaaaggaagcttgctgccggtgcgttggcacctgccttaaagtgccagctactcagcgggctgaagaggaagaagttcctactaggaagacacgtggacacgtatgtttactgcagcactatttacaatagcaaagacttggaaccaactcgaatgcccatgaatgataggctggataaagaaagtgtggcacgtatacagcatggaattactacgcagccataaaaaaggatgagttcatgacctctgcgggaacgtggatgaagctggaaggcctcattctcagcaaactgacacaggaagcgaaaaccaaacaccgcatgttctcgctcctaagtgggagttgaacagcgagaacacatgggacacagggaggggaacatcacacgccgggccctgacggggcgtggggggcaaggggagagagagcattaggacaaatagccaacgcatgcggggcttcaaacctagacgactggtggataggtgcagcaaagcaccgtggcacacgtgtacctatgttccaaacctgcacgtcctgcacatg

SEQ ID NO: 31251 - DNA, 1216 bp, Artificial sequence
  DNA replication origin
tgttgattgctgaatgatttagggcgggggggtgggcaccccctgaaattctgccctggaggagtggcctcaccctaaccctggccgtggctaataataaggcccacctcttagggccgtggagtgaaataagttttccaggtaatgcgcagtagagcccctcagccctccgctgaagttgcgttagggaaggacgggagaggtaaatgctgagcccgcaggcgccagtctgtgctcggaaagaactttatccagcttgctgggggttcccccgtcccctcgggtacggggcccggttacttacccgggcggcgaagtaaaaggcccacgcagcccgcgctcctgcctggggcctcgtctttctccaggaaaacgtggaccgctctccgccgacaggtctcttccacagacccctgtcgccttcgcccccggtctcttccggttctgtcttttcgctggctcgatacgaacaaggaagtcgcccccagcggagccccggctcccccaggcagaggcggccccgggggcggagtcaacggcggaggccacgccctctgtgaaagggcggggcatgcaaattcgaaatgaaagcccgggaacgccggaagaagcacgggtgtaagatttcccttttcaaaggcggagaataagaaatcagcccgagagtgtaagggcgtcaatagcgctgtggacgagacagagggaatggggcaaggagcgaggctggggctctcaccgcgacttgaatgtggatgagagtgggacggtgacggcgggcgcgaaggcgagcgcatcgcttctcggccttttggctaagatcaagtgtagtatctgttcttatcagtttaatatctgatacgtcctctatccgaggacaatatattaaatggatttttggagcagggagatggaataggagcttgctccgtccactccacgcatcgacctggtattgcagtacctccaggaacggtgcaccccctccggggatacaacgtgtttcctaaaagtagagggaggtaagagacggtagcacctgcggggcggcttgcacgccgagtgcctgtgacgcgccggcttgacttaactgcttccctgaagtaccgtgaggttcctgatgtgcgggcggtagacggtaggcttatgtggcacgctttcgtttccaccgtggctactgcgctttgggaaggccacgacctcctcctttggggaggtc

SEQ ID NO: 31252 - DNA, 1070 bp, Artificial sequence
  DNA replication origin
cgtgtgtgcggagacgagagatcgaagagataaagacagaagacaaagagataggaagaaagacagctgggcccgggggaccactgccaccaaagcgcggagacagacaggtagtggccccgagtgcctggaggcgctgctatttattgtagtcaaggcaagggggcagggtaaggagtgccagtcatctccaatgatcgataggtcacgcgagtcacgtgtgcactggacagggggcctttccctttgtggtagccgaggtggagagggaggacagcaaacgtcagcgcaagctgaaacaacttatcagaaagatcgaagactgtggtactcctactagtatgctactcgtacctgtaccccagctgttccggagctgaggccaggaggatgggtggacgctgggaggtggatgctgctgtgagcagtgattgcaccactgcactccagcctgggtgacagagccagaccccgtcccaaataaataaacataaaaataaaggaaccagtttgtagaaagcgggagagggtcccattgaacttcaagccttcgagcaacagctgtggctggacaggttggaccagcaggctggagcagtcgccatcttggcagggatcattgaccctgatctatcgtcgggaggaggaagagctgatcttacgcagggagggcaggtggactatgtgtggactctggtgacctgtttgggtgccaggtgttactcccagggccacccgtaactgtgaatgtgcaggaaccctgacttgagaagggcctggccacgggggggcttagggcccctggggaatgagagtttggttcccggtacccagggaaaccaccagcatcggcagaggtgatagctgaggaggagcggggatttggacgagagacacaggatgagtaccggggggcagccccgtgatcaacaactgctgcaagaggggccgtttgttcgactcgctagtcttctgcggctctatgcggtactaaagagcagaagacagaagatacaaaaaccacaaaaagtagccgggcgtggtgctgcccgtcaataatcccagctact

SEQ ID NO: 31253 - DNA, 832 bp, Artificial sequence
  DNA replication origin
actataatttatgttgattgctgaatgatttagggcgcgggttggcaccccctgaaattctgccctggaggagtgcctcaccctaaccctggcatggctaataataaggcccacctcttagggccgtggagtgaaataagttttccaggtaatgcgcagtagagccctcagccctccgctgaagttgcgttaggaaggaggaagggagaggtaaatgctgagcccaggcggcagtctgtgcctcggagagaaactttatcccaaccttgctggggccttgacgcccaccttgccccaagagcacccctgcagccaccccatgcctctggggtcctgccaccccgagcccgaccttcccctttttcccccgcgccgggccaatagcctcctaactgcgtcgtgctcatcacctttgcgtcgtttcttcgctccacaaacgtttactgagcgccttccacagggggcctggccacgggggggctttaggcccctggggaatgagagttttggttcccggtacccagggaaaccaccagcatcggcagaggtgatagctgaggaggagcggggatttggacgagagacacaggatgagtaccggggggcagccccgtgatcaacaactgctgcaagaggggccgtttgttcgactcgctagtcttctgcggctctatgcggtactaaagagcagaagacagaagatacaaaaaccacaaaaagtagccgggcgtggtgctgcccgtcaataatcccagctactcgggaggctgagacaggagaatcgcttgaacccgggaggcggaagtttcagcgagccgagatcacgccgttg

SEQ ID NO: 31254 - DNA, 988 bp, Artificial sequence
  DNA replication origin
ccctttccaaactccagaaatcttgtctgtcctcggaagaactccccctgcttctttctctaaaggctgtcttcaggccgggcacagtgggaggatcgcttgagcccagaaggccgcagtgaggtgagatcgcgccattgcactgcagcccccggcggcagagccggagccccgtctcgaaacaaacaaacaaaaaccaaccaaccaaccaaccaaccaacaaacaaacacagacaaagaaagaaagagcccaggcaacctagtgaaaacctgttcgggctggggcgtacctgtaccccagctgttccggaggctgaggccaggaggatgggtggacgctgggaggtggatgctgcagtgagcagtgattgcaccactgcactccagcctgggtgacagagccagaccccgtcccaaataaataaacataaaaataaaggaaccagtttgtagaaagcggggagagggtcccattgaacttcaagccttcgagcaacagctgtggctggacaggtttggaccagcaggctggagcagtcgccatcttggcagggatcattgaccctgatctatcgtcgggaggaggaagagctgatcttacgcagggagggcaggtggactatgtgtggactctggtgacctgtttgggtgccaggtgttactcccagggccacccgtaactgtgaatgtgcaggaaccctgacttgagaagggcctggccacggggggcttaggcccctggggaatgagagtttggttcccggtacccagggaaaccaccagcatcggcagaggtgatagctgaggaggagcggggatttggacgagagacacaggatgagtaccggggggcagccccgtgatcaacaactgctgcaagaggggccgtttgttcgactcgctagtcttctgcggctctatgcggtactaaagagcagaagacagaagatacaaaaaccacaaaaagtagccgggcgtggtgctgccc

SEQ ID NO: 31255 - DNA, 1178 bp, Artificial sequence
  DNA replication origin
tctgctctttagtaccgcatagagccgcagaagactagcgagtcgaacaaacggcccctcttgcagcagttgttgatcacggggctgccccccggtactcatcctgtgtctctcgtccaaatccccgctcctcctcagctatcacctctgccgatgctggtggtttccctgggtaccgggaaccaaactctcattccccaggggcctaagccccccgtggccaggcccttctcaagtcagggttcctgcacattcacagttacgggtggccctgggagtaacacctggcacccaaacaggtcaccagagtccacacatagtccacctgccctccctgcgtaagatcagctcttcctcctcccgacgatagatcagggtcaatgatccctgccaagatggcgactgctccagcctgctggtccaaacctgtccagccacagctgttgctcgaaggcttgaagttcaatgggaccctctccccgctttctacaaactggttcctttatttttatgtttatttatttgggacggggtctggctctgtcacccaggctggagtgcagtggtgcaatcactgctcactgcagcatccacctcccagcgtccacccatcctcctggcctcagcctccggaacagctggggtacaggtacgccccagcccgaacaggttttcactaggttgcctgggctctttctttctttgtctgtgtttgtttgttggttggttggttggttggttggtttttgtttgtttgtttcgagacggggctccggctctgccgccgggggctgcagtgcaatggcgcgatctcacctcactgcggccttctgggctcaagcgatcctcccactgtgcccggcctgaagacagcctttagagaaagaagcagggggagttcttccgaggacagacaagatttctggagtttggaaagggtgagagactgggtcagcgaaaggaacattccggtctttatgttgggatgcaacgtatagatacagggatgagacccaaaagagccggcagaggtttgtcatcgtgctcgcaaggcaactgccggtggctgatcccgtaaaggatacacatacctagagcggagcctaaagatgcatccagcatgacgggtggagccacgatgcttggactcgagctctgctcctgtgcgttccgtgatc

SEQ ID NO: 31256 - DNA, 970 bp, Artificial sequence
  DNA replication origin
gccgggggctgcagtgcaatggcgcgatctcacctcactgcggccttctgggctcaagcgatcctcccactgtgcccggcctgaagacagcctttagagaaagaagcagggggagttcttccgaggacagacaagatttctggagtttggaaagggtgagagactgggtcagcgaaaggaacattccggtctttatgttgggatgcaacgtatagatacagggatgagacccaaaagagccggcagaggtttgtcatcgtgctcgcaaggcaactgccggtggctgatcccgtaaaggatacacatacctagagcggagcctaaagatgcatccagcatgacgggtggagccacgatgcttggactcgagctctgctcctgtgcgttccgtgatcaatggcttatactacctgcacctcagtttttcccgggcaaaaaaggaagcttgctgccggtgcgttggcacctgccttaaagtgccagctactcagcgggctgaagaggaagaagttcctactaggaagacacgtggacacgtatgtttactgcagcactatttacaatagcaaagacttggaaccaactcgaatgcccatgaatgataggctggataaagaaagtgtggcacgtatacagcatggaattactacgcagccataaaaaaggatgagttcatgacctctgcgggaacgtggatgaagctggaaggcctcattctcagcaaactgacacaggaagcgaaaaccaaacaccgcatgttctcgctcctaagtgggagttgaacagcgagaacacatgggacacagggaggggaacatcacacgccgggccctgacggggcgtggggggcaaggggagagagagcattaggacaaatagccaacgcatgcggggcttcaaacctagacgactggtggataggtgcagcaaagcaccgtggcacacgtgtacctatgttccaaacctgcac

SEQ ID NO: 31257 - DNA, 926 bp, Artificial sequence
  DNA replication origin
ggcgaggaggaggggaaaggaatccacgtcccgagcagagaggcagcgttccctacacagcacaggacacggtccgcgcacagaagccgcaggagacgcaggcacaggggctggggagaatccttgctgggccctcgccgcctccctctgccgggtgtctggtgccagcctcctgcctggcagaggaactccagcccctgctcccggaagcccctccaggccttcggcttccctgactgggcatgggcccctcgtcccctcgtcccctcgggtacggggccggtctctccgacagcgggtggcgatgtaaaggtccagcgcagcccgcgctcctgcattggggcttggtctttcttcaggaaaacggggtccgctctctgtcgacagttatcttccacagaacccggtcgcattcgcgcccggtctcttccgggtctgttttttcgggggctcgattcgaacaaggaagtcgcccccagcggagccccggctcccccaggcagaggcggccccgggggcggagtcaacggcggaggccacgccctctgtgaaagggcggggcatgcaaattcgaaatgaaagcccgggaacgccggaagaagcacgggtgtaagatttcccttttcaaaggcggagaataagaaatcagcccgagagtgtaagggcgtcaatagcgctgtggacgagacagagggaatggggcaaggagcgaggctggggctctcaccgcgacttgaatgtggatgagagtgggacggtgacggcgggcgcgaaggcgagcgcatcgcttctcggccttttggctaagatcaagtgtagtatctgttcttatcagtttaatatctgatacgtcctctatccgaggacaatatattaaatggatttttggagcagggagatggaataggagcttgctccgtccactc

SEQ ID NO: 31258 - DNA, 1380 bp, Artificial sequence
  DNA replication origin
tcaagtcgcggtgagagccccagcctcgctccttgccccattccctctgtctcgtccacagcgctattgacgcccttacactctcgggctgatttcttattctccgcctttgaaaagggaaatcttacacccgtgcttcttccggcgttcccgggctttcatttcgaatttgcatgccccgccctttcacagagggcgtggcctccgccgttgactccgcccccggggccgcctctgcctgggggagccggggctccgctgggggcgacttccttgttcgaatcgagcccccgaaaaaacagacccggaagagaccgggcgcgaatgcgaccgggttctgtggaagataactgtcgacagagagcggaccccgttttcctgaagaaagaccaagccccaatgcaggagcgcgggctgcgctggacctttacatcgccacccgctgtcggagagaccggccccgtacccgaggggacgaggggacgaggggcccatgcccagtcagggaagccgaaggcctggaggggcttccgggagcaggggctggagttcctctgccaggcaggaggctggcaccagacacccggcagagggaggcggcgagggcccagcaaggattctccccagcccctgtgcctgcgtctcctgcggcttctgtgcgcggaccgtgtcctgtgctgtgtagggaacgctgcctctctgctcgggacgtggattcctttcccctcctcctcgcccggctacttctgacgcaggtcgtcaggactccgcttgggtgtcacccgtgcaggaagcctcccttagtcaagggccctcggcacccgccccatatgtgactagcagccctcctgtgtatttcatcgcgcccccgttgtttatatcagccattccactcaccacccttctgggcaaccctttatctcccgctctgaaatcccatcgctgagggctgggacccctcctcagtgcttatccctgtttccccgcgcgagtctggcgcctggcgtgtggaaggcgctcagtaaacgtttgtggagcgaagaaacgacgcaaaggtgatgagcacgacgcagttaggaggctattggcccggcgcgggggaaaagggggaaggtcgggctcggggtggcaggaccccagagggcaggggtggctgccggggtgctcttggggcaaggtgggcgtcaaggcccccagcaaggttgggataaagtttctctccgaggcacagactgccgcctgcgggctcagcatttacctctcccttcctccttcctaacgcaacttcagcggagggctgagggctctactgcgcattacctggaaaacttatttcactccacggccctaagaggtgggccttattattagccacggcca

SEQ ID NO: 31259 - DNA, 859 bp, Artificial sequence
  DNA replication origin
ctgcgtagtaattccatgctgtatacgtgccacactttctttatccagcctatcattcatgggcattcgagttggttccaagtctttgctattgtaaatagtgctgcagtaaacatacgtgtccacgtgtcttcctagtaggaacttcttcctcttcagcccgctgagtagctggcactttaaggcaggtgccaacgcaccggcagcaagcttcctttttttgcccgggaaaaactgaggtgcaggtagtataagccattgatcacggaacgcacaggagccaaagctcgagtcccaagcatcgtgggctccaccccgtcatgctggatgcatctttaggctccgctcaaggcatgtgtatcctttacggggatcagccaccggcagttgcacttgcgagcacgatgacaaaaccctctgccgggctctttgggggcggagtcaacggcggaggcccaccgccctctgtgaaagggcgggggcatgcaaattcgaaaatgaaagccccgggaacgccggaagaagcacgggtgtaagatttcccttttcaaaaggcggagaataagaaatcagcccgagagtgtaagggcgtcaatagcgctgtggacgagacagagggaatggggcaaggagcgaggctggggctctcaccgcgacttgaatgtggatgagagtgggacggtgacggcgggcgcgaaggcgagcgcatcgcttctcggccttttggctaagatcaagtgtagtatctgttcttatcagtttaatatctgatacgtcctctatccgaggacaatatattaaatggatttttggagcagggagatggaataggagcttgctccgtccactccacgcatcg

SEQ ID NO: 31260 - DNA, 975 bp, Artificial sequence
  DNA replication origin
gccgagggcccttgactaagggaggcttcctgcacgggtgacacccaagcggagtcctgacgacctgcgtcagaagtagccgggcgaggaggaggggaaaggaatccacgtcccgagcagagaggcagcgttccctacacagcacaggacacggtccgcgcacagaagccgcaggagacgcaggcacaggggctggggagaatccttgctgggccctcgccgcctccctctgccgggtgtctggtgccagcctcctgcctggcagaggaactccagcccctgctcccggaagcccctccaggccttcggcttccctgactgggcatgggcccctcgtcccctcgtcccctcgggtacggggccggtctccccgcccgcgggcggcgaagtaaaggcccagcgcagcccgcgctcctgccctggggcctcgtctttctccaggaaaacgtggaccgctctccgccgacaggtctcttccacagacccctgtcgccttcgcccccggtctcttccggttctgtcttttcgctggctcgatacgaacaaggaagtcgcccccagcggagccccggctcccccaggcagaggcggccccgggggcggagtcaacggcggaggccacgccctctgtgaaagggcggggcatgcaaattcgaaatgaaagcccgggaacgccggaagaagcacgggtgtagatttcccttttcaaggcggagaataagaaatcagcccgagagtgtaagggcgtcaatagcgctgtggacgagacagagggaatggggcaaggagcgaggctggggctctcaccgcgacttgaatgtggatgagagtgggacggtgacggcgggcgcgaaggcgagcgcatcgctttctcggccttttggctaagatcaagtgtagtatctgttcttatcagtttaatatctgatacgtcctctatccgaggacaatatattaaatggatttttggagcag

SEQ ID NO: 31261 - DNA, 1320 bp, Artificial sequence
  DNA replication origin
tcgcggtgagagccccagcctcgctccttgccccattccctctgtctcgtccacagcgctattgacgcccttacactctcgggctgatttcttattctccgccttgaaaagggaaatctacacccgtgcttcttccggcgttcccgggctttcatttcgaatttgcatgccccgccctttcacagagggcgtggcctccgccgttgactccgcccccggggccgcctctgcctgggggagccggggctccgctgggggcgacttccttgttcgtatcgagccagcgaaaagacagaaccggaagagaccgggggcgaaggcgacaggggtctgtggaagagacctgtcggcggagagcggtccacgttttcctggagaaagacgaggccccagggcaggagcgcgggctgcgctgggcctttacttcgccgcccgcgggcggggagaccggccccgtacccgaggggacgaggggacgaggggcccatgcccagtcagggaagccgaaggcctggaggggcttccgggagcaggggctggagttcctctgccaggcaggaggctggcaccagacacccggcagagggaggcggcgagggcccagcaaggattctccccagcccctgtgcctgcgtctcctgcggcttctgtgcgcggaccgtgtcctgtgctgtgtagggaacgctgcctctctgctcgggacgtggattcctttcccctcctcctcgcccggctacttctgacgcaggtcgtcaggactccgcttgggtgtcacccgtgcaggaagcctcccttagtcaagggccctcggcacccgccccatatgtgactagcagccctcctgtgtatttcatcgcgcccccgttgtttatatcagccattccactcaccacccttctgggcaaccctttatctcccgctctgaaatcccatcgctgagggctgggacccctcctcagtgcttatccctgtttccccgcgcgagtctggcgcctggcgtgtggaaggcgctcagtaaacgtttgtggagcgaagaaacgacgcaaaggtgatgagcacgacgcagttaggaggctattggcccggcgcgggggaaaagggggaaggtcgggctcggggtggcaggaccccagagggcaggggtggctgccggggtgctcttggggcaaggtgggcgtcaaggcccccagcaaggttgggataaagtttctctccgaggcacagactgccgcctgcgggctcagcatttacctctcccttcctccttcctaacgcaacttcagcggagggctgagggctctactgcgcattacctggaaa

SEQ ID NO: 31262 - DNA, 889 bp, Artificial sequence
  DNA replication origin
aggaggggaaaggaatccacgtcccgagcagagaggcagcgttccctacacagcacaggacacggtccgcgcacagaagccgcaggagacgcaggcacaggggctggggagaatccttgctgggccctcgccgcctccctctgccgggtgtctggtgccagcctcctgcctggcagaggaactccagcccctgctcccggaagcccctccaggccttcggcttccctgactgggcatgggcccctcgtcccctcgtcccctcgggtacggggccggtctccccgcccgcgggcggcgaagtaaaggcccagcgcagcccgcgctcctgccctggggcctcgtctttctccaggaaaacgtggaccgctctccgccgacaggtctcttccacagacccctgtcgccttcgcccccggtctcttccggttctgtcttttcgctggctcgatacgaacaaggaagtcgcccccagcggagccccggctcccccaggcagaggcggccccgggggcggagtcaacggcggaggccacgccctctgtgaaagggcggggcatgcaaattcgaaatgaaagcccgggaacgccggaagaagcacgggtgtaagatttcccttttcaaaggcggagaataagaaatcagcccgagagtgtaagggcgtcaatagcgctgtggacgagacagagggaatggggcaaggagcgaggctggggctctcaccgcgacttgaatgtggatgagagtgggacggtgacggcgggcgcgaaggcgagcgcatcgcttctcggccttttggctaagatcaagtgtagtatctgttcttatcagtttaatatctgatacgtcctctatccgaggacaatatattaaatggatttttggagcaggg

SEQ ID NO: 31263 - DNA, 1385 bp, Artificial sequence
  DNA replication origin
cccactctcatccacattcaagtcgcggtgagagccccagcctcgctccttgccccattccctctgtctcgtccacagcgctattgacgcccttacactctcgggctgatttcttattctccgcctttgaaaagggaaatcttacacccgtgcttcttccggcgttcccgggctttcatttcgaatttgcatgccccgccctttcacagagggcgtggcctccgccgttgactccgcccccggggccgcctctgcctgggggagccggggctccgctgggggcgacttccttgttcgtatcgagccagcgaaaagacagaaccggaagagaccgggggcgaaggcgacaggggtctgtggaagagacctgtcggcggagagcggtccacgttttcctggagaaagacgaggccccagggcaggagcgcgggctgcgctgggcctttacttcgccgcccgcgggcggggagaccggccccgtacccgaggggacgaggggacgaggggcccatgcccagtcagggaagccgaaggcctggaggggcttccgggagcaggggctggagttcctctgccaggcaggaggctggcaccagacacccggcagagggaggcggcgagggcccagcaaggattctccccagcccctgtgcctgcgtctcctgcggcttctgtgcgcggaccgtgtcctgtgctgtgtagggaacgctgcctctctgctcgggacgtggattcctttcccctcctcctcgcccggctacttctgacgcaggtcgtcaggactccgcttgggtgtcacccgtgcaggaagcctcccttagtcaagggccctcggcacccgccccatatgtgactagcagccctcctgtgtatttcatcgcgcccccgttgtttatatcagccattccactcaccacccttctgggcaaccctttatctcccgctctgaaatcccatcgctgagggctgggacccctcctcagtgcttatccctgtttccccgcgcgagtctggcgcctggcgtgtggaaggcgctcagtaaacgtttgtggagcgaagaaacgacgcaaaggtgatgagcacgacgcagttaggaggctattggcccggcgcgggggaaaagggggaaggtcgggctcggggtggcaggaccccagagggcaggggtggctgccggggtgctcttggggcaaggtgggcgtcaaggcccccagcaaggttgggataaagtttctctccgaggcacagactgccgcctgcgggctcagcatttacctctcccttcctccttcctaacgcaacttcagcggagggctgagggctctactgcgcattacctggaaaacttatttcactccacggccctaagaggtgggccttattat

SEQ ID NO: 31264 - DNA, 1830 bp, Artificial sequence
  DNA replication origin
ggctaactttgtatttttagtacagatggggtttctccacgttgctcaggctggtctccaactcccgacctccggtgatctgcccagctgccgcctcccaaagtgttgcttgcgattacaggcttgagccaccgctcaccctggctttttttttttttttttccagacaaactctcgctctgtcgcccaggctggagtgcagtggcgcgatctcggctcactgcagcctctacctcccgggttccagcgattctcctgcctcagcctcctgggtagctgggattacaggcgcaggccaccacgcccggctaatttttgtatttttagggggtttcgccatgtcggccaggctggtctcgagctcctgacctcaggcgatccgcccgcctcggcctcccaaagcgctgggattacaggcgtaagccaccgcgccgggctctttcattctgtctttattttctgagatagagtctcgctcggacgctcaggttggactgcaacggcgtgatctcggctcgctgaaacttccgcctcccgggttcaagcgattctcctgtctcagcctcccgagtagctgggattattgacgggcagcaccacgcccggctactttttgtggtttttgtatcttctgtcttctgctctttagtaccgcatagagccgcagaagactagcgagtcgaacaaacggcccctcttgcagcagttgttgatcacggggctgccccccggtactcatcctgtgtctctcgtccaaatccccgctcctcctcagctatcacctctgccgatgctggtggtttccctgggtaccgggaaccaaactctcattccccaggggcctaagccccccgtggccaggcccttctcaagtcagggttcctgcacattcacagttacgggtggccctgggagtaacacctggcacccaaacaggtcaccagagtccacacatagtccacctgccctccctgcgtaagatcagctcttcctcctcccgacgatagatcagggtcaatgatccctgccaagatggcgactgctccagcctgctggtccaacctgtccagccacagctgttgctcgaaggcttgaagttcaatgggaccctctcccgctttctacaaactggttcctttatttttatgtttatttatttgggacggggtctggctctgtcacccaggctggagtgcagtggtgcaatcactgctcactgcagcatccacctcccagcgtccacccatcctcctggcctcagcctccggaacagctggggtacaggtatgccccagcccgaacaggttttcactaggttgcctgggctctttctttctttgtctgtgtttgtttgttggttggttggttggttggttggtttttgtttgtttgtttcgagacggggctccggctctgccgccgggggctgcagtgcaatggcgcgatctcacctcactgcggccttctgggctcaagcgatcctcccactgtgcccggcctgaagacagcctttagagaaagaagcagggggagttcttccgaggacagacaagatttctggagtttggaaagggtgagagactgggtcagcgaaaggaacattccggtctttatgttgggatgcaacgtatagatacagggatgagacccaaaagagccggcagaggtttgtcatcgtgctcgcaaggcaactgccggtggctgatcccgtaaaggatacacatacctagagcggagcctaaagatgcatccagcatgacgggtggagccacgatgcttggactcgagctctgctcctgtgcgttccgtgatcaatggcttatactacct

SEQ ID NO: 31265 - DNA, 995 bp, Artificial sequence
  DNA replication origin
ggctctgccgccgggggctgcagtgcaatggcgcgatctcacctcactgcggccttctgggctcaagcgatcctcccactgtgcccggcctgaagacagcctttagagaaagaagcagggggagttcttccgaggacagacaagatttctggagtttggaaagggtgagagactgggtcagcgaaaggaacattccggtctttatgttgggatgcaacgtatagatacagggatgagacccaaaagagccggcagaggtttgtcatcgtgctcgcaaggcaactgccggtggctgatcccgtaaaggatacacatacctagagcggagcctaaagatgcatccagcatgacgggtggagccacgatgcttggactcgagctctgctcctgtgcgttccgtgatcaatggcttatactacctgcacctcagtttttcccgggcaaaaaaggaagcttgctgccggtgcgttggcacctgccttaaagtgccagctactcagcgggctgaagaggaagaagttcctactaggaagacacgtggacacgtatgtttactgcagcactatttacaatagcaaagacttggaaccaactcgaatgcccatgaatgataggctggataaagaaagtgtggcacgtatacagcatggaattactacgcagccataaaaaaggatgagttcatgacctctgcgggaacgtggatgaagctggaaggcctcattctcagcaaactgacacaggaagcgaaaaccaaacaccgcatgttctcgctcctaagtgggagttgaacagcgagaacacatgggacacagggaggggaacatcacacgccgggccctgacggggcgtggggggcaaggggagagagagcattaggacaaatagccaacgcatgcggggcttcaaacctagacgactggtggataggtgcagcaaagcaccgtggcacacgtgtacctatgttccaaacctgcacgtcctgcacatgtacc

SEQ ID NO: 31266 - DNA, 938 bp, Artificial sequence
  DNA replication origin
gggcgaggaggaggggaaaggaatccacgtcccgagcagagaggcagcgttccctacacagcacaggacacggtccgcgcacagaagccgcaggagacgcaggcacaggggctggggagaatccttgctgggccctcgccgcctccctctgccgggtgtctggtgccagcctcctgcctggcagaggaactccagcccctgctcccggaagcccctccaggccttcggcttccctgactgggcatgggcccctcgtcccctcgtcccctcgggtacggggccggtctccccgcccgcgggcggcgaagtaaaggcccagcgcagcccgcgctcctgccctggggcctcgtctttctccaggaaaacgtggaccgctctccgccgacaggtctcttccacagacccctgtcgccttcgcccccggtctcttccggttctgtcttttcgctggctcgatacgaacaaggaagtcgcccccagcggagccccggctcccccaggcagaggcggccccgggggcggagtcaacggcggaggccacgccctctgtgaaagggcggggcatgcaaattcgaaatgaaagcccgggaacgccggaagaagcacgggtgtaagatttcccttttcaaaggcggagaataagaaatcagcccgagagtgtaagggcgtcaatagcgctgtggacgagacagagggaatggggcaaggagcgaggctggggctctcaccgcgacttgaatgtggatgagagtgggacggtgacggcgggcgcgaaggcgagcgcatcgcttctcggccttttggctaagatcaagtgtagtatctgttcttatcagtttaatatctgatacgtcctctatccgaggacaatatattaaatggatttttggagcagggagatggaataggagcttgctccgtccactccacgcatcgac

SEQ ID NO: 31267 - DNA, 1383 bp, Artificial sequence
  DNA replication origin
attcaagtcgcggtgagagccccagcctcgctccttgccccattccctctgtctcgtccacagcgctattgacgcccttacactctcgggctgatttcttattctccgcctttgaaaagggaaatcttacacccgtgcttcttccggcgttcccgggctttcatttcgaatttgcatgccccgccctttcacagagggcgtggcctccgccgttgactccgcccccggggccgcctctgcctgggggagccggggctccgctgggggcgacttccttgttcgtatcgagccagcgaaaagacagaaccggaagagaccgggggcgaaggcgacaggggtctgtggaagagacctgtcggcggagagcggtccacgttttcctggagaaagacgaggccccagggcaggagcgcgggctgcgctgggcctttacttcgccgcccgcgggcggggagaccggccccgtacccgaggggacgaggggacgaggggcccatgcccagtcagggaagccgaaggcctggaggggcttccgggagcaggggctggagttcctctgccaggcaggaggctggcaccagacacccggcagagggaggcggcgagggcccagcaaggattctccccagcccctgtgcctgcgtctcctgcggcttctgtgcgcggaccgtgtcctgtgctgtgtagggaacgctgcctctctgctcgggacgtggattcctttcccctcctcctcgcccggctacttctgacgcaggtcgtcaggactccgcttgggtgtcacccgtgcaggaagcctcccttagtcaagggccctcggcacctgccccatatgtgactagcagccctcctgtgtatttcatcgcgcccccgttgtttatatcagccattccactcaccacccttctgggcaaccctttatctcccgctctgaaatcccatcgctgagggctgggacccctcctcagtgcttatccctgtttccccgcgcgagtctggcgcctggcgtgtggaaggcgctcagtaaacgtttgtggagcgaagaaacgacgcaaaggtgatgagcacgacgcagttaggaggctattggcccggcgcgggggaaaagggggaaggtcgggctcggggtggcaggaccccagagggcaggggtggctgccggggtgctcttggggcaaggtgggcgtcaaggcccccagcaaggttgggataaagtttctctccgaggcacagactgccgcctgcgggctcagcatttacctctcccttcctccttcctaacgcaacttcagcggagggctgagggctctactgcgcattacctggaaaacttatttcactccacggccctaagaggtgggccttattattagccacggccag

SEQ ID NO: 31268 - DNA, 981 bp, Artificial sequence
  DNA replication origin
ctttcgctgacccagtctctcaccctttccaaactccagaaatcttgtctgtcctcggaagaactccccctgcttctttctctaaaggctgtcttcaggccgggcacagtgggaggatcgcttgagcccagaaggccgcagtgaggtgagatcgcgccattgcactgcagcccccggcggcagagccggagccccgtctcgaaacaaacaaacaaaaaccaaccaaccaaccaaccaaccaacaaacaaacacagacaaagaaagaaagagcccaggcaacctagtgaaaacctgttcgggctggggcgtacctgtaccccagctgttccggaggctgaggccaggaggatgggtggacgctgggaggtggatgctgcagtgagcagtgattgcaccactgcactccagcctgggtgacagagccagaccccgtcccaaataaataaacataaaaataaaggaaccagtttgtagaaagcgggagagggtcccattgaacttcaagccttcgagcaacagctgtggctggacaggttggaccagcaggctggagcagtcgccatcttggcagggatcattgaccctgatctatcgtcgggaggaggaagagctgatcttacgcagggagggcaggtggactatgtgtggactctggtgacctgtttgggtgccaggtgttactcccagggccacccgtaactgtgaatgtgcaggaaccctgacttgagaagggcctggccacggggggcttaggcccctggggaatgagagtttggttcccggtacccagggaaaccaccagcatcggcagaggtgatagctgaggaggagcggggatttggacgagagacacaggatgagtaccggggggcagccccgtgatcaacaactgctgcaagaggggccgtttgttcgactcgctagtcttctgcggctctatgcggtactaaagagcagaagacagaagatacaaaaaccac

SEQ ID NO: 31269 - DNA, 1175 bp, Artificial sequence
  DNA replication origin
tagtaccgcatagagccgcagaagactagcgagtcgaacaaacggcccctcttgcagcagttgttgatcacggggctgccccccggtactcatcctgtgtctctcgtccaaatccccgctcctcctcagctatcacctctgccgatgctggtggtttccctgggtaccgggaaccaaactctcattccccaggggcctaagccccccgtggccaggcccttctcaagtcagggttcctgcacattcacagttacgggtggccctgggagtaacacctggcacccaaacaggtcaccagagtccacacatagtccacctgccctccctgcgtaagatcagctcttcctcctcccgacgatagatcagggtcaatgatccctgccaagatggcgactgctccagcctgctggtccaacctgtccagccacagctgttgctcgaaggcttgaagttcaatgggaccctctcccgctttctacaaactggttcctttatttttatgtttatttatttgggacggggtctggctctgtcacccaggctggagtgcagtggtgcaatcactgctcactgcagcatccacctcccagcgtccacccatcctcctggcctcagcctccggaacagctggggtacaggtacgccccagcccgaacaggttttcactaggttgcctgggctctttctttctttgtctgtgtttgtttgttggttggttggttggttggttggtttttgtttgtttgtttcgagacggggctccggctctgccgccgggggctgcagtgcaatggcgcgatctcacctcactgcggccttctgggctcaagcgatcctcccactgtgcccggcctgaagacagcctttagagaaagaagcagggggagttcttccgaggacagacaagatttctggagtttggaaagggtgagagactgggtcagcgaaaggaacattccggtctttatgttgggatgcaacgtatagatacagggatgagacccaaaagagccggcagaggtttgtcatcgtgctcgcaaggcaactgccggtggctgatcccgtaaaggatacacatacctagagcggagcctaaagatgcatccagcatgacgggtggagccacgatgcttggactcgagctctgctcctgtgcgttccgtgatcaatggctt

SEQ ID NO: 31270 - DNA, 875 bp, Artificial sequence
  DNA replication origin
gaggaggggaaaggaatccacgtcccgagcagagaggcagcgttccctacacagcacaggacacggtccgagcacagaaaccgcaggagacgcaagcacaggggctggggagaattccttatgagccctcgccgcctccctctgccgggtgtctggtgccagcatcctgcctggcagaggaactccagcccctgctcccggaagcccctccagaccttaggcttccctgactgggcatgggcccctcgtcccctcgtcccctcgggtacggggccggtctccccgcccgcgggcggcgaagtaaaggcccagcgcagcccgcgctcctgccctgggcctcgtctttctccaggaaaacgtggaccgctctccgccgacaggtctcttccacagacccctgtcgccttcgcccccggtctcttccggttctgtcttttcgctggctcgatacgaacaaggaagtcgcccccagcggagccccggctcccccaggcagaggcggccccgggggcggagtcaacggcggaggccacgccctctgtgaaagggcggggcatgcaaattcgaaatgaaagcccgggaacgccggaagaagcacgggtgtaagatttcccttttcaaaggcggagaataagaaatcagcccgagagtgtaagggcgtcaatagcgctgtggacgagacagagggaatggggcaaggagcgaggctggggctctcaccgcgacttgaatgtggatgagagtgggacggtgacggcgggcgcgaaggcgagcgcatcgcttctcggccttttggctaagatcaagtgtagtatctgttcttatcagtttaatatctgatacgtcctctatccgaggacaatatattaaatgga

SEQ ID NO: 31271 - DNA, 790 bp, Artificial sequence
  DNA replication origin
catttcgaatttgcatgccccgccctttcacagagggcgtggcctccgccgttgactccgcccccggggccgcctctgcctgggggagccggggctccgctgggggcgacttccttgttcgtatcgagccagcgaaaagacagaaccggaagagaccgggggcgaaggcgacaggggtctgtggaagagacctgtcggcggagagcggtccacgttttcctggagaaagacgaggcccagggcaggagcgcgggctgcgctgggcctttacttcgccgcccgcgggcggggagaccggccccgtacccgaggggacgaggggacgaggggcccatgcccagtcagggaagcctaaggtctggaggggcttccgggagcaggggctggagttcctctgccaggcaggatgctggcaccagacacccggcagagggaggcggcgagggctcataaggaattctccccagcccctgtgcttgcgtctcctgcggtttctgtgctcggaccgtgtcctgtgctgtgtagggaacgctgcctctctgctcgggacgtggattcctttcccctcctcctcgcccggctacttctgacgcaggtcgtcaggactccgctttgtgtcacccgtgcagggaagcctcccttagtcaagggccctcgcacccgccccatatgtgactagcagccctcctgtgtatttcatcgcgcccccgttgtttatatcagccattccactcaccaccttctgggcaaccctttatctcccgctctgaaatcccatcgctgagggctg

SEQ ID NO: 31272 - DNA, 1548 bp, Artificial sequence
  DNA replication origin
tagctgggattacaggcgcaggccaccacgcccggctaatttttgtatttttagggggtttcgccatgtcggccaggctggtctcgagctcctgacctcaggcgatccgcccgcctcggcctcccaaagcgctgggattacaggcgtaagccaccgcgccgggctctttcattctgtctttattttctgagatagagtctcgctcggacgctcaggttggactgcaacggcgtgatctcggctcgctgaaacttccgcctcccgggttcaagcgattctcctgtctcagcctcccgagtagctgggattattgacgggcagcaccacgcccgggctactttttgtggtttttgtatcttctgtcttctgctctttagtaccgcatagagccgcagaagactagcgagtcgaacaaacggcccctcttgcagcagttgttgatcacggggctgccccccgggtactcatcctgtgtctctcgtccaaatccccgctcctcctcagctatcacctctgccgatgctggtggtttccctgggtaccggaaccaaactctcattccccgagcctaagccccccgtgccaggcccttctcaagtcagggttcctgcacattcacagttacgggtggccctgggagtaacacctggcacccaaacaggtcaccagagtccacacatagtccacctgccctccctgcgtaagatcagctcttcctcctcccgacgatagatcagggtcaatgatccctgccaagatggcgactgctccagcctgctggtccaacctgtccagccacagctgttgctcgaaggcttgaagttcaatgggaccctctcccgctttctacaaactggttcctttatttttatgtttatttatttgggacggggtctggctctgtcacccaggctggagtgcagtggtgcaatcactgctcactgcagcatccacctcccagcgtccacccatcctcctgcctcagcctccggaacagctggggtacaggtacgccccagcccgaacaggttttcactaggttgcctgggctctttctttctttgtctgtgtttgtttgttggttggttggttggttggttggtttttgtttgtttgtttcgagacggggctccggctctgccgccgggggctgcagtgcaatggcgcgatctcacctcactgcggccttctgggctcaagcgatcctcccactgtgcccggcctgaagacagcctttagagaaagaagcagggggagttcttccgaggacagacaagatttctggagtttggaaagggtgagagactgggtcagcgaaaggaacattccggtctttatgttgggatgcaacgtataggtacagggatgagacccaaaagagccggcagaggtttgtcatcgtgctcgcaaggcaactgccggtggctgatcccgtaaaggatacacatacctagagcggagcctaaagatgcatccagcatgacgggtggagccacgatgcttggactcgagctctgctcctgtgcgttccgtgatcaatggcttata

SEQ ID NO: 31273 - DNA, 869 bp, Artificial sequence
  DNA replication origin
cgttccctacacagcacaggacacggtccgcgcacagaagccgcaggagacgcaggcacaggggctggggagaatccttgctggccctcgccgcctccctctgccgggtgtctggtgccagcctcctgcctggcagaggaactccagcccctgctcccggaagcccctccacgtgcggcttccctgactgggcatgggcccctcgtccctcgtccctcgggtacggggccgggtctgccgcgggcggcgaagtaaaggccccagcagcccgcgctcctcgcctggggcctcgtctttctccaggaaaacgtggaccgctctccgccgacaggtctcttccacagacccctgtcgccttcgcccccggtctcttccggttctgtcttttcgctggctcgatacgaacaaggaagtcgcccccagcgagccccggctcccccaggcagaggcgcgcccgggggcggagtcaacgcggagccacgccctctgtgaaagggcggggcatgcaaattcgaaatgaaagcccgggaacgccggaagaagcacgggtgtaagatttcccttttcaaaggcggagaataagaaatcagcccgagagtgtaagggcgtcaatagcgctgtggacgagacagagggaatggggcaaggagcgaggctggggctctcaccgcgacttgaatgtggatgagagtgggacggtgacggcgggcgcgaaggcgagcgcatcgcttctcggccttttggctaagatcaagtgtagtatctgttcttatcagtttaatatctgatacgtcctctatccgaggacaatatattaaatggatttttggagcagggagatggaataggagcttgctccgtccactcca

SEQ ID NO: 31274 - DNA, 1183 bp, Artificial sequence
  DNA replication origin
ctccttgccccattccctctgtctcgtccacagcgctattgacgcccttacactctcgggctgatttcttattctccgcctttgaaaagggaaatcttacacccgtgcttcttccggcgttcccgggctttcatttcgaatttgcatgccccgccctttcacagagggcgtggctccgcgttgactccgcccccgggcgcgcctctgcctgggggagccggggctcgctgggggcgacttccttgttcgtatcgagccagcgaaaagacagaaccggaagagaccgggggcgaaggcgacaggggtctgtggaagagacctgtcggcggagagcggtccacgttttcctggagaaagacgaggccccaggcgaggagcgcgggctgctggggcctttacttcgccgcccgcggcagacccggccccgtacccgagggacgagggacgaggggcccatgcccagtcagggaagccgcacgtggaggggcttccgggagcaggggctggagttcctctgccaggcaggaggctggcaccagacacccggcagagggaggcggcgagggccagcaaggattctccccagcccctgtgcctgcgtctcctgcggcttctgtgcgcggaccgtgtcctgtgctgtgtagggaacgctgcctctctgctcgggacgtggattcctttcccctcctcctcgcccggctacttctgacgcaggtcgtcaggactccgcttgggtgtcacccgtgcaggaagcctcccttagtcaagggccctcggcacccgccccatatgtgactagcagccctcctgtgtatttcatcgcgcccccgttgtttatatcagccattccactcaccacccttctgggcaaccctttatctcccgctctgaaatcccatcgctgagggctgggacccctcctcagtgcttatccctgtttccccgcgcgagtctggcgcctggcgtgtggaaggcgctcagtaaacgtttgtggagcgaagaaacgacgcaaaggtgatgagcacgacgcagttaggaggctattggcccggcgcgggggaaaagggggaaggtcgggctcggggtggcaggaccccagagggcaggggtggctgccggggtgctcttggggcaaggtgggcgtcaaggcccccagcaaggttgggataaagttcctttccga

SEQ ID NO: 31275 - DNA, 899 bp, Artificial sequence
  DNA replication origin
ccgggcgaggaggaggggaaaggaatccacgtcccgagcagagaggcagcgttccctacacagcacaggacacggtccgcgcacagaagccgcaggagacgcaggcacaggggctggggagaatccttgctgggccctcgccgcctccctctgccgggtgtctggtgccagcctcctgcctggcagaggaactccagcccctgctcccggaagcccctccaggccttcggcttccctgactgggcatgggcccctcgtcccctcgtcccctcgggtacggggccggtctccccgcccgcgggcggcgaagtaaaggcccagcgcagcccgcgctcctgccctggggcctcgtctttctccaggaaaacgtggaccgctctccgccgacaggtctcttccacagacccctgtcgccttcgcccccggtctcttccggttctgtcttttcgctggctcgatacgaacaaggaagtcgcccccagcggagccccggctcccccaggcagaggcggccccgggggcggagtcaacggcggaggccacgccctctgtgaaagggcggggcatgcaaattcgaaatgaaagcccgggaacgccggaagaagcacgggtgtaagatttcccttttcaaaggcggagaataagaaatcagcccgagagtgtaagggcgtcaatagcgctgtggacgagacagagggaatggggcaaggagcgaggctggggctctcaccgcgacttgaatgtggatgagagtgggacggtgacggcgggcgcgaaggcgagcgcatcgcttctcggccttttggctaagatcaagtgtagtatctgttcttatcagtttaatatctgatacgtcctctatccgaggacaatatattaaatggatttttggagcaggg

SEQ ID NO: 31276 - DNA, 1297 bp, Artificial sequence
  DNA replication origin
aagtcgcggtgagagccccagcctcgctccttgccccattccctctgtctcgtccacagcgctattgacgcccttacactctcgggctgatttcttattctccgcctttgaaaagggaaatcttacacccgtgcttcttccggcgttcccgggctttcatttcgaatttgcatgccccgccctttcacagagggcgtggcctccgccgttgactccgcccccggggccgcctctgcctgggggagccggggctccgctgggggcgacttccttgttcgtatcgagccagcgaaaagacagaaccggaagagaccgggggcgaaggcgacaggggtctgtggaagagacctgtcggcggagagcggtccacgttttcctggagaaagacgaggccccagggcaggagcgcgggctgcgctgggcctttacttcgccgcccgcgggcggggagaccggccccgtacccgaggggacgaggggacgaggggcccatgcccagtcagggaagccgaaggcctggaggggcttccgggagcaggggctggagttcctctgccaggcaggaggctggcaccagacacccggcagagggaggcggcgagggcccagcaaggattctccccagcccctgtgcctgcgtctcctgcggcttctgtgcgcggaccgtgtcctgtgctgtgtagggaacgctgcctctctgctcgggacgtggattcctttcccctcctcctcgcccggctacttctgacgcaggtcgtcaggactccgcttgggtgtcacccgtgcaggaagcctcccttagtcaagggccctcggcacccgccccatatgtgactagcagccctcctgtgtatttcatcgcgcccccgttgtttatatcagccattccactcaccacccttctgggcaaccctttatctcccgctctgaaatcccatcgctgagggctgggacccctcctcagtgcttatccctgtttccccgcgcgagtctggcgcctggcgtgtggaaggcgctcagtaaacgtttgtggagcgaagaaacgacgcaaaggtgatgagcacgacgcagttaggaggctattggcccggcgcgggggaaaagggggaaggtcgggctcggggtggcaggaccccagagggcaggggtggctgccggggtgctcttggggcaaggtgggcgtcaaggcccccagcaaggttgggataaagtttctctccgaggcacagactgccgcctgcgggctcagcatttacctctcccttcctctcctacgctacttcagcggagggctgag

SEQ ID NO: 31277 - DNA, 1004 bp, Artificial sequence
  DNA replication origin
ataattcccacgtgtcatgggagggacccagtgggaggtaattgaatcatggggccaggacttttccatattgttctcatgatagtgaataagtctcacaagatctgatggttttataaaggggagttcccttgcacaagttctctctcaccttccaccatgtaagacatgcctttcaccttccaccatgattgtgaggcttccccagccacgtggaactgtgagtccattaaacctctttttctttataaattacccagtctccggtatgtttttattagcagcacgagcacagactaatgcagacttattgggccccaggtagcaaatgtgggatgtctattttcccccagcttgcccagggttaaggtgagcccagtcagcttccaccagttacactcagtgacacaggtgcagtttgttagagttggtgcagttagattagttggaggtgggcccaaggactttggggatgcgggttgagggggtggggagtggggtgacaggtaccaaagggtagcagagggagggatggtagaggtgattggagagtgtgaccctcgaagtggatggggttatggcaatcgacaatgacatgacctagggttagaccagggaagtgagtggctggggtagtcaaagctgaggtcaaggaattggggaaccagggtgtcgattgatgacaggagttatgctggagaaagtcagtgctccaggagctaaaaaccttcaaggaataaagtaagtgttggcatggagtgaccagcagccaggagagacaacagcaacaaggagaggtagtgggcagcacaggtgcaaggcacaatggagtgagaggtggggagagcaaacagaaagaggaaagcaatgtcttcagcgggaggatagagcaaacgaagaaaggggggccgggcacagtggctcacacctgtaatcccagcactttgggaggccagtgcgggtggatcacctgagtttggcagtttgagaccagcctgaccatc

SEQ ID NO: 31278 - DNA, 1619 bp, Artificial sequence
  DNA replication origin
ccatcctgactaacacggtgaaaccccgtctctactaaaaaatacaaaaaattagctgggcgtagtgggggcgcctgtagtcccagctcctcgggaggctgaggcaggagaatggcgtgaacccgggaggcggagcttgcagtgagccgagatcgcgccaccgcactccagcctgggcggcagagcgagactccctctcaaaaaaaagaaaaaaaaaatgtaattagacgtctgtaacacatgtaataaagcaagtacagcaagatgactttaggtgatgggcatacgggtgttcaccaaacaattctttcaacgtatgtgtgaaaaaaagtttaaagtaatgttggatgccagctaggtcaggacgagatggggagggggagggggaagggagggggaggggatgcggaggggaagggaggcggagggagaggggaggggaaggggagggggaggaggaggaaagaagagcctcctagagctcttcgtgtcttttccgttgtgggtttttcctcctgaagggcaatgaagccgaaggagctttcccaagattccagtgatttacaggcgcttttctgttcagtggttggcaggcagggcacggcggggcatgcaaatttaaaatggctgcttctctcgggagttatgggagcaaaaaaggaaagtgaatatcctccaaaatagtaacaatattacttacgcaggtgttcagatttggataaagatacacaatctcaacgtaggagagagagttattcagggtgctatctgtcaccctgaggttaggatgtgtgggagaaggagtacagtggccgatcgttaacattttcgttttgaaaacggtgttgatacagtggaaggcttgtggtgttgctggcccttgatcgctggaaggattccgaggtgtagttttcgaagcgggagttttgttcgcattgggcgcttagcgtctgttactgtcgctaacgggagattgtcaacgtgtttgcattgggccatttgcatcagttgggaccgttgttactgacctcctaggttgtgtgttgcgtttacacgcttaaatccgggtttcacggtctcttagtactcgcgtatttaagctcatcgcgcgtaccttacttctacgcgttcacgtcggttcgtccgggcctatcagcgccgctgcttttaaattggccgtgtgcgctttacgtttgcacctttacgtcggatcactggggtccatcagcgccgtagtttttgagctggccgggcgtgctttcgagcgcttagttgctttcggtttcacttggttgcggcgtgacgatcattgagttaaaggttactgcactcacttcagtcgccatcggtctccgtaatctgactgccctttgctattacttgcttcactcacatacgatatgcggacggtcctatttaagttgagcgcccatacttcactatcccaagtgggactgctttttcatttacgtgtctctatccgaggcagtataaacatctttccattcaagtttaccgcatgtgtttcactatcgagagtcggactgcttttggatttacgtggctttgtgggatgcggtatgaagatcgttgcattcaagtttaccgcctctacttca

SEQ ID NO: 31279 - DNA, 863 bp, Artificial sequence
  DNA replication origin
acaggcgtgagccaccgtgcccggtctggacttactttattatatgttatagacatgtaattacatattttgtatagttgaccacacagaaacaggcacttaggtctccgtccctctagccatttctcaaccgtctcgaccggcgagttttcgttgaggcgagggagcgctcgctcccacaggttcgagggctgggcggagccttgggaaacgggccctggtaatctccgctcagtgagtggcgctgcgaagctgcttctgcccgggaaggaggagaggggcctggaaccgccgagggaaccaccagttccgacgccctggggtgggcccggaggaccgagtggctggggcggcacggggcggggggctgggcgggaggagcgggggtccaggaggtgacccaggagggggtaggatcgggctgggcctcgtgggctccctgcccccggagggggcgcgcagagggagggcggtagcccagtgagcgcgaccactacttccctgtgaacgcgagagctcagacaagccacagggggccagagccgagaaaccggaagaccggcgaggagaccatagcacactcccaggaaagagagcgcgagggcttgggccaggatgggggcagtgcgggggctgaggagtggccagattctgggtgtactttgaaagcagagctgatggcctttgcggacagttgggatgaggggtgagagaaaggagtggagggtgactccaagggtttggccagagcgactgccacattcagcctgggcgacaaaagcgaaactacgtctccaaaaaaaaaaaaaagtctgccaggcgcagtggctcacgcctgtaatttcagcactttgggaagccga

SEQ ID NO: 31280 - DNA, 1999 bp, Artificial sequence
  DNA replication origin
tggccgggcggggggctgacccccccacctccctcccggacggggcggctggccgggcggggagctgacccccccacctccctcccggacgggggggctggccgggcagaggggctcctcacttcccagtaggggcggccaggcagaggcgcccctcacctcccggacggggaggctggccaggcggggggctgacccccccacctccctcccggacggggcggctggccgggcggggggctgacccccccacctccctcccggacggggcggctggccgggcagaggagctcctcacttcccagtaggggcggccgggcagaggcgcccctcacctcccggacggggcggctggccgggcggggggctgacccccccacttccctcctggacgggtcggccggccgggcagggggctgacccgcccacctccctcctggacggggcggctggctgacccccccacctccctcccggacggggtggctgccgggcggagacgctcctcacttcccagacggggtggctgccgggcggaggggctcctcacttctctgacggggaggctgccgggtggaggggctcctcacttctcagacggggcggttgtcaggcggagggtctcctcacttctcagacggggcggccgggcagagacgctcctcacctcccagacagggtcgcggccgggtagaggcgctcctcacatcccggacggggtggcggggcagaggtgctacccacatctcagacgatgggcggccgggcagagacgctcctcacttcctagatgggatggctgtcgggaagaggccctcctcacttcctatatgggatggcggccgggcagagacgctcctcattttccagactgggcagccaggcagaggggctcctcacatcccagacgatgggcggctaggcagagacgctcctcacttcccagacggggtggcggccgggcagaggctgcaatctcggcactttggggggccaaggcaggcggctgggaggtggaggttgtgcgagccgagatcacgccactgcactccagccttattgcaatatccacctttttatgatggtctggaaccaaaactgtaatatcttcaaggtatgcctgtatattctttgcactgttctacagacttcctatgcgttgaagcattgaaacatatcttcactttgcagatagggaaacattcattattaacagaggttttctggctattgtcaaatctcaggtgaaagccttttagcttctttcattccttctcaatgaaaccaatttggcagtctctttcaaagcaatgtcttcaattggaaagtactacctcatacatgaatgaacaacgtgtctcctcttgtcattgataagatgaacttagaatgagcttgaaatgctatggtggtggtgctctattctggactgcagaaaaatctggaatgccgttctcagatggggcagttgccaggtggagggtctcctcacttctcagacggggcggccgggcagagacgctcctcacctcccagacggggtcgcggccgggccgaagcgctcctcacatcccagacggggcggcggggcagaggcgctccccacatctcagacgatgggtggccgggcagagacgctcctcacttcctagatgggatggtggccgggaagaggccgtaactgattttttttaagcaaactttttatctgtatgtgttttcagatatcttggctggtgggcctgtaagacactgggacagagttgccatagcctccttaaggattttgggatggccccagaaagaacagaataaacttggcgaatcacctaggttcaacataaagaattgggaatgtggaccatggcacacactcagggctggttacagaattttcaggggccagtataaaatgtatgaatccagccaggcatggtggctcatgcctgtaatcccagcactttgagaggccgaggtgggtggatcacttgaggtcagg

SEQ ID NO: 31281 - DNA, 927 bp, Artificial sequence
  DNA replication origin
aggagggaagtgggggggtcagccccccgcccggccagccgccccgtccgggaggtgaggggcgcctctgcccggccgcccctactgggaagtgaggagctcctctgcccggccagccgccccgtccgggagggaggtgggggggtcagccccccgcccggccagccgccccgtccgggagggaggtgggggggtcagccccccgcctggccagcctccccgtccgggaggtgaggggcgcctctgcctggccgcccctactgggaagtgaggagcccctctgcccggccagcccccccgtccgggagggaggtgggggggtcagctccccgcccggccagccgccccgtccgggagggaggtgggggggtcagccccccgcccggccagccgccccgtccgggagggaggtgggggggtcagccccccgcctggccagcctccccatccgggaggtgaggggcgcctctgcctggccgcccctactgggaagtgaggagcccctctgcccggccgccaccccgtctgggaggtgtgcccagcagctcattgagaacgggccatgatgacaatggcggttttgtggaacggaaagtggggaaaggtggggaaaagactgagaggttggatggttgccgtgtctgtgtagaaagaggtagacatgggagacttctcattttgttctgtactaagaaaaattattctgccttgggatcctgttgatctgtgaccttacccccaaccctgtgctctctgaaacatgtgctgtgtccactcagggttaaatggattaagggcggtgcaagatgtgctttgttaaacagatgcttgaaggcagcatgctcgttaaaagtcatcaccactccctaatctcaagtaccccgggacacaaacactgcggaaggccgcagggtcctctgcctagga

SEQ ID NO: 31282 - DNA, 1518 bp, Artificial sequence
  DNA replication origin
gaaaaaagccagccaggtgcagtggctcacacctgtaatcctagcactttgggaggtcaagggggcagatcacttgaggtcaggagttcaagaccagcctgaccaacatggcgaaacctggtctctactaaaaatacaaaaattagctgagcatggtggcgcgtgcctgtaatcccagctacttggaaggctgaggcaggagaatcacttgaacctgggagtcagaggttgtagtgagccaagatcacaacactgcactccagcctgggcgacagagtgagactccatctcaaaaacagaaaagaaaggaaaggaagggaagggaagggaagggaagggaggggaggggaggggaggggaggggaggggaggggaggggaggggaggggaggggaggggaggggaggggaagggagggaagggaagggaagggaagggaagggaagggaagggaagggaagggaagggaaaaagctggaggtggggtgcagtggctcatgcctgtaatcccagcactttgaggggctgaggcgggtggatcacctgaggtctggagtttgagaccagcctgaccaacatggagaaacttcatctctactaaacatacaaaattagctgggcgtgatggcgcatgcctgtaatcccagctacttgggaagctgaggcaggagaatcgcttgaatccgggaggcagaggttgtggtgaaccgagatcatgccattgtactacagcctgggcaacaagagcaaaactctgtatcaaaaaaaaaaagaagagggcccagcgcggtggctcacgcctgtaatcccagcactttgggaggctgaggcgggcagatcacgaggtcaggagattgagaccatcctggctaacacggtgaaaccccgtctccactaaaaatataaaaaattgggaggctgaggcaggagaatggcatgaacccgggaggcagagcttgcagtgagccaagatcgtgccactgcactccagtctgggcaacagagtgagactccgtctcaaaaaaaaaagaaaagaaaagaaaaaaaaagctggaatcaaaatgtaattcatcattgtgatagttataataatcagacaaaacctaaaacacatttgtgatctgggcaaataatttatccactctgagcctcagtttcttcatctttaaaataatatccatctcacagggtttggagaaagacttgatgagagcccgtctgtggcacatctggtacaatgccctgcacagagtaagccagcaatcagtagaaggcatttgtaactaacttaacttgcataaaacaagtggttaaatcagagggagagaataccatcatagtggcgtagttgagagagctcaggcttaaagtctagctcggctactcactcattgtgtaaacttggaccaagtgcctacccagctcacagggtaatcgtgaggaggcaggcggagtaatgtgaaatgcagggcaaatgttggttcttctcattactggacttctaggttgttggtgatt

SEQ ID NO: 31283 - DNA, 1002 bp, Artificial sequence
  DNA replication origin
taacaatagatggtattcaggccgggcgtggtggctcatgcctgtaattccaacagtttgggaggctgaggctggtgggtcgcttgaactcaggagatcgagaccagcctagataacatggtgaaaccccatctctacgaaaaatacaaaaaaaaataattagctgggtgtggtagcatgcgcctgtagtcccagctacttgggaactgaggcgggaggatcgcttgagcccaggagctagaagctgcagtgagccaagatcgtgccactgcactccagcctgggtgacaaagtgagaccttgtctcaaaaaaaaaaaaaatttaaaaattaaaaaaatatatgtaaatatgatattcaattctatgtggctctttcctggaaactctgtattacctcaaacaagggctgcaagtctgtaaaacacacagcagccctgtgtcagcagagcccagggtgggcgggcagcgggctggaggaggccctaggcagcacggggcagaaagaggtggggccggggaaggggtagggtcagggtcatctttagatggaagaaatgaagggctctgcagtggggtcgtgccaggcagcaggataggctgggaggtgtggataggaagcacagggttaagagcagagagtctgcctgcttcccttaagtgtgtgggagcatggggtaaggctgatcggccaagagctttggtaggacctgggaaagcaaaaatgcaaaaatgcagaaaccatgtatccctcaaggagtttagtgggtaagagacaagaggatgattggaggaaaacgtggtcagtgcacacgagagagagagaagcacagaggactctacagaagccccaaggagaagtggtggtcccgcctgtgcatacgtgtgtgtgtgtgtgtgtgtgtgtgtgtgtgtgtgtgtgtgtgtgtgtgcatgtgtgtatggaggcttcctggaggagggaaagcaacaggagcagccttgtagagaccagaacagcacct

SEQ ID NO: 31284 - DNA, 909 bp, Artificial sequence
  DNA replication origin
gtgggccgggctgtgctccgggaagcccgtcatccgctcgtgaccgaccctccccggcccgctgccaggagggggcgcggcgctggcggcggccaaggccggagggctcctcggggaccccggcccggggctgcgcgtccttccctgctgcccacgctcccgcttccggaggggtctggacctgccttctccggcctggagccagaggccgccgggcaggcagcccgcgccaggaactcggccccctgccctgctccccgggcgcgccccgcgggcggccaacccggatcggacgcggacccccgggccagggtgccacgacacccctgacccgggcaccgggactatcgggcccctcccccgccttctcgagttcccggaacggtggcacccactccccttccatcccccggcggaggccacggacgcgcagcgcgaggtgggccaggcgcccaaatcactttaccgtgcgcctcctgctagagagtcgcccagcccaaggcagtggggcgcggaggcggaggacggggaaactgaaatacaaagggattgagtggaaagcaatagaggggggtgctgggaggggaaccagctaggctcaaagctccaaagtggatcgccgggttaatgtggggttcctgcctcgccacccactcccaatgcggctgcttagccgactgcataggcggcttctctgctttacactagggggtctgaattccccagcccagtcccccaggtagcttagacccggcctctgaaaacagaagatccctccttccaacactcctcgccggcaaggcagagatgggtctttcagggagcaggacgttgggccgcaggtttcggtaaagcacctcactcggagccacagcctccatgtctataaaatgaggaaaatggaccggg

SEQ ID NO: 31285 - DNA, 1867 bp, Artificial sequence
  DNA replication origin
atccgcccgcctcggcctcccaaagtgctgggattacaggcctgagccacctgcgccccacccagcatgagttactttcatgtggcagggtgcacaggaactgtgcccatgagcagggtgaccgaacagctcccagaaacggcatgcaagtgctcatagtgtttccatcttgctgaatatattgcaatttgtaatactgttgcagaacaaagagagcgtaacttccacttcaactttcatagcttgcttcccatacttctggtcccttcatcatttccaacagtggtgaacgttgatcccactctgggaagttgacaagggacaaccgccctcccagagccaatatccatcccacccaccattagtaggtattgcccccaggttcacacagggagttagctgagaccgtcagttcccaacccagacttcttcttcctgtttcctctgctggaaatcggcactggaaccccagaggctaaatcagggcaataagagacaggagaggagaggtggccagggatggggcatagcttggctggcagtagtcagctgccctatttgcagaactggggtgggggaagttatttgggggacatcatggggcacctgtgcacacctaagcaggtcttggaggagggtagatgtgggtagcaaacagggtggtgaccccaggacctctggaaggggtgacaagcccagctgccatggtccagctccaggccccaacctgagccagccagccaggagatatggagagccttggctctaatcagatggatctgggttcaaatctcccttctgtcacctaaaagctgtcaggcacactgggcaatttcctgggcctgtctgaggctggctcttctgtataacaggattatttagcaaatacttagcaagtactttttcctcttctctctaggagaattatgtgcagaactggttgggggcgcggtaggggtcagttgtgccaggtacagaagcaactatggctagatgctagggtgagaaaaagtgtttccctggggagacagctattaatcaaattatcacacaaacccatgttaagagtgctaaagggggtaagaacagtatccactcataggccgctgtgtggtgaggttaaagccgcagatgcctctgggcacacacagaaaccttcaagaagtgcatctgtttctatcccagcccttcaatggcatctcgtggagctgataaattggagaatatatttgtccagcacttttagatttttcttttttttgagacggagttttgctctcgttgcccaggctggagagcaatggcgcaatctcggctcaccgcaacctccgcctcccaggttcaaacgattctcctgcctcagcctcccgagtagctgggattacaggcatgagccaccacgcccagctaattttttgttgttgtttgtatttttagtagagacggtgtttctccatgttggtcaggctggtcgcgaactcccgatctcaggtgatccgcccgcctcagcttcccaaagtgctgggattacaggcgtgagccaccttgcctggccacttttagattttaatagcatgttgcacacacatattaactcgttcggtcttccaataaccctaggaggtaggtgaaatttcctcaatttcttgatgaggagactgacgcccagagaggctaagtgacttcctcaaagtctccagcatggagattcaggattcaagcctctgcggtcctctgggctatccactccccgcaaccgtggaaaggaagggctgggaaacactaagcctcgggacgggagaagattgggaaaccagtccccgaccgcgcccgtcgtctaagcccgggtttcctgcctctctccggg

SEQ ID NO: 31286 - DNA, 969 bp, Artificial sequence
  DNA replication origin
ccttttcctctcctgtaggtgcctaaagagacatcggcagggctcccagcctctctggggccagggaattcaagggatatttcatgggagagaggcaggttcttctggaatgaaaatgcgtaatgctggctgggcgcggtggctcacacctgtaatcccagcactttgggaggccgaggcgggtggatcacgagatcaggagatcgagaccatcctggctaatatggtgaaaccccatctccactaaaaatacaaaaaaattagccgggtgtggtggcgggtgcctgtagtcccagctactcgggaggctgaggcaggagaatggcatgaaactgggaggccgagcttgcaggaagcctagatcgtgccactgcactccagcctgggcgacagagtgagactccgtctcagaaaaaaaagtctggtgctatagtctttgctgagagtcccaggcggggtgggttggtgagggggaagcgcagcagctttcaagaggggatggggagaggcatgggtagttctgggttttgtttataagttccatatgtcaccctcagctgtcaccaaaggaagtgtgggcttgagacccaggcccactgctcacgctgttcctgtacctctgcatgcaagaaaaacaagggggaaaaaaaaagaaaagaaaaggaagggggtgggtcctggccagaggccagggagccaaattgggtgagaagcccaagttatgggcagagagggagttggggaaaagggccagctctggaggtctgcaggggctgtgagtcctgtctctcaggcagaaaggattctctgcctctgagttatcccccctccctgggcccaagtgcccgtgatttattcaagccagagaaataggtgagcgggcaggaatcctgagtccctagcatgggagagtggcggagcagagctgaggtgacccctgggctgaccttcttacagctcacgggctca

SEQ ID NO: 31287 - DNA, 1356 bp, Artificial sequence
  DNA replication origin
ggaggagccggaaaccaacctttgtgtcactgtgtagtgacaagtgcctttggaggtcacaatagccagtggtgatttctaccactgcccccagcagccaaggtggcagaggagccctgtcagtcacccccattctgttcatggtctcacggtgggctccacatggggggtggcagccctctcccccaccccacccgacccctttcgacagatagggtaatacaaatacaaataacaccaaaagattgagttgctgggcagaaagggaccaaaggccagtgtgtgtgtgaggggtgggggcagggcaggagaggagcagcaaaaggctgtgaccgcctggctgagcactggatactcactgaagggcagggaggcttcctggagaaggagacctggcaggggctgagggagtgatgccaggcatgggggtttggagggaccccaggcatggcatgcctccattcctccctgtgctatccactctatataaggggtgctgtgcagggagacagcttgcatccaagcagggaggcagggaggatgagaggcagagaggagcccagctgggttgatggaaagtctgggaaatgcaggaaatccaggagggggagaatgattccaagctgtggcctgtgatgggccttgaaaccaggtgtaggcacttggatctgatcgctggggagccagagctgcttcctgagcagcagaagggcaggatgcgaatcagactaggggcagtgggaggaactgagaggcctcaggtcaccggagaaaatgcacagggccgggaggcagagatgctcctgttttcttgctctggggctcaggacagtcagtcaccctgagcttcagactcagctcactcattttgcagagatcctgacggcgatgcttcaggatgatctgggaagagtcaatgaggtaaaatatgtgaaatatgccttgaaaactacaaaccacagcacatgttctgtttttgcttctgcttgatggactcagtgagatggtggggacaagaattagagaagcccatgaggaggccaaggggcaccaaatagacccaccaaggaccagtggggacttagagaaaggatgagtcagagagaaatgacaggagcagaaggcaggccttgtatggaggatgaaggtgaagatcatacaccattaaacttgagaaagaggcgggaggagctgccatttcttgagtctactggatgccagcagtagtgctgggcaagggcttaacaggtggggaaatcgaggcacagagaggttaagtagcttgcctaagatcacccagttagtaagtagcagagcctggcagcttaactccaaagtctttgtactaaagccaga

SEQ ID NO: 31288 - DNA, 1513 bp, Artificial sequence
  DNA replication origin
aagtggtggcgacctagtgggcccgacttccgctgcatccccgaccgctaccgcgcgcagcgcgtgcagctgctgtgtcccggtggtgaggcgccgcgcgcgcgcaaggtgcgcctggtggcctcgtgcaagtgcaagcgcctcacccgcttccacaaccagtcggagctcaaggacttcgggaccgaggccgctcggccgcagaagggccggaagccgcggccccgcgcccggagcgccaaagccaaccaggccgagctggagaacgcctactagagcccgcccgcgcccctccccaccggcgggcgccccggccctgaacccgcgccccacatttctgtcctctgcgcgtggtttgattgtttatatttcattgtaaatgcctgcaacccagggcagggggctgagaccttccaggccctgaggaatcccgggcgccggcaaggcccccctcagcccgccagctgaggggtcccacggggcaggggagggaattgagagtcacagacactgagccacgcagccccgcctctggggccgcctacctttgctggtcccacttcagaggaggcagaaatggaagcattttcaccgccctggggttttaagggagcggtgtgggagtgggaaagtccagggactggttaagaaagttggataagattcccccttgcacctcgctgcccatcagaaagcctgaggcgtgcccagagcacaagactgggggcaactgtagatgtggtttctagtcctggctctgccactaacttgctgtgtaaccttgaactacacaattctccttcgggacctcaatttccactttgtaaaatgagggtggaggtgggaataggatctcgaggagactattggcatatgattccaaggactccagtgccttttgaatgggcagaggtgagagagagagagagaaagagagagaatgaatgcagttgcattgattcagtgccaaggtcacttccagaattcagagttgtgatgctctcttctgacagccaaagatgaaaaacaaacagaaaaaaaaaagtaaagagtctatttatggctgacatatttacggctgacaaactcctggaagaagctatgctgcttcccagcctggcttccccggatgtttggctacctccacccctccatctcaaagaaataacatcatccattggggtagaaaaggagagggtccgagggtggtgggagggatagaaatcacatccgccccaacttcccaaagagcagcatccctcccccgacccatagccatgttttaaagtcaccttccgaagagaagtgaaaggttcaaggacactggccttgcaggcccgagggagcagccatcacaaactcacagaccagcacatcccttttgagacaccgccttctgcccaccactcacggacacatttctgcctagaaaacagcttcttactgctcttacatgtgatggcatatcttacactaaaagaatattattgggggaaaaactacaagtgctgta

SEQ ID NO: 31289 - DNA, 2037 bp, Artificial sequence
  DNA replication origin
agtgtgcattgcccacggcctgcccagggagctggcacttgaaggaatgggagttttcggcacagttttagcccctgacatgggtgcagctgagtccaggccctggaggggagagcagcatcctctgtgcaggagtagggacatctgtcctcagcagccaccccagtcccaaccttgcctcattccaggggagggagaaggaagaggaaccctgggttcctggtcaggcctgcacagagaagcccaggtgacagtgtgcatctggctctataattggcaggaatcctgaggccatgggggcgtctgaaatgacacttcagactaagagcttccctgtcctctggccattatccaggtggcagagaagtccactgcccaggctcctggaccccagccctccccgcctcacaacctgttgggactatggggtgctaaaaagggcaactgcatgggaggccagccaggaccctccgtcttcaaaatggaggacaagggcgcctccccccacagctccccttctaggcaaggtcagctgggctccagcgactgcctgaagggctgtaaggaacccaaacacaaaatgtccaccttgctggactcccacgagaggccacagcccctgaggaagccacatgctcaaaacaaagtcatgatctgcagaggaagtgcctggcctaggggcgctattctcgaaaagccgcaaaatgcccccttccctgggcaaatgcccccctgaccacacacacattccagccctgcagaggtgaggatgcaaaccagcccacagaccagaaagcagccccagacgatggcagtggccacatctcccctgctgtgcttgctcttcagagtgggggtggggggtggccttctctgtcccctctctggtttggtcttaagactatttttcattctttcttgtcacattggaactatccccatgaaacctttgggggtggactggtactcacacgacgaccagctatttaaaaagctcccacccatctaagtccaccataggagacatggtcaaggtgtgtgcaggggatcaggccaggcctcggagcccaatctctgcctgcccagggagtatcaccatgaggcgcccattcagataacacagaacaagaaatgtgcccagcagagagccaggtcaatgtttgtggcagctgaacctgtaggttttgggtcagagctcagggcccctatggtaggaaagtaacgacagtaaaaagcagccctcagctccatcccccagcccagcctcccatggatgctcgaacgcagagcctccactcttgccggagccaaaaggtgctgggaccccagggaagtggagtccggagatgcagcccagccttttgggcaagttcttttctctggctgggcctcagtattctcattgataatgagggggttggacacactgcctttgattcctttcaagtctaatgaattcctgtcctgatcacctccccttcagtccctcgcctccacagcagctgccctgatttattaccttcaattaacctctactcctttctccatcccctgtccacccctcccaagtggctggaaaaggaatttgggagaagccagagccaggcagaaggtgtgctgagtacttaccctgcccaggccagggaccctgcggcacaagtgtggcttaaatcataagaagaccccagaagagaaatgataataataatacataacagccgacgctttcagctatatgtgccaaatggtattttctgcattgcgtgtgtaatggattaactcgcaatgcttggggcggcccattttgcagacaggaagaagagagaggttaaggaacttgcccaagatgacacctgcagtgagcgatggagccctggtgtttgaaccccagcagtcatttggctccgaggggacagggtgcgcaggagagctttccaccagctctagagcatctgggaccttcctgcaatagatgttcaggggcaaaagcctctggagacaggcttggcaaaagcagggctggggtggagagagacg

SEQ ID NO: 31290 - DNA, 1482 bp, Artificial sequence
  DNA replication origin
tgttgatctctttatggggtaccattccaaaatccctaatagcagtgtccagcccaaactgcccacatacctatttgtattctattcttgtgagatacgtagtggccaaagtccagtttctttctgaaggttgtgctttgcctgtgattagagacgataacagggtaggccagataatccagggaattgttcatcttctcttcctagtctcacttcagaaatgaggtacccagactcctctgtgaggtgcctagctgtccccatgacaagctgtcatagttacccagttatgacatcagggacaggtcccgggaagggagtaggagcagcagagcatggctggctgcctctgggcttgtgtttttaatgctaacctcggctcaagtcaagatgaaggtcaaggaactcgaaagctttccccgctgcttagaatgcagatgctgccagccaacaccagaaggaaagaagtggtgcaccgggaggggtgggcaggcacggggtggggtgagggatacagaaattccagccttggttacacatcttgggctatcagctaagtagtctccactgcaatagctcccctgaaggtgcaagaccacaagttttggaggaggagaaagttgaccctaatgataatcggatccaattccttttgcaaatgaggaaactgaagaccacagcagcagcaacgttactcaagaaccaagttggtggcagggctgggctcaggatgtggggttcctgaattcaaggccaaatttgcccttttgcaggaaggaaactgccagtttttcatggcagtaggggagggcagctttcctccagtacagagactatcttttgtacttagtgggagttcaggaaatgctgagtggcttatggtgggctggcatctgctccaggaagggctgcaggagtctgatttatctccaccccagcacagggtatagcacccactgggtgctcaacgcatttgttgatgaaggactaacacctattgagtgctcgccatgcagtgctgggtgccttctttgaatgtcacatttaacccttccagcaaccctagaattaggtaccattactatcccgctttttttttttttccctgcaaacaggctcaggttaagtaattcctcagaattccaaacctgactgcttttaagcacgacgatgactctcaatgaatgttgaaagcagatgcgccccagagtagggcttctcagactttgaccgtagggacctcctggggtccgtaaaatgtccactctgatccagcagggctgggctggggcggggattctgtcaagcgcccgggtggtgcctccactgcagggagccgctcacgagccgaacccggcggtccctgtaatcatgaaagactgaagcgacccctaggtgtacctccgccacgaaatgtttattgggccctgcatttaattcagggaaggaagttaccgcgcttgccagtttacaaagatacac

SEQ ID NO: 31291 - DNA, 1315 bp, Artificial sequence
  DNA replication origin
ggcggcccaggctctgggcactcgcgcggctcccgttcgcggagcacacatcccggcgcgacgaggtaggaggccgcgaggggaacggacgagggagctgggcgccgcggcgggaggggcgggaggccgggccgagaccctcctcccgtgctcccggacagcctcgcggcccaccgagcccaccgcgggagtctcaaccccgcccctcggcccccgcctccctcttcccgcgcccgccccgccgcgcgccccccgctccctgctgctccgcgtcctccgggaccgccctccgaggtcccccggggtcgctgctcctgcgcccagtgcgctccttgttctcccacaggttccttcggagagcgagcgggagtcggtgctcggcctcctgcggggagcagcccgagggtgagtccggcgtggcgtggcggggcggggcggggcggaggctggagggcccggggccgctcttacgcctcttagtggcaccggggctcggcgctgcgggctggctccatgtttgcggaatgaatcagtcatgactctccttctcctcttcctaaggaggactttttgaggtccacgtgctgcagagcacctttggagggcctcatgagataggggtcccccctcctgcatagtggaagcccgactcccatttccccccctcctctctgcactccagtctggaggctccctttgggttgggtcttggggggtcggggacagggggcttgtaggcccagccaggtagttgtggaaggtgtgtcccagcaggagacttgagccagggctcttagaaggttgcagtggagggggcgcgctgcggaggacagctgacactgtcaggcagggtcacttggcacctccaaggccagcctggaagagcctgcttgaatatggattttgacccacagcttactgaaagcttccacgccgctgtttcttcatcaataaaatgggaacattcgcagtcatttctcaggactttgtgcagacaaaaagtttatcatagaaatcaccccacacaatgcttggcacatcgaggacactcagcacatcttagctttatttccttcctctctgaaaaaagtaagcagagttatttgttcccatcctctctgtccacagcctggtctcagagaacacagtagatgtgtagtcagtttgttcaataaatatgcttgatggagcttcaatacccacctccacccccttctcccagaatctgcagggagaggtcgggaggtgacaacgccagcatgccagtgctatcggaggactctggtaagtacctccccccggctggacctgccac

SEQ ID NO: 31292 - DNA, 1588 bp, Artificial sequence
  DNA replication origin
cccgggggacctcggagggcggtcccggaggacgcggagcagcagggagcggggggcgcgcggcggggcgggcgcgggaagagggaggcgggggccgaggggcggggttgagactcccgcggtgggctcggtgggccgcgaggctgtccgggagcacgggaggagggtctcggcccggcctcccgcccctcccgccgcggcgcccagctccctcgtccgttcccctcgcggcctcctacctcgtcgcgccgggatgtgtgctccgcgaacgggagccgcgcgagtgcccagagcctgggccgccgctggctccgccttcccggacccctccctgcggctgccgcgccgggcgggggtggcggagcctgaggaggcgcggcgcggggaggaggcgcggcgcggggaggaggcgggggaggagcggaggccgccctccgcgtctggcaccgccgcaccctccgggccgggctccgctagccggcgtcgtacccgctcccgctctcccgctccctgagtcccctgcctgtgtccccccgcaccctggcacacagccagacttcccttccgcccgcgcaacccaccctccgcgagtggaggggtggacacctgctcaacagagaattcgattttgcaaacatttattgagcgccctccaggtgccaggcgctgtgccaggggccggggcttcaaagacgaccaaggcacagatcctgggtttgaagatctccagaggtggggcggggggccggtcggatgcgagggcaactcgctgtaacaatgcaacgcgctgggaaagatttatcggtgcacgctgccctggggacgcggagcaggggaggagaagtcaggctggagaggagggggactccattctgcccggctgcaggggagtgaggctacatagcagaggcgagcagcatccaggggctttactggaaaaagagctctgaaatggccatgacgataactgacttatattgtgctgtctccatgcccaggtactcctcagatcacttcccttcacagtagttcctgatatcaagaccattcttattttggttctgcaattgaggaaactgaggttcctggtgaaagaatgtgtataggggagagcataggaactgctgggtgagtgagcaggtggttgtgggtattaaaaggtgaggagtgggtgagtgagtgggcccccttccctcaatcccagcagcaaagaacggcacagcacatgtcaggagaggtggacccagaggttaagtctggaagtaaatctagccctgcacagtaaccagggaaaatgggttggcaggccccacaggctgtagtgcatggggaggctgtgagaggcagcaaatgtcatgatgatgtttcccctcattcctcaaaaattatcctcattcctcaagaaatatctacactattgctcctcaaaatgtaacgtgcctgagactcactagggggttgtgtaatgctggagtggtgccagattctgaatttctgacaagctcccaggtgatgtgacgccactggtctgcagaccacactttttgagtggagagagactgcatgagacacattcttagctgcaatg

SEQ ID NO: 31293 - DNA, 3409 bp, Artificial sequence
  DNA replication origin
gttgcccaaactggagtgcagtggcgccatcacagctcactgcagcctcaaactcccaggctgaagtgatcctcccacctcagcctcccaagtagctggcactacaggcgtgcaccactgttgcctggctaattttttatttttagtagagacagggtcttgttatgttgtcaggcttttctcaaactcctggcttcatgcgatcctcccacgtcggcctcccaaagtgctgggattacaggcacgagccaccatgcccggccttaaagtaatacttattctagcatttgatagcatatctttgctcttctatttatttatttttgtccttacacagaataatttctgatcctctacatttcttaaattcagacttatttattatatgcaaggacgagcatctgacacttcattatgctttctagtgtcatgggacctgagcactgacagattgaaatatgtgttatttggttataaattgctttccttttattttttctccctagtatagctcaggcactatagtgtgattttaaagaagtaagtgcttgtgaaggcatattatttatgattgtcattttaggagagtaagcgaggtgttattaaatgtttatttatataaagagcatgttgagtggatccctaccctcttcctgcatatttgaaggtccttcccctccatttcccagccccacacctagcccaggaggctggctcaagaactccattagaaacagattcaccagactgggaagtggagcaagggctggggagaagggtgaaagtgaggtgctggcatgagcctcgcacctagttccaccttaggccacactctggggtagatggggccaacagacagacctccgtggtgggctggggatctgagaagagaggatatttttgtcctgcttcccaccagaagcatggggaggtgccccaccatcactgcacctgggagaggcaatgaggcacaagggctcctggacaggtcactgggctcgtgacagcctcatcacatcctcaggaaggcctctgtgtgcccaagaggtacagtggcagggatgaggggactgagctgcttggtcttcgatggccaccctggtccaattcctctcggtttggacttggactaaatcacttcagctgctccaagagggtcacttgctcctcttagatcaaggtttccccaacctcagtactgttgacattttaagttagataattctttgttgtgggagactgtcctgtgaattataggatgtttagcagcatctccagctgtaccccctagatgccagtagtcccttcccagttgtgataatcaaaaatgtctccaggctgggtgaggtggctcatgcttataatcccagcactttgggaggccaaggtgagtggatcacttgagcccaggagtttgagaccagcctgggcaacatgacaaaaccccgtctctgcaaaaaatacagaaaattagccaagcatggcagtgtgcacctgtggtcccagctacacacaggctgaggtgacagaatcacctgagcatgggaggtcgaggctgtagtgagtcgagatcccatcactgcacgccagcctgggtgatgggagtgagaccttgtctcaaaaaaaaaaaaaaaaaaaaaaaggccgggcgcagtggctcacgcctgtaatcccagcactttgggaggccggggtgggcggatcacaaggtcaggagatcgagaccatcctggctaacacggtgaaaccccgtctctaaaaaaataaaatacaaaaaaattagctgggcatggtggcgggcacctgtagtcccagctactcgggaggctgaggcaggagaatggcgtgaacccgggaggtggagcttgcagtcagctgagatcacgccactgcactccagcctgggtgacagagcaagactctgtctcaaaaaaaaaaaaaaaaaaaaagcctccaggcattgtcaaacatcccactgagaggcaaaaataccctgggttgagaactgctgtcttagatgatgaataactgtggaacaaataagtgcacttttgtgtaagttatgtttattgtttatgtaggtcagggtgttccatcttttggcttccctgggccaagaagaagaattgtcttggaccacacataaaatacagtaacaccagtgatagctgatgagttaaaaaaataatctcataatgttttaagaaagcttacgagtttgtttggggcttcatttaaagccatcctggctgcatgcagcccgtgggccgcgggtggataagcttgatgcaggcatagtaacacggttttggaaacaggacagtgggcagaacctaatgctgaaccccagaatcaggtaaaactgcgtccttctttcctcagtggagctgggccatcctcgtaatactcagggtgaggtgtggtgtatcagtttagaacacacactttttgcaggtgggccagctcaccagagaaaaggaagaagagagccgggttacacacgccttgttcctccttcaacattcatcaatcaaatcagcagaggcatggagaaaggcgtggagaggtgtagagagaggcgtggagaggcgtggagagaggcgtggagaggcgtggagagaggcgtggagaggcgtggagagaggcgtggagaggcgtggagagaggcgtggagaggcgtggagagaggcgtggagagaggcgtggagaggcgtggagagaggcgtggagaggcgtggagagaggcggggagaggcgtggagagaggcgtggagaggcgtggagagaggcgtggagaggcgtggagaggcgtggagagaggcgtggagaggcgtggagagaggcgtggagaggcgtggagagaggcgtggagaggcgtggagagaggggtggagaggcgtagagagaggcgtggagaggcgtggagagaggcggggagaggcgtggagaggcgtggagaggcgtggagagaggcgtggagaggcgtggagaggcgtagagagaggcgtggagaggcgtggagagaggcgtggagaggcgtggagagaggcgtggagaggcatggagaggcgtagagagaggtgtggagaggcgtagagagaggcgtggagagagactaagagttttgtgccagtggggttctctgctcatggaaggaaacatcaggagtggggaagacgtgtccccggcaaagacaaatgagccacaagacaggaagatttggattcctgagctaccacttggaagacagctgccctggacagccaccaagcgtgcggcggacttggaatgagcaagagatagacttttctgtgtttagccacggagatcttgcagtttgctagttgctgtagcacagtgtagaccaccaccatgctttttgttttccgtcatacattcatcctctagt

SEQ ID NO: 31294 - DNA, 1152 bp, Artificial sequence
  DNA replication origin
gctgggattacaggcatgagccactgtgcctggcaggctttacattatttaagcagggatatgatggccaaatgtgggtgttttggcagccatgtggaggactgttggggggttatatctgaagttggagaggccagttagtggctcttcagtggattgagtataagatgctgagagcctgaaatggagctgtggtcccagaccttagggtaaactggtggaacttggtgtttggcagtaagggctagggtacagtaaggcacctgggatcctgccccagggagtgtggaaggatgccccctctcctgagggggggaggtggggatggtgcccatggctgcgttggaggcaaggctgggagctgtgggaaatcagacctaattgctcagatttcttggtgaaggtggagcagtcctctcctgggaattagggatcagagatggagcaggaagattcagaagggaaggtttgactggtcactgaaagggagaaggaattaaatggatggggacctcgactgtccatgtcaggtgcccgatttcccagggtgggggtgactccatccagagaggaagagaaaggagcgggggctttggtccagggcacgtgctggcctggggctgtggaagtcggatgcagggaattgtgaagggagctggtgagagaggctcagagaaaagaggcccaggctggaaagaggcagaacagggagaaaatggaggtgaaggctcggtggctctctgaggtcacagagtatttgaggggtgatggtagggatatagatggaagagaaaaagaccaaggtcagaggaagggaggtaggaggtgaaagttttccaaggaggacagttctagggatgccatgataatgtagggtggggctgcagtggacaggtaggtcatcagtgttgaagacacccagaaatggaaggctcaggagtgggatgggcttgtccacacacctattggcatgtagggctatggcaggcgtcagggtggggagaagactgaggcagtccccagggttttcagtgcatggtggtggaggtgaccaggaagtcggcaatgacagcaagggtagggagaaagaaggtatagccaggtggtgggttttctgtagagcggggactctgtcacaggctggctatggct

SEQ ID NO: 31295 - DNA, 1975 bp, Artificial sequence
  DNA replication origin
gctctgcctgcatcaccgggcatgtccaggtgtgtaccattcctccgagcaccaggatgtcccttaaggcgtccgtgctctggtgtgtgtcccagaaatagacacgaccctcggtctgagcgcccctgcaccccagcctgcccaccgcgcggaacacctgcaagctccggtccgggtgccgcgctgaccacagccccggcatcacgtgacctcccgcggctctgtctgccccgccccctccagacgcctgctctgcgctgcgcattcgctctggccatagcgggcctcgtgtcgctgctgatgcagcccgagggcgccctcggcgaggagctgcaagtgccgcagcccagggccgccagttggctgaacttaggctccatcaagaagtacttggggaagctcttcaacagcaggtgggccggcggagggtgtgaggaagggagggagggagggaggaaagcggggggtggggggggcgcgggggggggacacggacgccaccaggcacccccacgcacatcgcggcctgagctgggctcggggagcggcctcatgactgcaaagacttgttcccagcccgaagaaatctaaaaaccacaagaaaactgcgaacgccacggacacctccccatcaaaagccacgaaacccccaccatggaccaccacgaacccccagtggctgaacacctcggaaccccgaccaccgacctcctcccggggccccaggtaggacagcctggatgctgggcaccgagccaggggcctcggggctgggggcagcttgggtgctagcgagaggaagttcctgggggcgggcatgcggggagacacagcacccctgtggggggggcttctttctccaggctgggccttggcctccagacgcctctctgcccaccaacccctttgtattgagaggggcctcgacccctcctcatcccctcagtgaaaacaataaagacaaatttttgttgcttcagtgacttctgtgggcctgcgggcagggagggaccagtccatggaacgggaagtgggaccctgtagtttctgctgtgagagaaaaagacctcagctgttgggggtcctcccctgcctcccctggcaacccatccaccttcccccactccacccacacatggccttgtgggtctggccctccaccccgtggtagagacacagatacgggtcctggagaagacacttattgcccctgtagtcctgcacagacagcaccagtgtggggggctctaacccagagggagagcagaggtgagagaagaaacctcaaagaaggggcttcagctagacacaccccaactcccacctggctcaagtttctaccaaacagcccagactcctctccccattcaccgcgcatccccttaagctgccagagaaaatgctgggacttcaggctccctctcccagactcaaaccgttcttttgcgaaaccatctctctatccagacatctttggatttaagaatcaacctgaggctgggcacagtggctcacacctgtaatcccagcattttgggaggccgaggtgagcagatcgctggagcccaggagtttaagaccatgctgggcaacatagcaagaccctgtctctaaaaaataaaaaaatttgctgggtgtggtggcatgtgcctgtagttccagctgtttgggaggctgaggcaggaggatcgcttgagcccaggaggtcaaagctatggtgagctgtgatcatgccactgtactccagcctgggtgacagagcaagatcctgtctccaaaaacaaacaaaaaatcaatctgagccaagcagctgcatcctctagaagctctttgccttttaggacctgtttctacttccaggtcatttgcacacaccagatggagtaggacttgaggggaaacacaattgtgtgtcatttccatttctgtgcaaggtgctgagcccaggaaagtggacccctcatcctccaaaccc

SEQ ID NO: 31296 - DNA, 1058 bp, Artificial sequence
  DNA replication origin
ccccttcgcttccgcaggtcggagggcccagacctgtggtgaggacccctgaggcctcctgggagatctgccaaccacgcccacgtcatttgcatacgcactcccgaccccagaaacccggattctgcctcccgacggcggcgtctgggcagggttcgggtgcggccctccgcccgcgtctcggtgcccccgccccctgggctggagggctgtgtgtggtccttccctggtcccaaaataaagagcaaattccacagaaacggaatgtatgcctttgtatttcctttcctttctccttcgtggaggtggcatcccgtagaagtggagggtggaggcgtgggggccagggaagagaaaaccgacttggacagaggcgccccaggacaaggctggggcgggctgcggagttccctctgctcggagcccagggaagactcgaccacccagcctggagctggacagcgcccaggccaggaactgctgtggaaggaactctggtcgagtgggggcaggagtggatggaactctggaagaaggggcggggagcggcgacaggagcctgctaggcagcctaggagagcagatggggtcagggctgtccctcccccaccccgtgaagccgaagacggctgggggacgagtcgggcaccaacaccccggggcgtttccccaggagctgtagtactagcgcccagggctggagtggctggaggtgaagtgtaatccaaaatggggctgtggaggaagagccgtgtgggggtgagatggctgtacgtgtgctggccggagaggcaggccatttctaccgtccccctttccctgagtagaggagcaatgggagtgtggaggctgccctatccctaagaaacctccctccccaatctcgctgaattcacacgcagtggataagtcacgaactgttctttcttagtgacaaggccatagggacaccctccatgtacccccctcccctggactagctactgaagcctaaaggctctgtggatgtttaaactggaatccaactcgaatccctcaccactctgtacctattccag

SEQ ID NO: 31297 - DNA, 1067 bp, Artificial sequence
  DNA replication origin
ccgtcgggaggcagaatccgggtttctggggtcgggagtgcgtatgcaaatgacgtgggcgtggttggcagatctcccaggaggcctcaggggtcctcaccacaggtctgggccctccgacctgcggaagcgaaggggaaggaattggatctggggaggcgagcctgggagacgtcgttaagtgatgttgccagggtagggccaggccgcgctctcggatgcaggatgtgtggtaacgggcgcttttaccgcgacctgacggggcggtcctcgccgtcggggaagaacgttttggaaagaagcgtgtccgggccgtctcttttcccatacctgggggcggggaagggaagagcgtggtcagatctggccacgcccccaggtggagcggggccgcagggtgagagccccaggggtcccgctccgcgcctgcgctcaccgctgccgggtgaccaggttgaggtagtggcgcagggaggcgtagtagcggttcagctcctccggcgaggcgtcttcgcggggagcctcgggtttgatggggtaggcgtcgaccagcgcccctaggcagacgagcagggccagaagcactgtggtcaaggcgggccacggcctgcgcacgaacaccatctgggaaggcgacattgggacgtgggtcattccaagcctcgaccctacacggcgggaggctgcggctgccgtcggggccgcgctccgacgctctccctggggctggtaccggaccaaggctcagccaccgggcttgctgtgtgttcttgggcactgcaccgtctcctgactcagtttcctcatgtcagaggagcataagccctgcctgcctccccacccccacccccgctgctggcctccttcccacctccgatggccccctccaatccagtttcctaccactcacccccagcttccaccatcccagcctcagtttccccacaaaacagcctgggtttccccaggcttgagcccccagccactcacagcgatagcttgtgaagcagacgagcaggaggtggaaggcgagggaagtcccaagggctgcactgccgcaggtcaag

SEQ ID NO: 31298 - DNA, 1969 bp, Artificial sequence
  DNA replication origin
ggccctggctgtgtagagggccacaaggaaaaggaggccaggaccgacagggcaccgggttcggccaggccgaggccacatcccggccgcgcagaggggaaaggagcagggctgacccggaggctgcgaaggctccccgcatccccggggctggcgccccccctaacagcgaccccatcgcttcttggatccaaggagaggggccgccccgccgccccctcggtttcttatcagcgatggcccgataaacgcgggcgataagggcctccggcggccggggcgtgcaaatggggcggcgcggccgtggttccggcggatccgggcgcggtgtttgcgggagataagcgcgcgaccgctgcgccccgctgggtacacagacgccacttagctgcgcaaacagcagccgctcgcctcggaacactcagcccggccggcaccggacacgcggcccctgcgcgcgcctggggaggacccggggaggccggtggggtgcgacagcgacgtcatcaagcagactcgcgcggggtcggggtcggggcatgggactgtgacagccccggatatgtcaagggcacgagcctacaggagagtggacgtgcaccgcgagccaatgtgcgcctaagacccggccccggggagcgttgggtgtctgagcttgttgaatgagggcagtgggtgagctagtggtatctgaggggctatgcctatgacacgtgtgcttggggtccttgagggagcccccagggcatggtcctcatccctgcagtgccccctgtagccaggctgctgcctaacagttctcattctccccttgggaacaggcacccagatccctgagttcccagaagaggctccagcttcccgttctcagcaggactgggtctttggggcactgagcaggccccagagctggggctccatcaggtagggcccgcggtaggagagccactggagggccacccagcacccctttactgcttcccttatctcagggcatcagctccacccccaaaaccctccttgtccctgtctcctactccagctgcgtttttgttgttgttgttgttgttgttttttgtttgtttgttttaagacagcatctcgctgtcacccaggctggagtgcaatggcgtgaccttggcccactgcaacctctgcctcctgggttcaagcaattctcctgcctcagccacccaagtagctgggattacaagcgtgcaccaccacacccggctcatttttatatttttagtagagacggggtttcaccatgttggccaggctggtcttgaactcccaatctcaggtgattcgcccaccttggcctcccaaagtgttgggattacaagcatgaaccaccacgcccggcctccagctgcctttggcaccccaattggctgctggaggctacagacttggggccaccactttcctccttctccttagaacaccccttaccaaaggtcatctgaagaagaaaccctcttatccaggacaaaatgagcagctgtccccagcctggagcagcccgttgaacacagactgaacacaggcatcaggctcaggcagccagttgagcacagaatccagcctgacccatcttcaggcacaagtcttgatgacatttcatgagcttgaaagattttgtccagtcctgttgggttctgtccagtcacgactgttccttccacgtgccttaacctgctttccccccagcccctgctagtccccctgcttctaccacaaccttagctaaacccttctctggcttttgcctgactctgcctgtaagcaagcctaccaagtacaagtgttcagtttgtgcactgcacaagagcatcacatctaggggcatggttcacactgtagttaagtggcgtacatgagtgtgtactgtccttcctcaatcagtagaggagactcctcttacaaaaatgcacacaggcattcagggccatgcatgaggaag

SEQ ID NO: 31299 - DNA, 1905 bp, Artificial sequence
  DNA replication origin
ggaaaaaaaagaaacagggtttcactgtgttgtccaggctgcagtacagtggtgcattcatagctcactgcagcctcaacctccctggctcaagagatcctcctgcctcactcagcctcccaagtagccaggattacaggcatgagtcactacgcccagctgatcatagatttttggctctgagaaaagaggaaactgagctgccatcaactgagatgggaagatgtgagtaaagtagatttggccacagcatgggggaatggcgctctgatttagatgcctggaatgtgagatgcctactacatgtctattatattaggtccaaggggtcgagtaggtagttagagacacagatctgcagttcagaagaatggtctgggctgaaattaaaaacatgacagtcatcagcttagagatggtatttaagtcataaaactacacaggatcccgagagagagaaagtagagaaaaggaccaaggcctgagctctgtggttctccatcaggaagacagcaggagaaagaggaggaccaggaagggagtgtgaggaagagcagcctgaggccaggtgaagggggtatcgaggaggagggagggaggcaaaggtggccaataggcttagggggaggagggctgagaattgacccttagatttagcaatgcagtggtcactggtgaccttgacagtgactctggtaggggtgggggagatggcctaagtggattgcgcctaagggagaacgagagggaggacctggaggcagcaattttgttcgctttttccaggaattttgaaggtaaaaggagcaaagaattggggcaacatttagttgatcccagagtggggttgaggggtggcgggggaggtgaagttagaagttttgttagaggccgggcacggtcgctcacgcctgtaatcccagcactttgggaggctgaggagggcagatcacctaaggtgaggagggcagatcacctaagttcaggagttcaagaccagtctggctaaaatggtgaaaccctgtttctactaaaaatacaaaaaatcagccaggcgtggtggcgcgtgcctgtaatcccagctactcgggaggatgaggcagaagaattgcttgaacccaggaggcagaggttgcagtgagctgagatcacgccattgcactccagcttgggcaacaagagtgaaactccgtctcaaaaaaaaaaaaaagaaaagaagttttgttaagatggaaaataactgtgtttatatgctggtgggaattttgatgatggagcagcagagggaagacttcctggagcaatgctcaggaggaaggaagggatggggcctgtgcaccacgacaggaactggctttagatgacacctgtgctgtccatctacactaacaggtggagagcagagacatgggtgcctatgttttccgagagcttcctttttcttttctttttttatttttgagaaaagcctcactctgttgcccacgttggagtgcagtggcgtggtcatagcttattgcatgcagcctcaacctcccaggctcaagcaatcctcccacctccgcgtcctgagtagctggaactacacatgcacaccattatgcccagcttgtagttgtaaatttaaagtgagaccaggcgtcgaggttgtatgtctttctctagccatcatgcatgctcagctgtgtagtgcaggcacaggatagatggaaggtggatttgatcagggtttctgtcacatgagcatgacaaagccggaggactgccctgtgtctgcctttggttgggcctgggtgtatctgtgtgcctttgtagataagggcagatggcactgtcaagaggtctgtgctactctgggtgtgtcaaagtgtcctgtagctgtcaatggccacagctgggtgtgtt

SEQ ID NO: 31300 - DNA, 1094 bp, Artificial sequence
  DNA replication origin
gcccgcagcgtatcctgccatgcctgaggacaggtggccgcacaaccccatcccctcgctgcgtcacggcccacgccgggctccgctcacctcgatgacggcgaagggcttgtccgcggagtgatggcaggtctggaactgcgtgagccagtggcgcgcctccccagggctggccccgcactggttcaggaaggcctggatgtcccgctgcaccagcgagcggcccgaaggaggctctggggactcgtggggcaccgggggcctgggactcggcacccacgacggctcctcggcgacgggcgactgggagacgtcgtccgcgcccgcgtactcctcgggcgggggctggggctgcgaccaggcggtgctgagccggcgccccgggctggtgcccctcgccgcccgccgccgcgcgccacagctcagccttcgggcgcccccagtgcctccccggcctctcagcctcggggctacagcagctgcccgcagaaccacagccatcagcgccgtcgccatgacgacaaccaactcttgccccccaagagtggcagtctgtctggagcgtctggcactggggggctcttaacttgccgttgggcggggctggacctggtcggggcggggtccggacaggggaccaggagtctcctctgggtgcgtttgaggagggtcaggccatgagtcagggggcggggccactaggctcccccgcccctggaggaactgaacccactatcggtcatggggccgagactaaatgtggcgggttgtctttaatctgctgccaaggtaggttccaggggcggctttgggagtctgcagggccttggatgattggcattctgaccagagaagaagggactgtaggtggctttgagcacagggctgggcagggggctggaaggagggcgctggaaagagtagaagaaggggggcagtgggagggcgggggcgggtggtgctggccttgtctgtcctgttgcctgagctcaaaaaagatcctaatgaatgaccatgaggttaccagggtttgccaaactccagtcactgggtaccagcttgaggaattctgtgatatcctcaaaacacccctc

SEQ ID NO: 31301 - DNA, 1212 bp, Artificial sequence
  DNA replication origin
ggggcaagagttggttgtcgtcatggcgacggcgctgatggctgtggttctgcgggcagctgctgtagccccgaggctgagaggccggggaggcactgggggcgcccgaaggctgagctgtggcgcgcggcggcgggcggcgaggggcaccagcccggggcgccggctcagcaccgcctggtcgcagccccagcccccgcccgaggagtacgcgggcgcggacgacgtctcccagtcgcccgtcgccgaggagccgtcgtgggtgccgagtcccaggcccccggtgccccacgagtccccagagcctccttcgggccgctcgctggtgcagcgggacatccaggccttcctgaaccagtgcggggccagccctggggaggcgcgccactggctcacgcagttccagacctgccatcactccgcggacaagcccttcgccgtcatcgaggtgagcggagcccggcgtgggccgtgacgcagcgaggggatggggttgtgcggccacctgtcctcaggcatggcaggatacgctgcgggctctgcgcagcggaagcgggaaggagcccggcagggcccagaccagcgccgccgggaatgggagaggccgtaagctcctccggaagcctcccgcccagcccgagtgaggatcctgggggaccccacccgccaggtgtgatgctctgaagaaggcccccaacatgggcgcagttaggggttcagaaggacctggacaggagccgcttgcactgcccctcccccaaagatgtcccggagtccaaggtcggagggaggagggcgggaggtaccccagcgtgagacaagggagtggcaagacccaacggggcaaagggcggagcaggtgggcactggtggccagaactgggtcctgacagcttctggaagggtagggtcaccgagacggccctgcaggccaggctgtgggagccagcggctcaggtccgtgtcacgctccttgaaagcccactcctccgcaggtggacgaggaggtgctcaagtgccagcagggcgtatccagtctggcctttgccctggccttcttgcagcgcatggacatgaagccgctggtggtcctggggctgccggcccctacggctccctcgggctgtctttccttctgggaggccaaggcgcagctggccaagagctgcaaggtgctggtagacgcgcttcgacacaacgccgccgctgctg

SEQ ID NO: 31302 - DNA, 1079 bp, Artificial sequence
  DNA replication origin
cgacgggccgcagactcactagcaagccgggtgggtagaaaagcctaagggagtataggggaggagttcagccctgggtgcccagatctgcgccctccctggctaaggactccgggcggaagtaaggataaaggggtcagagaaaagagaggtccgtgggggtaggggggcagtccgtgccggctgtgggccaggctcacccgctgactccggacacaggtcctgagtaacgtgaacctgcccgccgacctggacctggtgtgcaacgccgagtgggtgagcacaaaagaacggcagcagatgcggctcatcgtggacgtgctcagccgcctgccccaccactcctcggccgtcatcaccgccgctagcacgctgctcactgagctctttagcaacaagggtgagggcggtgggcgggccggggactgggtcccgggagtgagtactggccggggctgggtgtctgcggtcaggaggagcggcttctcctcctgtccaggagccgtagggggaggcggggggtgtcacagcaatggctcctgctgctgccgaaacccgggggaggtgagagaggaggagacccagtgtactggaagggaactccgaaggaattaaaggaatgggcgggactaggggggagaaggaggggccccccggtgggcggggccaggggcgggaccataagggaggtgttcgaccgggagagatgggcggggcttaggtgggtgggccgggtcagcggcgggagacagacttcaaggagcgaggcaagactaacggaagtgggtggggctccaggcgacaggaggaacttggggcacaatctctgcctggggaaagcatctccttgaatgaaaatcacagacaaatctatgcagaccactgaaatcatttcactgtggaggtctcccaaagacggaaattgtcccaccagcgcctgtcctacctgcagtccccaccaggctgcgcaaacggccctccagccagactagcccctccccatcctcctccagggtccgggaccctgttcaagaacgccgagcgaatgctacgggtgcgcagcctggacaagctggacc

SEQ ID NO: 31303 - DNA, 1094 bp, Artificial sequence
  DNA replication origin
tcactcagccaacaagcccccttcagcctgtggctggctgcctggggtcatgcccagctggcatggcttttggtccaccctggccattccagggcctgtagtgtccatggtgagggtcagctgcctgggtcagaagctggcttgtgaaaggagtctggcagtcccttggcgtggttgaccaactcataggagtcccggatatcagccaggccaaaccagaagaagatccactgcttgttggagaagctgccatcactgtgtttgaagtacctgggtgtggggaggtgatgtaggaaacagtttttagggcaaggccagtgttcattactcactggttctgtctttaaaaaacattgattgaggacctactgcatgctgggcacccagcttggtcctgctgtgtgttatctcattttatcctcacagcagaggcctgagcctggcattgtgatgctcagctcacagagaagcagctaaggctcagagaagttaggtaccttgccaggcgcacacaggaagggagcgggtgctttgctctccacactgccttggctgtgcagcaaagaggagggttcttgctcacttcctagtgctcacagagcagggtgtaggggtgagggggtagttactgaaggagagaggagggatgttccactggaggcgccgcaggcctccaatagaccctgaagggttaggattcctcaggcccctgtgagaggtgggctgcgtggggcttaggaggtgtcacttgctgccagaaaaggagtgttaagcatgctttaactcgggaaatctcaggctttctgtgtgttctgcccctgggaggtagtgaaagggagaccagtggaagaagaggaagcccagccttcttggcatggttggcaagggtgggagaggggagggaagtcagggcccagcccagagctgggagtggcaggacctaccagggattgatggggttggtgacccgggagcgccagaaaagtgtctgaaggtcccgccgcaggcactcccacagcatctggccggagccttggccctggcggctggagctcaccacaaatttgtccaggtacggggtgccccccaggacg

SEQ ID NO: 31304 - DNA, 946 bp, Artificial sequence
  DNA replication origin
actccgtctcaaaaacaaaacaaaacaaaaaaaaaagaaaaaaaaagttcacaactctgaggtaggtgtaattatccccatttcatgatgagtctcataaagtttaggtgatgtgcccagaatcacacagggttggaatcaggattagggccctgatcgggctgcattcaaagaccagtttgcttcaatacatcatactacggtccaagacttctgctatcctgaacccactgttccttcctctagtctagttttcaaattcgcagggacaaatatggccctgaaggctccatgagcagacgagaaggctggacttcgcaactgggtcaccttagatccggaactagagaatgacaccgttgtttccgggaggaaaaagaaaaagcgcttgacccggaagctgcgtgtcccatccccgcgcctgcttctctgactggggtgaggccgcagcggactgccctttcccaagatggcgtcgaagataggttcgagacggtggatgttgcagctgatcatgcagttgggttcggtgctgctcacacgctgccccttttggggctgcttcagccagctcatgctgtacgctgagagggctgaggcacgccggtgagcaggcctacgcagccgctaaacgcggcagggggcggtgatgtgggcaagaaattgggggctagaagtcgggacccttgaactgggaggaattgggacctccctgggaggggttctggtctgggtgtcggaccaaatctggtagggcggtcctgcccatgggaggggagtctggtttgggggagcagtggagcctgtgggaactcaaggggtctcaagcttcttcccccaccgcttcattctgtcctcgttgcttccccactcccggctcgcaggaagcccgacatcccagtgccttacctgtatttcgacatgggggcagccgtgctgtgcgcta

SEQ ID NO: 31305 - DNA, 1212 bp, Artificial sequence
  DNA replication origin
atcccgccccaaccagcgccaggccacgccccggcgtgtgacgcaagcacgctccgtgcgcgccgtcgcgtcgcggcgctcactgggggcccggctttcgcccgctgctgccgccgccgccgccggccgcggctgcactcccaagatggcggctcctccgggcgagtacttcagcgttgggagccaggtgtcgtgccggacgtgccaggagcagcggctgcagggcgaggtggtagcctttgactaccaatccaaaatgctggctttaagtatccttccctgcgtgaagcccgagtccgggccggcgtgtaggtgcggtggtcggggggtgggggacgacggcggcggctggggctctctccgggcctaggggcgaccggctaccgcggcgcccggggcgcatgcgcacggccctgagctcccctccccctcccgcgggcccttcggtcagctttggggatcctgtctctctctctttgcgggagctggggctttaccgaggatcagtgggtggaggagggcttgacacggggatggctttttggggggaacgttatgagaggggacacagtaattaggagagggggtggtggtgggagggggctgatggattggagcccggatggaaaggaggggcgggtgaaatattatggggaggggtgtttagggtaaggaactgctggtagggcaaaggtatggaatttaggagggcatgtgcactgatgggatttcgtccaaggaagggcggtgggatggtgaccaaattggtccttgcctgttttgggggagagtaagttcagggcagagtttgtatctgagctagggatagtggcttgtttcgctgatgcgtgtgtatgtgtggtgggggggctgtgctgatttttaggcttctcggtcatttggaagttgctgtttaggggatgtttgcactggaaacctgttccagagagggcttgccaggggcttatgtggtttggggatgtgtgagttacaggtgaaagagtgaagttctcatgctgccttgatcagtccagcacatggagtccttttacgtagtagcagcctcccttttgaaagtagcaatgttaaactgattggaaaaggtggcctgcttctttggggtggaagtgacttctgaattactccaggaaactcagtcttggaaatgaaacacttccttgttgggataaatgtgccacggcttcccttttt

SEQ ID NO: 31306 - DNA, 1001 bp, Artificial sequence
  DNA replication origin
agccttcaacacataatattatcattgatagtcaacatctctgggcattttacaatgactcatttaaatatcacagttaccctatgacttagatgctattattaccccattttactgatgaggaaactgaggtttagagaagtttaagtagcaaccagacacagctaggtgatccaataactagaatatgagtccaaatcctaagcttttaaccactgtgcccgctcccatttctcaacaccgtgccccatgcaaagcctcatactagaagagaaactgaggcacagaggttggttctaggactgacagtgcccttggtaaccccaggagaggctggtggagaccttctggatatctctaccctctgtccccttctggggcctcatccctatctggggcagactgggcaggagggagaggctgtgggaatgggggtggggtgggaacaggaggcctcggggaaagggggtgcagggctgcaccaagccagggacaggagggggctgggagtcaagactcgcttcctttgctggattatctcctttcaacagttttattgtaattaccctgaaaatgccgctatatatagagtgagccaaacagcagctgtgcctggggggagggggaataagaggatgggcgggcaggcagcagggaggaggtgggaggaggagacaggaaaggaaagggaatcagacaggaagaagggtaacagcagggggagggcaggagcttcggcagagatctcagaactctggtcttacggagaaccggctggggagaggaaggctgctggggaggggaaggcagtggagggcctgctgggttccaagaccttgggtccagtccccacatggacaatgggccgagtggctcagggagtgcacgaagttccaatgggcttatgggagggctaggtctccacttctttgtacctacacacagttctcaggtcactgcatgtcactcctcaccactgccctgtggttgccaggacaact

SEQ ID NO: 31307 - DNA, 809 bp, Artificial sequence
  DNA replication origin
cagagccatttgagccctgcacccggattctgtgcagacccctcttcgctggacacccctttcttggtactctgaggtgaggggtgctgtccacccagagcgcttctccccatagctacgaacgcatccttgattttatgtccttgacttccgtgcatgaggagggggactgcggagtccaccttacttctctctcccattattctcaccccgtctcctgtgaggcgttactgcgtttgttgccaccctcttctcctgtctgacaccttggagccaggatgcgagagctaggagatgaaatggagctcccccccaaccccttcttgtcttgggtggatgccccccatttttcatcctggatctgtatctcatggaagcgggggcactaccagtgccttattaacttggggggagtcagcttctccaccccacccttccctggggccctggggaagatgagaactggctgggtgtaagtaattaatctgggagcttggtgggggctgttgaagtggggaggttgggtgcttcctttgggagaggagatgaccacttgatacccctggctgataccccttctgaaatgaggtgtgtccctaaagaggaaaggtaacagctgcagttgcttttaggagggtgcaaaagggacccatcactcagtcagtgaccaccatgcttttgggatctgggattagatttggagcttggggaggtggtggtgattggtttcagtgtccaactgggaggggaggatggagccagattatgggaacaaaaggaggtgggggggagggtgagatccaggagtc

SEQ ID NO: 31308 - DNA, 890 bp, Artificial sequence
  DNA replication origin
gggaaggcggggggggctggggggggggtctgggtctatttttagctccgggtcgggtcacgtgacgggagtgacgtctccgaatgttgttgttggtggcggcggcgagcggagccggaggagccgccgcaaagatggaggagccgtcgaggaggtgctgccgccgctgccgccgccgctgctgccgccgccgcccgcgaagccggagctcgagccgcagcgggtgagcgcgccgccccggcccagatcccatcttccccggaccccgggacgcgaggcggcgccccctcctcctgctgtctctgtccgcgggctcccagcgcgcgcgccgcgctccgcgccccccttccttcctcccggccctgggagccagccggcgccccccgggagcatcggcagcccgtgagcgggacatcggggttgctgcgcgcgcccctccctgcccctcccagacaggggcgccttccctacaggtaagggaggggcccgccttctcgcgccctgcgcccccaaatggctcggagaccggccggggttgtctgatttgccccttccctggcggcgcatgttgcgttgcagagccatttgagccctgcacccggattctgtgcagacccctcttcgctggacacccctttcttggtactctgaggtgaggggtgctgtccacccagagcgcttctccccatagctacgaacgcatccttgattttatgtccttgacttccgtgcatgaggagggggactgcggagtccaccttacttctctctcccattattctcaccccgtctcctgtgaggcgttactgcgtttgttgccaccctcttctcctgtctgacaccttggagccaggatgcgagagctaggagatgaaatggagctccccccc

SEQ ID NO: 31309 - DNA, 710 bp, Artificial sequence
  DNA replication origin
cgatgctcccggggggcgccggctggctcccagggccgggaggaaggaaggggggcgcggagcgcggcgcgcgcgctgggagcccgcggacagagacagcaggaggagggggcgccgcctcgcgtcccggggtccggggaagatgggatctgggccggggcggcgcgctcacccgctgcggctcgagctccggcttcgcgggcggcggcggcagcagcggcggcggcagcggcggcagcacctcctcgacggctcctccatctttgcggcggctcctccggctccgctcgccgccgccaccaacaacaacattcggagacgtcactcccgtcacgtgacccgacccggagctaaaaatagacccagaccccccccccagccccccccgccttccccttgcccgcagccaccaccaacccctcccctgcctctcggccctccccgccgggcggggccagcgacgccatcgtgacagctccttaaagggccagtgcccagcacagggttcggccgagacggggtggaagggaagggatcggaacccagcgagcaggagtggaaggatcgctgcaggggccgagtatggatgctggggctcaacctttggattgtaaaagtttcctccttgcgctccccggactttcttttcaaaacgtggatggtgcaatcgtcgcttgcctaagctgctcccctaacacgccctcccgcgg

SEQ ID NO: 31310 - DNA, 832 bp, Artificial sequence
  DNA replication origin
acaacaacattcggagacgtcactcccgtcacgtgacccgacccggagctaaaaatagacccagaccccccccccagccccccccgccttccccttgcccgcagccaccaccaacccctcccctgcctctcggccctccccgccgggcggggccagcgacgccatcgtgacagctccttaaagggccagtgcccagcacagggttcggccgagacggggtggaagggaagggatcggaacccagcgagcaggagtggaaggatcgctgcaggggccgagtatggatgctggggctcaacctttggattgtaaaagtttcctccttgcgctccccggactttcttttcaaaacgtggatggtgcaatcgtcgcttgcctaagctgctcccctaacacgccctcccgcggtcggggaggggacctggggatagattcccaggggctgggagggccaccgcagcctctgcagcggggcctggctgcgggtggatggttcggacaagtctcgaactcgccagctctgaccgcacacactgcatccgtgccagggaaagaaaagcctgggaaaggccagggtatggctgtaacactccaaggccttcaaaagggcagaccagcagaccaggagccggaaagacttccctgactttggtgccatccacgctacatctcctcttggtacacagtatgaacatgtttaattagacctagacaatttgtcaatgacccagcaattccactaacaaaaatgtattccaaataaataaacgttgttatgttaaaaaatgaacatgagattgtttgtaatgatgtgaaaagttgaaaacaacct

SEQ ID NO: 31311 - DNA, 1488 bp, Artificial sequence
  DNA replication origin
gtccccaggtgcgccaagttgctgctggaagcaggagcgacggtgaacctggcagcaggcgagagccaggagacgcccctgcacgtggcggcggcgcgcggcctggagcaacatgtggctctgtacctggagcatggcgccgacgtgggcctgcgcaccagccagggcgagactgcgctgaacacggcgtgcgctggggccgagggcccaggtagctgcaggcgacaccaggctgcggcgcgccggctcctggaggctggagctgatgcccgggcggccgggcgcaagcgccacacgccgctgcacaacgcttgtgccaacggctgcgggggcctggccgagctgctgctgcgttacggggcccgcgctgaggtccccaatggggcgggccacacgcccatggactgtgcgctgcaggccgtccaggactcccccaactgggagcctgaagtccttttcgccgcactgctggactacggggcgcagccagtgcgccctgaggtgcgctgggaggccctgacataggaggctcctgtgtgggggagcccgcggctggaactgctccgcttctggggaagacagagggtccaagagactgaaagcctgccctcagtggccagggggctgtccccagcttgggagggggagagaggattctgggagagagagtccaagggagggaagagccccagaggaaaactggggccaaaaggttggagcatacttgagggtggggtagacagaggcacaaaaaagggaagagagactcagaccttagccccccagattaggctaggattggccatgtgggtgaggcaagacttgggtctgccctcgggtgggggaggcatgtgcccaagaccctcttttgacccctagatgctgaaacactgcgccaacttccctcgggccctggaagtcctgcttaatgcctatccttgtgtcccatcctgtgagacctgggtggaggcggtgctcccagagctgtggaaggtatgtttgcctcagggccgagatggggaggagggacgagccacaggcctattccttcaggaccagcctcatggagggagcagcaggagggcccctgggtagagaggatgggtagagtggcacccctgggtttcagggtaccccctcccccggtaccccaggctgacccctaactccacacacctctcctgcctccctcacttgcatcagcacagacatttatctggcatctcttaacttggtgggcactgtgctaggctctctggggtgggagtggtatagacatagtggagacccttccctgaagtggagccccagcccgcattatcactgcagggcctctatggttctgaatctgagtcctttgagacacatgaaacacccaggtgggtgcatgctgcaaaatcccaggacccccaccgctgggttgcccccagatggtagggcaagggtcatctgaccttctttcactcctggcctaggagcacgaagcct

SEQ ID NO: 31312 - DNA, 1461 bp, Artificial sequence
  DNA replication origin
tgccccgggccgcagcgcagccgcgccaaccaccacccgcggccaccatggccagacgggctccctaagccaccgaccccagcccgcggtgccttcgagccttctggggcctccggcgccgcgacctcctctgcgctcctcacggaagacttttttttttttttttttttaagacggagtcccgctctgttgcccaggctggagtacagcggtgcgcgatcttggctcattgcaacctccacctcccaggttcaagtgattctcctgcttcaacctcctgagtagctgagattacaggcatccgccactatgcccggctaatttttgtatttttagtagagacagggtttcaccatgttggccaggctggtctagaactcctgacctcgtgatccgcccacctcggcctcccaaagtgctgggattacaggcatgaaccactgcgcctggcctaattttttgtatttttagtagagacagggttttaccatgttggtcaggttggtctcaaactcctgacctcaggtgatcctcccgcctcagtctcccaaagtgctgggattacaggtgtaagccactgcactcagcttgttttaaagagttttgattttagtgtgagaggagccactggagggcatgatcagagtttgactcccaaagaccattccagcaccaattcagggcatgggtctcaagatctcccttggagtgacaaaggcagggcaggcaagccagtgcacgcagagacagagtttgtccctctttaggaggctgaacaggtataagggtggcaggagagggaggtggtgggccactagaatcactggttcttggcatgggacctggatggatagaggggccatccacttaaacacaggaggagaagggaggtgaaggccgagtctgggaacaggccgagtctgcagcccttcctgctggagagagggtctgaagctcaggtccggctagaggtcagcaggtgtctcaagaagcccatggaggagtgaggtggaccaggacagcacgtggagtacagaaaagaggggcaggcaaccaggcgcagtggctcatgcctgtaatcccaacactttgggaggccaaggcgggtggatcacctgaggtcagtgtgagaccagcctggccaacatggtgagaccctgtctctactaaaaatacaaaatcagccaggtgtggtgactcatgcctgtagtcccagctactcggaagtttggggcacaagaatcgcttgaacctaggtggtagaagttgcagtgagccgagatagcgccactgcactccagcctgggcaacagagtgagactaggtctcaaaaagaaaagaaaagagggccaggaactggtcctccgcagttggaggcggggacaggtgggaggggcagaacacaccatgggacagcctgacatggggttcactggatgcacccctccacacgcagcagca

SEQ ID NO: 31313 - DNA, 1914 bp, Artificial sequence
  DNA replication origin
ccaactggtattgggactggagaccctaggatccctcagcaaaaagactgctgactcaggagaagactgctgggagctcctccccagttccctcctgtgataggtactataggttctgggtctatgagaggctttgtgtttctgttatttttattcatttttttatttttttttgagacggggtctcactctgtcgcccaggctggagtgcagtggcacaatctcagcttgctgtgacctcagctctctgcgacctctgcttgctggactcaagcgatcctcccaccacctcagcctcctgagtagctggaaccatcatatgcaccagcacgcctggctaagtattttgtgttttctttttttttaatttctagagacaggatcttgttatgttgcccaggctggtctcaaactctaggactcaagtgatctgccccccttggcctcccaaagtgctgggattacaggcatgagccaccgtgcctggcctttttttttccccagcctcagcaacatagtgagacccgttgtggtgcatgcctgtagtaccacctacttgggaggagtattgcttgagtgtggaaggttgaggctgctatgagcagtgatcgcgccaccacactccaacctaggcaacacagagagcccctgtctcaaaaaaaaattgttttagggacagtgtctcactcttgcccagactggtctcaaactcctggggtccagtgatcctcctgcctcagcctcccttgtaggtgggactacacggcacctggcccttgtgttgttcttgtaacagttgctcaatgcagaaaacttggaaaccacagaacagcaccagggggtggggaatgaacatggaatgatggggacctctgtcccatttaagtcaaacaacatccatactttggttccatggactaatcatttatttgcactcataaaaactggcttgctttgaaaagcttcctccaaaagctgtattgtggtacttttgactctgggacaagaggaagaagttggggaattcgggcagttggtggctgggccctcagagactgtatgtggtgaccactgtttaagacaccattcatcacttggggacggagggagcacatagatggaccccaggctcatggatgttcctccttccgcagtcatttactaaaatacctgttcaaggaatatagttccagtctcagcctagttgagacaaccacaggcacttaaataagtaccaaggaagcctctgcagagatagtgctattggaactgagtcctgagggccagatcagccttgaccaggccaaaaaatgtggaagagtattccaagcggtaggaataacacatgcaaacacctgaaagcaaagaggagcaggtcacatccagcaactggtgacttgtttactaaggctggagatgaaccttggaaggaagaagggaagtcaagaggccagataatttggcagaggctagaggctctgttctactgagttgttttctcgtttgttttgttttgttttttgagacagagttttgctcttgtcacccaggctggaatgcaatagcgtggtcttggctcactgcaacctccgcctcccgggttcaagcaattctcctgcctcagcctcctaagtagctgggactacaggtatgcgccaccacgcttgcttggcttttttttttttttttttttttttaaccctgagtggacacagcacatgtttcagagagcacagggttgggggtaaggtcacagatcaacaggatcccaaggcagaggaatttttcttagtgcagaacaaaatgaaaagtctcccatgtctacttctttctacacagacacggcaaccatccgatttctcaatcttttccccacctttcccgcctttctattccacaaagccgccattgtca

SEQ ID NO: 31314 - DNA, 878 bp, Artificial sequence
  DNA replication origin
ctacgtcgctgtatctggcatccacaccaaagaggaatttgggtagtcagccttgttccttaaagggaatagccagctgaaaaagccaaggatccaggaagaagaaagaacacgaagtcaagatggggaaaatggcaaagaaagcatgatttttggctggggccagttggcagcagatttggttggtgagagtccagggggctgtgactcttgtgaccgtagatgttctcccctggggcccaggccatcgctcaggagatatacgcggacctggtcgaggattcttgtttgggattctgctttgaggtacaccgggctgtcaagtgtggctacttcttcttggacgacacggaccctgatagcatgaaggattttggtgagcttcagggtgaaggagcagcagtccagcccttccctgggactgcctggagtttccttctctggaaactgtgctagatgtagcacctggagctcctgtgagccgggggagggattgaagaggccgtgggaccccaggtgggaacaagaggagagggtcctgcccaccctgatcgccagcctctcctgtccccagagatcgtggaccagccgggcttggacatctttggacaggttttcaaccagtggaagagcaaggagtgtgtttgccccaattgcagtcgcagcattgccgcctcccgctttgctccccatctggagaagtgcctgggaatgggtcggaacagcagccgaatcgccaaccgccggtgagggaaccagagctgcccgttctctgcagcctgtgccatggtgtagtcccccgggggcattgggaaggtacagagggtgggttttacttggccccagatgctccacctgcttctgaagttgggggcaga

SEQ ID NO: 31315 - DNA, 1572 bp, Artificial sequence
  DNA replication origin
ggagcagccgccgccgtcgccgccgccggaggacgcggccctgagaggctgccgggccccggcgcggccccccgggcggggtgagtacgggacggagacggggacggggacgggggaggggcctgtggggggcggggggcggggcccaaggcggggcttgggccccctccccccaggtctgggtcagcgccccttcccctccccccgggccgacgcggaaacgcccggcttcccccagcttcccggccgggccggggcccctggctctcccccgtctgggtcccccttgggcggggcagggccggccggggagggggcgcggggcctttgttagggagccaggccccagcccccgggacaatagagacaccctcccggactcctctccccggccggccggggctgctggcgggcggggaaggagaggggctgggacgcgtcccactctctgggggtcggtctgtcccggcccggcgccggccccggcggctcggctgtcctccccccagtcggtatgatgcagcagcagtgccgcagggacgggggaagagccgaggcccggcctcctacccttcccagtgcccccggctcattcgtcagtccccaccccactctaggccggcagctcctgaaactcgtacccaccgttccgaggggccctgggttgtgggttctgtgtctgaatccttgggtgggggttcctggactttggggctcttggagagacttccgggctggtcctgagggagggcgggtggttatttaaaggaagaacaggtaaggggagtgcccgctcctggcgtgccaccctaccaggctcttcccccccaccccccgccgttcctgctcatggtggctagaaatgtcccttagctctaggctcctgtgggctctgctcccctcgtggagtggcaggctgatttcaagggaagacagagtggggtgaaggttgtagggtcctagggccatttctacttctggtagcagtacccccccaagtggacatcctggctgaaagcagaggtgactctgaggagagtctttagggaaggcggggggtgtatttaggagtctgtgcagttctttgccacaccctgtgggtttgctttgaggccttggagttccttctcctccccctgctgcattgcaccatgggtatcaaagaggggtttgagttttggggacctagggtgagctgctgcctcctatagacccagactctgattggcagtggagtccagggcctgagctcaggcctgggaaagactaggccccctttaggtttcaggccttgaaggaccatccagacttagggagcctgggccttggggagggagagaccctgatgccaggactgagctttgggcagcgaggtggggagggaaggtggccgcattcagaggtgccttggactcacaacaacacccccacccccgtgtgtgcagccgtgttgccgcccgctgtgctatgagcagtcagagcgccgtctccacaagagtttacaaatgaaaatggaggaaatgtctttgtctggcctggataacagcaaactagaggtgagggctcccccac

SEQ ID NO: 31316 - DNA, 1544 bp, Artificial sequence
  DNA replication origin
gcccctccccaacaccccgccctccccctcccttcctcttccttctttcgctttcgcgcgcccagcgactgctcgcgcctgctagaagggcccgagcgcgtgcatctgccccgcggccgcagctcggcagcatttgctccagggggcggggaccgggaggggaggaggggcgccacgccgccgtccaaagtaccggcggacggggacgggggcggagagatgggcggggccttcgcggacctccccgaccaatcgcagggaggcctcggcccgggaggaccaataagatgggggtgggtggggcggcgttcaaggtgaggtgcgcggtgcgctgggggcggagacgttttgccgtcccggccggctcgggggcgggggcagcgggtggcgtcgaaagagagcgccggctgccagccgagcctgggacgccttccggcccaggctcccccgcccttccctcggggctccccgctctctcccccgccaccctccgctcccccctttaccccgaggcgtgcagccacttctgtgaagaggccagacttgaagtggggcgcagttaggacctcggggcggaaagcctgtggagcctaaggggctcgcccgcgcctcagttctcccggtttctgggcgggtctcagcccactccaggcttgcggaccaacaagcggccgagatgagggtccgctgctgaggtcggaggccgagctgcgcccttctgcgcggagcgccctccccgcccctcgtcctaatttagatcccacacctgctcgcctttcctgcttccggaacccacgctggacccccacccctccagacagcctccttgtcactggccagatccttcccccgacccagtgctgttcccctgggtgcagcgtgtccctgtgctcacgctctcagtccctctttaccttaggaagggacaggccttttcccagccgcggtggatggctggattggcgctttcatctcggttactctgtgtgtggtgtcctggaacggttgtgtgacagccctctcccctcaagagataagattaaaaaggaggatagtctgtaatcacatacttggagccatctttggtttttagttttcagcaaatacttatttttttctcaccgatttctcccgagaaacagcaaacatttattgaggcgatattccagagtagttcagatcaggcgtctgatttgaatttaaatcgttgggcctagcaaatgagtttcctgtgcctcagtttcctctgttgtcagtgggcataatgatagtcctatctccttgcgttgctgtagtgattaacaagtcagtgcatgtgaaactcttagctctgtgtaagtgcttggtaaatcttagctgttattctcacggtgctccaggtgctgggataaaagatgatataagacagttgtgcttcttcaagaagttcactgtcttgtggatagataggtaggataataattgcaaaacagtgtgaggaaaacaacagagagaaaacagaggtagacaaaaggagacatcaaatgatgtaagagagttggtca

SEQ ID NO: 31317 - DNA, 1738 bp, Artificial sequence
  DNA replication origin
cccaagcggcccgtgtcggccatgttcatcttctcggaggagaaacggcggcagctgcaggaggagcggcctgagctctccgagagcgagctgacccgcctgctggcccgaatgtggaacgacctgtctgagaagaagaaggtcaggctgcctggcggagcgctgtgcccccaggggggctgccagggccccctcttccccttggcgggccgtgccacctcgcccctggccgcctgagccacgcggtgcctgggctgggacgtggggccggcgcccagcagccggaaggcgggaagctgtcagctgagcgccgcagaccaggcgggggcgagccccaggcgggagacatctgcaccagcccatgcttctgcccgccggcgggagcgcctgggctgctgcgcggggagcgcgcgccccctgggggtgggtggaaggctgacgcccgggccatccccgcaggccaagtacaaggcccgagaggcggcgctcaaggctcagtcggagaggaagcccggcggggagcgcgaggaacggggcaagctgcccgagtcccccaaaagagctgaggagatctggcaacagagcgttatcggcgactacctggcccgcttcaaggtgacaggggtgggaaagggtagtactgcagcctctagccccgggtgacccctcccacggctgatacccttattggtccccagaatgaccgggtgaaggccttgaaagccatggaaatgacctggaataacatggaaaagaaggagaaactgatgtggattaagaaggcagccgaagaccaaaagcgatatgaggtaggaatggggctggggccaccccattcattgaaagctcgggaactcccctttggttgggcagctctgagcaagaagtcccagccttggtctgtgactctcagcaagtctcagcttccttctctgaacctctgtctctcatcagtaaggtgggggtgacattgctaacctccaggctgactcggaggatgcgagcagttgtgaaagcacttgtaaactgtggtgcctgcctcagacgtgagctgttaggaagttgctcactagctacctgtttctcctcctccctggcacagaaaaagacagccagctaaggtgctgatggcatgaggcagaaggcagcagtattttgggggtgggactggggggtgagcgtgacctttctccctccagagagagctgagtgagatgcgggcacctccagctgctacaaattcttccaagaagatgaaattccagggagaacccaagaagcctcccatgtgagcctgggggttggagtctgccctggaggtcggggagggtcagggctggatggctgctttgttggggtcctgaccctccttctaccaacccacctcccaggaacggttaccagaagttctcccaggagctgctgtccaatggggagctgaaccacctgccgctgaaggagcgcatggtggagatcggcagtcgctggcagcgcatctcccagagccagaaggagcactacaaaaagctggccgaggagcagcaaaagcagtacaaggtgcacctggacctctgggttaaggtgagagggcaagggacccttggaaggaacagagaggcatcagactaagccagcaccatcctagcctggcccatccacccacttgtgctggctggtctcattcatgatttcattccatgccctcgcaatccttcaggataacggtcactatcaccct

SEQ ID NO: 31318 - DNA, 952 bp, Artificial sequence
  DNA replication origin
agctgaacatcagtgaggagggtatcaccaagtccaccctcaccaaggccgaacgccagctcaaggacaagtttgacgggcgacccaccaagccacctccgtgagcgctgccctgggatgggtgggcgagtgggcagctgggaagttgggctgggctctgcaggtgagaaggcctgctgccctgctcgcttacgggctgcacctctctccccgcggctctgataggaacagctactcgctgtactgcgcagagctcatggccaacatgaaggacgtgcccagcacagagcgcatggtgctgtgcagccagcagtggaagctgctgtcccagaaggagaaggacgcctatcacaagaagtgtgatcaggtgagctgtggcaggggccaccctgccttggggttttgaagcatgaggtctgatcccatcttgggccagtcagtccctggtggcgtgtgccttgggtacctgcctccaatacagtgtggggctgggctgggcttagcaactgagcccgtccaggcagggagtccagcccacacccaggctctggaggcccgctgaaggtcactgtcctccgagtactgcagggtctgtggtgacactgtctccagactgatcctgactccactcactttcccagaaaaagaaagattacgaggtggagctgctccgtttcctcgaggtgagtgttcctccggtggggcagtgggcagagaagactgggacttggcaggcagagccctggtgagcccctggagatagggcaccatgcagtctgggtgccaggcatgcagccccgtgctcctctttcctgtccagagcctgcctgaggaggagcagcagcgggtcttgggggaagagaagatgctgaacatcaacaagaagcaggccaccagccccgcctccaagaagccagcccaggaagggggcaaggtgggcagagggtgcggc

SEQ ID NO: 31319 - DNA, 1381 bp, Artificial sequence
  DNA replication origin
tgatgttcagcatcttctcttcccccaagacccgctgctgctcctcctcaggcaggctctggacaggaaagaggagcacggggctgcatgcctggcacccagactgcatggtgccctatctccaggggctcaccagggctctgcctgccaagtcccagtcttctctgcccactgccccaccggaggaacactcacctcgaggaaacggagcagctccacctcgtaatctttctttttctgggaaagtgagtggagtcaggatcagtctggagacagtgtcaccacagaccctgcagtactcggaggacagtgaccttcagcgggcctccagagcctgggtgtgggctggactccctgcctggacgggctcagttgctaagcccagcccagccccacactgtattggaggcaggtacccaaggcacacgccaccagggactgactggcccaagatgggatcagacctcatgcttcaaaaccccaaggcagggtggcccctgccacagctcacctgatcacacttcttgtgataggcgtccttctccttctgggacagcagcttccactgctggctgcacagcaccatgcgctctgtgctgggcacgtccttcatgttggccatgagctctgcgcagtacagcgagtagctgttcctatcagagccgcggggagagaggtgcagcccgtaagcgagcagggcagcaggccttctcacctgcagagcccagcccaacttcccagctgcccactcgcccacccatcccagggcagcgctcacggaggtggcttggtgggtcgcccgtcaaacttgtccttgagctggcgttcggccttggtgagggtggacttggtgataccctcctcactgatgttcagctctgggtgcttctggatatagtctctcatgatctcctgcagagccaggtggggggacggagggcaatggggtgtggagttagctagggcaggggcagggggagagccgctggggagggcaggcagggagcaaagctgggggtggctgcgcgtcagtggtgtcacacgagacgtggtgccctgccctgccctagcctgagatctcatgggggtggggggtggggaaggtaggggcagaggtgaggggcccagaaggcccctccctcaacagagggatggggagtgacacctcccgcagagtgcggtggccacggagtcggagggcagaggctcgtgaagagccggacggggaggagcgcagcggaagcctaacctcgtactccttccgctgctccagggccttatgaatccatttcagcctctttttgtccgagagctgagaccactgcttccccagggagtccttcacctccttcgtagtggcctgcaaaccaaaagccgtcag

SEQ ID NO: 31320 - DNA, 894 bp, Artificial sequence
  DNA replication origin
cccaagcagagaggggtatggattgctggaactgttgacccctttgatgaggatgttggacagttgactgcacacacccaaacactctcatgggatgggagggagaggccaagctctagagtcagagccagggaaggccagaagaaactggtagagtggacaaggtgctgtcctgggggacacaagacttgggcctgttctcctggctctgccactgaaccgctgtgtatggggcctttggtaagtcatttcacttctgtgggcctggtctttatgtgaggtgagccaggtctgtgtggtccccttcaggtctaaaactgttttgtctgaggaggactgagatgggggaagaggaggctgagctctgcttctggttttctgtgggaactgtgggaaaggagcactgcctttctatgcctggtgcttctataagaggcaggggttgggctcagttgccatgagctcctggcacctgccagtgccactcttgtgagcccgcgaggatgaaagaagagatggacattgtgtgggagccaagagagaaggtcgatgaggaagagaaagagacacattggaaaggaggaacaagaaggagactatggagaagtggggaaagatgcagggagggagtgaggtgagagtggggaggctaaaaagggggtgatgaagggaagggaagccaagtggtgggaaagaatgagtgggctgagggagggagggctggaggggccagacagccaggatcctggagaaagagaagaaggtgatggtgtgagaactgggcaggaagatgcagggtagctggctgagacttgtattggaagaactcgctctgggttcccctccacacaatctcccctcatgccttggaaacaggactcagcccagccctgg

SEQ ID NO: 31321 - DNA, 1971 bp, Artificial sequence
  DNA replication origin
ggcggcgcctctggccggggtgggtggctcgggggcggggggcaggctaggccgcttctctccggctgcttgcccgcctgtgcgggcggggacggcgaagggagcccgggaggggggagcggcgggaatccggatccggtccccgggggcggtgcggccgctccgctccggggctggcggcggctgcgctgcgtccgggtccccgccgggttgcggaggcggggggaaccggccggggggaggcgggaggaggagactggggcgcgtgcccgcttccgtggccgcgcgcgccctttacccgcccttcctcttcccccgccctccagcctggggcctccccggggcgggcgctccgaggaggaggagattttttctttttttttttttttggctggggttgggaagcggggcggagggcgggcgctcgctgcacgcgggagctaggagcaggccctcgcgtggccaggggagggcgcgcgccgcggagccgggctgcaggggctgggggagggggtcacgaggaagaggaggggcgcactcccattcccatagaccccttaagtctaataaggtcatggctgagtctctcagagtgtggacctgcccccttctactctgggcggttagaaagtcgttagtcgttcacctctcagccttcctgagtgggaactggtatgtcttccaaagggtgaggtggctttgaccccgggttgcccggccagcacgaccgaggaggtggctggacagctggaggatgaacggagaagccgactgccccacagacctggaaatggccgcccccaaaggccaaggtaggggcatccacccccggccctctgaaacttaaaccctctttccctcgtggctgcggggctcactcccttcttcaagggctttttcagtctgcatacactgaactgggggagaaagtgccttgagtatttatgaatcaagcatctcccacacttggggtttggctgaatccaaattatttggcctggagtggctcacctcccctctctccctgtccctcaccctctgtgttagaggaggcctgccttctggggttcccattcagcctgaagtgtgtcccagcccagtgtcctggaatgggaggaaggatgagtgtagaggaagggtcaggaaggggttggggaaggcttctcaggctttttaggaagaccatgaggcttttgtagaggcaggtggagaaaagggctgttttggtggttttaggccccaagccatgggatatatgtactcaactagatctctgcctcattcagcagtgatccagtctagatggggatagagagtaggatgaagctggacagctggccatgcttgtgggacattgaggggagaggggattatgggtccacgtggcccattctgcagaatctctggcccaggttaccagatgcaaatgaaaatggagagcccttttgacttctggccttgggtggctattctcccagcccatccacagtggcctagagctctctggggctgcatttcagtggctgaaaaataactgttccagacctgttcttgcttccctgggtagttgggctgacaagacagcttgtaattctgggggttctccctggagcagggccctgagagtttctgtgcacctgcctaccttgcctcagagctgccctgtatcctgcttctgcttctgtttcctttttcttatttgccagaaattctcccttgatctgctttaaggggctagggggtggtgggtgtctctaacattggtttccagctgtgcaggagagacatctgcatggattttccttactgtccacaccccattctcagtcgttgcacatttagaatatccactcagaacttgaacttggcagcacatttagatatattgcttccctgcttccctccttctctgacaagctacctcgtttcccacaaagccctgaatcactgtaccttcatttccacccctct

SEQ ID NO: 31322 - DNA, 963 bp, Artificial sequence
  DNA replication origin
ggcggcgcgcgcctgcgatcgcaggcactcggcaggctgaggcaggagaatcaggcagggaggttgcagtgagccgagatggcagcagcacagtccagcttcggctcggcatgagagggagaccgtggaaagagagggagagggagaggagggagagggagagggagagggagaggggctcctatcatctcttaaaggtctcacctttctcgttttttttgtttttttttttgagatggagtttggctcttgtcacccaggctggagtgcaacagcatggtggcagggtctcggctcaccgcaacctccaccttccgggttcaagcgattctcctacctcagcctcccaagtagctgggaatacaggcgcccgccaccatgccagtttaattctcgtatttttagtagagatacagtttcaccatgttggccaggctggcaaactcctgacctcaggtgatctgcccgcctggacctcccaaagtgctgggattacaggcatgagccactgtgcctggccagcctcacctttctcttttgctctcagtcttctaggccccttccctctttgggccctatcaagttgttgagagttgttgggtgggggatggtgtcactccgggactgggtaataaacccttttctcctctgatcactgctaacaaggtgtgtcatatttgagaggtttgtttctgtctctttgtatatgaggggtctgggttctcagttttgctgaccatatggaacagttctagggctgtgtgacaggatgtgacccagggctggcaggctgcagggacatgagctgtggaaattgagagggcagagagcagaatgggctgaagaagtagctttcagtatttattgagcacatactatgtgctaggcacagttccaggtgctttccgtgttcttactcttttcctcctcacaataaccctgtgaggtcggctttagccccat

SEQ ID NO: 31323 - DNA, 1254 bp, Artificial sequence
  DNA replication origin
ctcacctcccagacagggcggctggctgggcggggggctgatcccctcacctccctcccggacggggcggctggccgggcagaggggctcctcgcttcccagtaggggcggccgggcagaggcgcccctcacctcccggacggggcggctggctgggcggggggctgacccccccacctccctcccggacggggcggctggccgggcggggggctgacccccccacctccctcccggacggggcggctggccgggcggggggctgactcccccacctccctcccggatggggcggctggccgagcagaggggctcctcacttcccagtaggggcggccgggcagaggcgccctcacctcccggacggggtggctggccgggtggggggctgaccccccacctccctcccggacggggcggctggcctggcgggggctgacccccacctcccttccggacggggtggctgccgggcggagacgctcctcacttcccagacggggtggcagccgggcggaggagctcctcacttctcagatggggcagttgccaggtggagggtctcctcacttctcagacggggtggccgggcagagacgctcctcacctcccagacggggtcgcggccgggccgaggtgctcctcacatcccagacggggcggcggggcagaggcgctccccacatctcagaggatgggcggccgggcagagacgctcctcacttcctagatgggatggtggccgggaagagactctcctcactttccagactgggcagccaggcagaggggctcctcacatcccagactatgcgcggccaggcagagacgctcctcacttcccagacggggtagcggccgggcagaggctgcaatctcggcactttggggggccaaggcaggcggctgggaggtggaggttgtagccgagatcacgccactgcactccagcctgggcaccgttgagcactgagttaacgagactccgtctgcaatcccggcacctcgggaggccgaggctggcggatcactcgcggttaggagctggagaccagcccggccaacacagcgaaaccccgtctccaccaaaaaaatacgaaaacccgtcaggcgtggcggcgcgcgcctgcgatcgcaggcactcggcaggctgaggcaggagaatcaggcagggaggttgcagtgagccgagatggcagcagcacagtccagcttcggctcggcatgagagggagaccgtggaaagagagggag

SEQ ID NO: 31324 - DNA, 943 bp, Artificial sequence
  DNA replication origin
cgaggagcccctctgcccggccagccgccccgtccgggagggaggtgaggggatcagccccccgcccagccagccgccctgtctgggaggtgaggggcgcctctgcccggccgcccctactgggaagtgaggagcccctctgcccggccagccgccacgtccgggagggaggtgggggggggtcagcccccccgcctggccagccgccccgtccgggagggaggtgggggggtcagccccccgcccggccagccaccccgtccgggagggaggtgggggggtcagccccccgcccggccagccgccccgtctgggagggaggtgggggggtcagccccccgccaggcgagacgcctcgtccgggagggaggtggggggtcagccccctgcccggccagccgccccgtccgggaggtgaggggcgcctctgcccggccgcccctactgggaagtgaggagcccctctgcccggccaccaccccgtctgggaggtgtacccaacagctcattgagaacgggccatgatgacaatggcggttttgtggaatagaaaagggggaaaggtggggaaaagattgagaaatcggatagttgctgtgtctgtgtagaaagaagtagacatgggagacttttcattttgttctgtactaagaaaaattcttctgccttgggatcctgttgatctatgaccttacccccaaccctgtgctctctgaaacatgtgctgtgtccactcagggttaaatggattaagggcggtgcaagatgtgctttgttaaacagatgcttgaaggcagcatgctcgttaagagtcatcaccactccctaatctcaagtacccagggacacacacactctgcctaggaaaaccagagacctttgttcacttgtttatctgctgaccttccctccactattgtcctatgaccctgccaaatccccc

SEQ ID NO: 31325 - DNA, 837 bp, Artificial sequence
  DNA replication origin
gctcaataaacatttactgaatgattgtaagaatggctccctattgcggggttggggctctgagactggggagccaggatgactaggccccagccaagaggcctctgagctcggggtctcagttttctcagttgtgtccctagcagagaggaaggtgtgccttccccaggaatgtgagggcaggtccaaggggaggacaggggtcacctaaggtggccccagactgggtgtggaggtgcctcttttccctcctcgcccactacagcacagggcattgaggtgacaggcaattgggtcggttcaacaaaggttcccactctgtgcctggcattgtgttgagcactggaggctgtggggagggggtgccgagcactgggggctgtggggagggggtgctgagcactgggggctgtgggagggggtgccgagcactgggggctgtggggaggggctgctgatcactgggggctggtgggagggggtgctgagcactgggggctggtgggagggggtgctgagctgaacaaggcccgtctctactctggggaagctcctagccgcgacagggaggcaaactgggaacacagggcagcctcagtgcttccgaggtgacatggaccccaggggccgaaagtgctgagtgccaaggatctgtatggcaggaagaagagcaggacgcgtttgcagcactcgggggtggagtcaccggaggaggggtcactggcgctagcctaaaaacacaggtgagtttttcttgtttttgagacacagtcttgctctctctcccagtctggagtgcagtggcgcgatcttggctcactgcaagctccgcctcct

SEQ ID NO: 31326 - DNA, 696 bp, Artificial sequence
  DNA replication origin
aagctcctagccgcgacagggaggcaaactgggaacacagggcagcctcagtgcttccgaggtgacatggaccccaggggccgaaagtgctgagtgccaaggatctgtatggcaggaagaagagcaggacgcgtttgcagcactcgggggtggagtcaccggaggaggggtcactggcgctagcctaaaaacacaggtgagtttttcttgtttttgagacacagtcttgctctctctcccagtctggagtgcagtggcgcgatcttggctcactgcaagctccgcctcctgggttcacgccattctcctgcctcagcctcccgagtagctgggactacaggcgcccgccaccacgcccagctaattttttgtatttttttagtagagacggggtttcactgtgttagccaggatggtctcaatctcctgacctcgtgatccacccacctcggcctcccaaagtgctgggattacaggtgtgagccaccgtgcccagccaagcactggtgagatgtgaagggctgggagtccagatgtgaggcatgcctgggtggagctgaacaggtgggctgagcaaggtgggaaaatgccacgtgagggcatggggcagggagcctggccaacatggtgaaaccccatctctactgaaaatacaaaaattagccaggcgtggtggcgcatgcctgtaatcccagc

SEQ ID NO: 31327 - DNA, 1069 bp, Artificial sequence
  DNA replication origin
ggttgactgaatgtcagtgtcttagtgtccaggagccagctctttagaaccagccagggtcttggggagaatgtggctggggcatcctagtctggatcaaggaggggagggggctgtccgtgccccgtgagtgctgagcagttccctgtggagaaaactgcagaggaggagtgagtcctagcgtggataccaagagagacgagaggagcaggcgcccttgcaccttggggccagagcagaagggcctggccagagtggaggatggacagaggcaggacagggacctctggaggctggtgccttcctgccagggcactgggagccctgaggacagagcgatcaaaccttcatccacaaaggaagagtcaggagaaccatggggaccaggagggccccgagaggccttgggggctggccaggcgggtggggtgggccagactcacagctgtccagatgtgggtaagagataactctgtttactgggcacccagtgggagcggggtggggggtgtgggaaggggctcccagggccagtggggcgggcagattaggaggcgggggcatgagtcaggggtttgcgagctgcccctggggcgctggtgctgtcagaacgagtgggaacgtagctggtcgcagagggcaccagcggctgcaggacttcaccaagggaccctgaggctcgtgagcaggtgggcagggcagggaggggctggggatggtccttcggtgcctgccctgagggcttctacaggtgcccagcctgaatctatgcccaggtgggccaggctcctgacctccaagggggtgcaggtgggtggggtgagaatgttaccatgcatatgttgcccctaagggaacaggcccattggcacctgaaaagaggagggtggcaggtggtcaatggcagcagaggtatgtgtggctccggtgcgtgtgttgcggggggtatctgatcccctccaggtatgggcccttgtcagcttgttggatcccacagggtcaggtcttgtccaccccagactccttccttcctaatggggtcctcagaccaccccctctcccacctagg

SEQ ID NO: 31328 - DNA, 840 bp, Artificial sequence
  DNA replication origin
ccacggagcacaggtcagaaacaagggagtagagaggtcggagccagagactcgaggcgaggcgaggcgaggaggagcgaggagtctcgggcccagagtgtgggggtggagggcaggccccctgctcctccttccaatctctgcttctcccgggtaccccctccgccctccgtggggcccgggctctgcccctcccctcagaccctgcaccctctgcggattggtcctcggcctgctggggggcggggcccgagggccctgacgtcactggccgaggggggcgggcggctggaggagggggtgacggggccccggctcagcacctcggagagctccctccccggccttgttttgctctggcatcgccgccgggggagggagcgagggggccgggcaccgggcgcaaaggcagggggatggccatggaagggttgaggggccccgtcggacagagggcccagccgtgatccagcgacgggtttggggctccgggaggggtgggggggcagcgggcggcggcagcagtggccgcacatctggatggaagcgagctttgtccagaccaccatggctctggggctgtcctccaagaaagcgtcctctcgcaacgtggctgtggagcgtaagaacctgatcaccgtgtgcaggtgggcaccgctagtgggcgggggctggggtggtgagggagaggggttggggtggactgcggaaacccggactgagcgctgccgcggagaaaagggaggggagaaaagggtcgagaataatgcgtccactgtccctcccaggcccagaacccagagggaggctgcagtctggtccctacccttctaggccaag

SEQ ID NO: 31329 - DNA, 1012 bp, Artificial sequence
  DNA replication origin
ctttggtgtggctgtgacatctaaaatggggatgatggggcacccaaggcccagagtggttaagagacctccccaaggtggcgcagctaaagctgatggagtaagagcttgaacctaggaccttctggccccaaggacagaaatctttgttttataacacactggcaggggttgggggaaatgagggtaaaggcagtgccctgcactgtgggctgggccattgctacactctctccttccttaaagttccaggcatttctgcagaggtctgatgtgcacagcactgtgctgggcactagtgctgggagacagatgcagtgtggtggagtgcgtgcccaggaaccgggaaggagctatgggagccaggagccagggcatcaggtgggcactagtgggcctcagggcatcaggtgggcttcagcagagctgaggcctatgtggcaggcaggtggggctggcgagggaagagtgagccctgcccccaggagcaccctgcactgagggggcaacacctgataggcatgggggccaggggaggttgcagctgacaggggatcccagcaccagaggagagtgcaggtgtgggctgcagggggagtggctgagcagctggccatgccctggttttgggacagggcagggcagggagggtgagtcactgcaggttgaagtgaacaggatcacttcctgggccccgcaatcacggagaatcttcccaaccctgcaaccgttccaccctcagagaccagtggccctgtcctcccgatcttctccccttgaacctggaacccaggctcttggtccttcccacgtcttgggtggtgcccctcacccttccctggaaggattcatgggctctgaccccatgcccaattgaccctgcccatccctgctccagaatctgagcattggagaaccccaccccagagaggtcagtttgacatgggtgtcaatgagggtatgcttggagggcattcatccccccacggggtcccctctgtccatcctgccc

SEQ ID NO: 31330 - DNA, 973 bp, Artificial sequence
  DNA replication origin
aaccagctcactggacctgctggggcacaggctgagccagggcagggagggggctcagcaagaccagggagtttggagagggtccatgtagtgaggcactcacatgcataagcataagcagcctcctcccacaaagatctgtgcacacacatgcacgtgtgcagtgggcaccccagcatatcgcttgcccatgatggggattgtaggccaaaggcctctccctcttcccagatctgtacacaagcttctgtgcatggcccagaatgggggccagggtcaatgagggggttcagagtccatggagtatatcagaaagaggtggctgggagctaaaggttgggagttggggagggaccgctgggggaggggcgctgggggagggaccactgggggaggggcgctgggggagggaccgctgggggaggggcgctgggcccacctttgaagcggtggctgaggatctgctctaaaatggctgcaaaattgacaaactcctccgatgagtcatcgatgggctccgctgtgtacttctccagcagcgttttcacagagaacctgggcggcgaggtggggagatggggcagtggggtgtcaggtgaggaaacaggtgatggagggagagacagggagcaaccggcagagaagaaaggtcaggaagggcatggatgtggtggggggcagagcgagtggggagacaggcaagactacagtgaccatagaggtaccgtgtcatgtggagtgagagggtggcagatggggaggaagggtgacaggtgggagactgattgacaaagtgggtgacaggagaggtgacagccagagaaaggaagcttcgggagcaaggggtgagagggactgaaaaaataggaagatgaggcacaagccgggggcggtccaggagccccttccccatagaccacccttcagggtctgtgtgtgcgaggcctgggtcaactaggtgttagaagccagt

SEQ ID NO: 31331 - DNA, 1391 bp, Artificial sequence
  DNA replication origin
gaggcagaggttgcaatgagctgagattgcgccactgcactccaacttggatgacagagtgagactccgtctcaaaaaaaaaaaaaaaaaaaagactaagagaatgaatgaggacatgccttgaggcctcagggccttgcctcagccctttctggaggggtactgggtgttgggttgggggagctcaccgatgggaccccagggctcctcgtcccgcgtgccctctcccaggcgctgggagtccgagctcagactggcttcagctgacagcggctccgtgctcatgaagctgtgtctgcggcagagcgagagctggtgcgccggtagaggaagcccttcttccccaggacgacccgctctcaggcccaagccccacctggctggggcttacctccggtagagcttggagttgctggcgccctcggccccattaagcgttcccagtgagggccattgattgaccaggggtgtagtgagctccttggaaccctgggccagaggggcgtggtcactggggatcagacctgtcctgggagggggaggaggagtcaggcctggctggaagtaggagaagtgaggaagggagattcagcaaggggatgagggaggggtcaggaatgaaatctgagcggcaaaaatggggatacggtgttggggtcagtgggccagatcccgggaggaagtggaggtggtactggggtggaggggtgacagggattcgtgcacaaatattgggagttggagggaatggtgcagtgttgttggggtcagctggggtgatggggacgtcagtggaggatagtgtgggaatccctgaagtgtaagatcgtcttggggatcttgccgcaagatcagggtggtggaaaggcgtagagaagaagtgttacagggatcggcaggggtgaggtcgggggtcacggcggatgatgacggtcagtgagcctgtggtgcaggtgagtgaggcgatgaatgcaatcgtgttgaaggttgcagagcaacaccgcaggtccttgtgagtgacgtggggtccctgcagtaaggttggatggccactctagcggaagataactgaaggtgaagggtgggctctggctgttggaagtcactggatcttatgctgggggcaatgttagaagatcattgtgggcatctcggggtggggctggctggatcagagggttgatgctggagaggtgggtgctcgtgtcgggtgatgttagagtcgatggaagtgaagatggggttcacccggtgatgtggtcggggcggcgggggtcaggggttagggcaggccgtgcgctcacagctgctcctgcagctccaggatcacgccttccagctcccgtttctcgcgctggttctgcgccgccgcctcctccagctgcagctga

SEQ ID NO: 31332 - DNA, 2827 bp, Artificial sequence
  DNA replication origin
gaagtagatggcggtagctggcacagtcatcaccctggggatacagagagaggttagctgggactcccaaaaggacccaaacttttaaagcatcacctgccccacctagccattcaacagggagcaaagggtcaggaagtaccagaggagagtggtgcaggacccggctactcacagggtggcggggaggccgctccagagggtcctggtgccctcgtgcctcacgatcttcacgaaggcatcctggccaagcaggcaccagcccaggggaagaggagggacacaagtgatgtctgtgatggggctggcccaggctaggcctttgcctgacgccctcagcctctgcccacagccctcaggcctccctgcctctacacatgcagtaccccagcagctgggtccaggcggacacctggtcacccttcaaaaaccttatggaggccaggcacggtggctcacatatgtaatcccagccagcactttgggaggccaaggcggataaatcacttgaggcaggagttcgagaccagcctggccaacacggcaaaaccctgtctctactaaaaatacaaaaattagcggcaggtggtggtgcacgcttgtaatcccagctacttcggaggctgagacaggagaaccacttgaacccaggagacagaggttgcagtgagctgagatcacaccaccgcactccagcctgggtgacagagcgagactctgtctaaaagaaaacaaacaccccatggaggtactgccttctccggaagcacttcctgacggaaccggctacctctgcgtgccttgcccaatccctttactcctgggtctgctgcccagccagaccgaactcctcacggacaccgacgaatccctacggacccagctgctcctcaccatggtgccagtgaagcgggtagggtcttgaaaccaggtggcacagcgggcaccatttgggcacaggtacagaggctccaggacaccattgcaatacaggaggcacttccctgtggattggagagaggagggcactggggaaaggcagggggcattataatgacaggatcctagaaccttgcagggaggcagtgggcccctatccctggaaggccagtaaaggccaggtccctgtgtggatgttctggtgcaggtcacaggactggctggcaggacctgggagtatatgctagtccatggctgtggagcccactggtgccctggggacagggacaaggactgtctcccccttgcaccctcccatgctccctgtggcttggggcactcacatttggtataggagaggctccacagtctggaggaaggcatcagctctaaaatacaaggcagcccctcaagtcaggagagcccccacccgccctagggaccccatctctgggagatctttttattttattttttgagatggagtcttgctctgtcgcccaccctggagcatagtggcacaatctcagctcactgcaacctccaccttcccggttcaagcgattctcctgcctcagcctcccaggtagctgggactacaggcgcatgccaccaagcccggctaatttttgtagttttagtagtgagagagtttcaccacgttggccaggctggccttgaactcctgatctcaggtgatccacccacctcagcctcccaaagcgctgggattacaggtatgagaaaccacggccagcctctgggagatctttcttttgcccaggcaccacccctcactagttccaggtcaggtactcaccgctggccatggagggccgctgagactgcaggcgaaccttcaccacgtccaggggtgtcactgggggaggaagcgggtctgaaggctcctttcaggaccccacccctaggactcctcccccaggaccacacagcctccaatctccggtctgccccatccccacccgcccccaccccacctcccctaggtcttactgaagagagaggtaaccacagccccggtgcctgaggccaccatttgctggagggggctgatgcccgcagggtcctggtcagccatcttgaagcttcagtcctgaaaaccaaacctcaaacagaccacaactccagggatggcaggaaaggaggctgggccactgtgagacttttgttttgagacggcgtctcgctctgcgcactgttgccaggctggagtgcagtggcaccatcttggctcactgcaacatccacccccgttcaagcggttctcttgcttcagcctcccaagtagctgggactacaggcgcgcaccaccacgcctagttaatttttgcatttttagtagagacagggtttcaccatgttggccaagatgatctcgatctcctgacctcgtgatccgcccgcctcagcctcccaaagcactgggattacaggcgtgagccaccgcacccggcccactgtgagactttaacccaaccctcatccaccgccctcgaaacatctgttgcctcaacaaccctggcaatgacctctaaagcagggactgtccgcccccctccgccggggaaaactaaggctcggggagacgaggtggcctgcccaaggtcactcaggagtggttccgaaggaagctagggtgccagacctatcgctcgaatgcagtaggagccagggtccttccctcgtccacctcgcacgtgtccactgcgcacctcctacgtgcaggcgcggatttggccctcgtggccccaaaatcagagtacctgtgctgcccccacagcccccactccagcaccaaggccccgggcaggcacctgagagcccaagttactgggcgtggagggacggccgggcatcgagggtgacg

SEQ ID NO: 31333 - DNA, 1364 bp, Artificial sequence
  DNA replication origin
cagcctgggcaacaagagcgaaactccgtctgaaaaagaaatagattaccccgttttacagaaagtgaaactgaggctcgacgtgaagagccggagattcgaaccggccgggtgcttttcccagggctccacactgcctccccgggagacaggaaggcttaagtccagcgctgccctctccgatcccgcttgtcagggagacactttatttcccggggcagccccgtaccccaggccccaccacccacttcgcgtttagaacttctgtgctatcttgcttatttgtcctaacagagaaaccagcacgcgcgggcggtggcggaggggggcgggcgggcgggtggaggcgggggggggcgggcggggagatgggtactcctagcctgcgcctttaagaagggtaggcctcgactttgacgtctctgccttccccgcccttcaggcccccactggtcgcgtccggcgctggaggagcccagtcagccggcgcctgccgggttagcacgtggactccgaggggccaactatcagctttccctgacaaaatgcctttgagctcccccacagctctgaaactccagcttgggagcagggagagtgcaatctgtgacctgtaaaggggcgctgggcaaaagggcccgagagaaggcgtcctttccattcccttcccatctcaagctgagttcagaaatgacacgaaataatttaatcaactatcagtcaaggtcgggctcacgcctgtaatcccagcagtttgggaggccgaggtgggcggatcacctgaggacaggagttcgagaccagcctgaccaacatgacgaagccccgtctctactaaaaatacaaaaattagccagcggtggtggtgcgcacctgtagtctcagctacttgggaggctgaggccagagaatcgcttgagcccgcgaggtcgaggctgcagtgagccgagatcacaccactgcactccaacctggatgacagagggagactctgtctcaaaaaataataaataaataaataaataaataaactatcggtcaaggtgaaagcctactctccgccaaggttctttacaacttagacgttttggtttacggaacaggggaggaaactgagggctcttgtgtgtagtgactttactcgtgtggaggagaacccagactttccctgcacacactctcccgttttatggatgagaaaaggggggccccaaaggtcaaatcgccccaaggtcactcaaatgaaagagtcagcattagaccccccaacgtgcctgagccagatgggctcccaccctgtccagttctcaacccaggtgctgtgttccagcagcaccctgacctggctttccatctcacctgcc

SEQ ID NO: 31334 - DNA, 1232 bp, Artificial sequence
  DNA replication origin
tgcccactgctctgccggccactcctgcatctttaccgtctcagggacttccagttgctgccccttcccagaggtgagcgtgccatcagcccagtggaggggcttaggtctgcatttatgcttttcctgcactctaccacctgcagataaaagggccctgccaatgcaggtttctctgtgttccacaggccgtggcatgcggggatggccatcactgctgcccacggggcttccactgcagtgcagacgggcgatcctgcttccaaagatcaggtgcagctggggtgtgggtgcagggcaggcagacgggcagcatgtggagtctggaacccaggagcccagctggcgggggcagccctgattcctgcccttgtgccctcattcatgtggcatctgtactaagcaacagccctgctgtggacagaggggcagcactggggataggagggtgcgggagaaagtgcaagactccaggtccaggcgttgtgggggtggggagaggtcgagctgggccggtctaataccaacccatggtcagtgggtgccccttccccatgccatcttgctgagggagggactggattgtgaggagggtgagttaggcctgcctaggagatcactgagccttagtgtcaccctcaaaccccagtagctgggcttgcaggccctggtgccaccagctccttgtgtgatgggggagtcaccttccctgagtgggctggtagtatcctgggtcatcttgtccacaggtaacaactccgtgggtgccatccagtgccctgatagtcagttcgaatgcccggacttctccacgtgctgtgttatggtcgatggctcctgggggtgctgccccatgccccaggtacaaatctgggggagatgggggtatgtggagggaagtgggggcagagttgggggccaggggcagggggtgaagacggagtcaggaccattttttctcaggcttcctgctgtgaagacagggtgcactgctgtccgcacggtgccttctgcgacctggttcacacccgctgcatcacacccacgggcacccaccccctggcaaagaagctccctgcccagaggactaacagggcaggtgaggaggtgggagagcatcaggccaggggctggggcggggcctcattgactccaagtgtaggaaaaagtttcctccatcctggctgcccctcacgtttgctcctcttccagtggccttgtccagctcggtc

SEQ ID NO: 31335 - DNA, 2283 bp, Artificial sequence
  DNA replication origin
ggagggaagtgggggcagagttgggggccaggggcagggggtgaagacggagtcaggaccattttttctcaggcttcctgctgtgaagacagggtgcactgctgtccgcacggtgccttctgcgacctggttcacacccgctgcatcacacccacgggcacccaccccctggcaaagaagctccctgcccagaggactaacagggcaggtgaggaggtgggagagcatcaggccaggggctggggcggggcctcattgactccaagtgtaggaaaaagtttcctccatcctggctgcccctcacgtttgctcctcttccagtggccttgtccagctcggtcatgtgtccggacgcacggtcccggtgccctgatggttctacctgctgtgagctgcccagtgggaagtatggctgctgcccaatgcccaacgtgagtgaggggctggagccagcttggctgtgtgcccccagccacctggccctgacacgcaccttacaggggctctgtggcatggggctggctggctgcttgctgggagcctggctgatgcagggttcatgctaccccctagtgggggattggggcagtgccagccatcagcctggctgctccctgtgtgctactgagcctggaagtgacaaagacccacccctgtccccactcaggccacctgctgctccgatcacctgcactgctgcccccaagacactgtgtgtgacctgatccagagtaagtgcctctccaaggagaacgctaccacggacctcctcactaagctgcctgcgcacacaggtaccagaggcagggtgcagatacaggggtggggccccctttcctcccttttaggcctggccttaggatcactgcaaggtggtgtaagcggtaccctccatcttcaacacctggttccagctgtggagccggcaaagggttgatacccctgagggtccccagtgccacttctgacctgtcctctctgcttccctcacagtgggggatgtgaaatgtgacatggaggtgagctgcccagatggctatacctgctgccgtctacagtcgggggcctggggctgctgcccttttacccaggtacccaggggtggcgggtgggtgggctgagcacagtgtggcaggcagccgggccccagtgcccacctgcccttcttcatctgccctaggctgtgtgctgtgaggaccacatacactgctgtcccgcggggtttacgtgtgacacgcagaagggtacctgtgaacaggggccccaccaggtgccctggatggagaaggccccagctcacctcagcctgccagacccacaagccttgaagagagatgtcccctgtgataatgtcagcagctgtccctcctccgatacctgctgccaactcacgtctggggagtggggctgctgtccaatcccagaggtatatgggaggggacagcatcttggcctgggcaggtgggtggccaagctcctattgctttctgccctccgcatagcccataggtgatacccagctctgacagattcgtccccagctggaggtgctgtaagcaggagaggcgggctggagtaggtaggggctcggcactgcgccccacatagtggctacctacaacgccctttcctgcccaccccccaggctgtctgctgctcggaccaccagcactgctgcccccagggctacacgtgtgtagctgaggggcagtgtcagcgaggaagcgagatcgtggctggactggagaagatgcctgcccgccgggcttccttatcccaccccagagacatcggctgtgaccagcacaccagctgcccggtggggcagacctgctgcccgagcctgggtgggagctgggcctgctgccagttgccccatgtgagtgcctccctgcctgcccctggataggggagctaagcccagtgaggggacaggaacataatgccattctgtgctcccttccccgccaggctgtgtgctgcgaggatcgccagcactgctgcccggctggctacacctgcaacgtgaaggctcgatcctgcgagaaggaagtggtctctgcccagcctgccaccttcctggcccgtagccctcacgtgggtgtgaaggacgtggagtgtggggaaggacacttctgccatgataaccagacctgctgccgagacaaccgacagggctgggcctgctgtccctaccgccaggtcagtgccaacccccatcctggggctgggtatggccagggaccaggtcccacctcgtccaaccctctcgcccccctctga

SEQ ID NO: 31336 - DNA, 1335 bp, Artificial sequence
  DNA replication origin
gcgggagcgcgccccgcctgccgcgccgccgccgccgcccgcgcccccgcgcctggcgctcagcgaggacacggagcccagcagcagcgagagccgcacgggcctctgctctccggaggacaactcgctgacgccgctgctggacgaggtggcggcgcccgagggccgggcggccacggtaccccgggggcggggccgcagccgcggggacagctcccgcagcagcgccagcgagctgcggcgcgactcgctcaccagcccggaggacgagctgggggcggaggtgggcgacgaggcgggagacaagaagagcccgtggcagcggcgggaggagcggccgctgatggtgttcaacgtcaagtagcgcccgcgcagggcctggcaccgcccctcccgcgcgggcccgcacccagggtgcgcgccccgggggcccgcgggggccctcgcgcgtagctcccagccccaggccggagaggggcccaggggccttggagctgttccgtggttggtgctgggtcgtgtcttgcaagggaccctgtgtctgcctccaagccggggaggagggggggtccagacccccacggggaggtgccggggaggagggctggggggaagcagtgcctgtgtagacgtggctgtacatagaaagctctattgtgggaaagcaggaggggtgacccagcctcagctgctagtgtgagggctgggaagggagggggcgttctttgtggacccctgggaggggagggggtgctgcttgctgactagcccatctctgggctacgatgtcacagggctggtggctgggacagctctggggactagggggtaatgtgatacagccgatgtgggcagcagcaaatataaaactggtgaggttaaggctgtgtatgtctttctgtggggtaggggaggggagtgttggcagtggacgtgaacccctgttctggggccctggggagggcaggcagggcggcaaatcagacactgttaagaaagtgtacaaactttattgaaacgcacacgcgcacacacacaaacacccctgtggatagggaaaagcacctggccacagggtccactgaaacggggaggggatggcagcttgtaatgtggcttttgccacaacccccttctgacagggaaggccttagattgaggccccacctcccatggtgatggggagctcagaatggggtccagggagaatttggttagggggaggtgctagggaggcctgagcagagggcaccctccgagtggggtcccgagggctgcagagtcttcagtactgtccctcacagcagctgtctcaaggctgggtccctcaaaggg

SEQ ID NO: 31337 - DNA, 1459 bp, Artificial sequence
  DNA replication origin
ctttccctgccttcctgggcactgaggcctccagctcaggtaggctgggtgcccagcacggatggggtctccccaggctcaggatcagccctcagccctgtaccctcttccctcaggcaatggctcctggctggagctgatgcccctgactgctgtgagcgtgcacctgctgacaggtaatgggacagaggtgccgctctcaggccccattcacctgtccctgcccgtgccctccgagactcgtgccctcaccgtgggcaccagcattccagcctggagatttgaccccaagagtggtaagtgcctcagggggctgcaggtgcttgagttgagagaagaaagtgggacttgagtgggagcgactcaagtgtgacaaaacccctgcctctcccagggctgtgggtgcgcaatggcactggtgtaatccggaaggaaggccggcagctctactggaccttcgtctccccccagctggggtactgggtggccgccatggcctcccccacggctggtaagagtagtggggcagtgggcgtagaggccgcggaggaggggagctgggagagcagacttctgaaaggcaggaagggtgtctacacctgaacgctaagccctcgcctggcacagggctggtcaccatcacgtcgggcatccaggacatcggcacctaccacaccatcttcttgctcaccatcctggcagccctggccctgctggtgcttatcctgctgtgtctgctcatctactactgccggtgagcacggggcttccctcaccctcccctgcacttgtaccgggccctggggccccaaagatgcataaaatccacttctggtcctcaaggggcagacaggaaaagacttcctgcaaacatgctaagacctgaagggctggtgctggtggttgaagacagcggggaggtgggaggggaggcagggcttaaggacttgcagcccggcccctccagagagatctgccactgcccctaccagcccagctctctctcccagaggactccaggccggacacacccatagacagcttagatgctcatccctggttctcgcagcacatcctacatgcagaggagtgcagagttgaccctgaggggatcgccaaacggacacggcggctccccgccatctctcctgagcgccccaggcattctccccacctcttccactatattcgtctcttgtcttgcatctaagggggttcggggcctactttggccctcaccctttcctgagcggccccttctgctccctcccttccaggaggcgctgcctgaagccgaggcaacagcaccgcaagctgcagctctcggggccctctgacggtaacaaacgagaccaggccacctcgatgtcccagctccacctcatctgtgggggacccctggaacccgccccgtcgggggaccccgaggctccgcctccaggccccctccactcggcct

SEQ ID NO: 31338 - DNA, 2488 bp, Artificial sequence
  DNA replication origin
cgcctcccgggctcccggcaagtcgccgccggagccccccagcccgcagggtgagtctcagccgggaggggccgcgatcgcgggcctgcgccccctgatcaggctcccgcccgtcagccccctcttcgcggcgttcgtgaattgagtggtattctgttccctggattcgggtggggggagctaagcgatctggggttggcgcttctgggggaaagtggaggcggggagagggaggccgtccggggcgggggtcttggggagacacaatgggtagtgcgagggtccccaggatctgcgccgccgccctctccctatttgtttttctccctcctggtccgcgaggcgctgctgcctgagccattgtctaccgaagacacccgcccaggggcgggctggggcgggcgcctgctccgcagccccctgcgggttgctcgctcccgaccctggcggggtgggggcgccggcatccgctgccaccctaggccgggaccggaggctgggagcctggagctgggtttgaaggggggaggggagaagggggagtgggtgaggctgtgggcgggattgactgctctaatggggttctttgccctggagcctgacagctcccagccagcccccctggtttagagtttggggtgcaccaaataaatgcttgtgagcctatgatggaggacgagccgcagttgtgggcctctaagaaaagggggtacattgtgattcccagctgagggagcatggcaggcttgtggtcgtggagccatgctgagctagctggctgtgggcagtgccggctgggagggcaggtgcctgggtccccccccattcagcaggcctcctggcattcctgtcccctgcccgcccccatatcaccccctcctcatctcacatcttcgcagtggaggagacccttcccagcgactcaccgggcgcaggtgggtgtgtgaggtgggggtggggccggctcctgcagcaggaaagggtgggggagcaagaccctgacaacacatcccacaggcaggcctggacgcttgggggcctccgcccactccagtcctgagtccacctcccgggtcctgctctccctctcctgcctgtgggccccatccctgcctgaagcagtattcactcctcaccccccacactaaggagctggcaggaaaagcagagtgggggggtctggatgagggaagtggggtccggatgaagggagggggtcggatttcctcctggactgaggcaggcctagagccgggagaggtggatactatatggaatgtcaggcttcgaggaatgggtagggttcaccctctgcctcagtctcccccagctctctcggggaggagatcaggcttttcttagtaggaagaagccctagtttcttaggacgcccctcccctcaagtccctgcacctcaggggaaggggcccagggaattggctggaatagagccaggattgggggttctctggggcagctggcggggagcccaggttgagggaaagggggaagggaatctgctaggcacctgccccctcccttctcccccacccgcaaggttggcacagatccttaccagcccaccccagttttgtttccccagccccctccctcttctgaaactctgactcttgaacccaaggcattccctcaaatgaccatatctcagactcgggatccctctccccagctgctctatccagctgttcctaagcccgggatggaggtgggagtagccaggaccttctagcttctccgaattcctaatgggtgttggcagggggatggatgaggaccttgcacacgtcctcctaggctctacctccccccaccccatgccacttaacctctctgagccataatttgttcatttgtaagacatggaaggatagtgcctacatcatcaaattgaagtaagaattaaatcacatcaaatgtgcaaaaaaacagtaaaggggtgccagcttcctggaggagcagagagcgagagtgagtggagtgtgcacccaccctgcagggttgggctctggcctgggaggggaggtgggctcaggggaacagctggatgggatgcctagggcaggcgtggcgctggctgcggattgggagcctgagctaagacacctgtcactgctgagtgtcaggctccactctaaggccttccctctccttgaagtctccacagcaccctgacctccccaggccctgctgctctcagctccagactcttccttccatacccaacccccactagatttgcatccagcactcagcccacttcccacctgtctcctgggccccccactgaggtgtccatacatgcatgacacaccttgttagcaggaaggtaggggcgaagtgtgttcttgagggaggggctgtgctgatgggaaggggtgccctggatcagagagactgcctggagaatccatgggaacaactcaaggcttggttccttcccatcacgccatctgagggcaggacgcct

SEQ ID NO: 31339 - DNA, 1159 bp, Artificial sequence
  DNA replication origin
gcactccagcctgggcaataagagccaaactccatctcaaaaataaaaattactagctaggtgtggtggtatgttcctgtagacccaggtactcaggaggctgaggcaggaggattgcttgagcccaggaggtcaagactgcagagagccttgatctcaccactacactccagcctgggtgacagactgaggccctggctaaaaacaaatgtttttaattaaaaataaaaataaataatcacggagcacctactgtgtccagaattggtgggttcttggtctcagtgacttcaagaaggaagccgcggaccctcgcggtgagtgttacagttcttaaagccggcgtgtccggagtttgttccttctgatgttcagatgcgttcggagtttcttccttctggtgggttcgtggtctcgctggctcaggagtgaagctgcagaccttcccggtgagtgttacagctcttaaggcagcgcgtctggagttgttcgttcctcccggtgggctcgtggtctcattggcttcaggagtgaagctgcagaccttcgcggtgagtgttacagctcataaaagcagtgtggacccaaagagtgagcagtagcaagatttattgcaaagagcaaaagaacaaagctcttacggtgtggaacgggaccccagcgggttaccgctgttggctcgggcagccagcttttattctcttatctggccccacccacatcctgctgagtggtagagcctagtggcctgttttgacagggcgctgattggtgtgtttacaatccctgagctagacacaaaggttctcctcgtccccatcaggttagttagatacagagtgtagacacaaaggttctccaaggccccaccagtgcagctagatacagagtgtcggttggtgcactcacaaaccctgagctagacacagggtgctgactggtgtgtttacaaaccttgagctagatacagagtgccgatttgtgtatttacaatccctgagctagacatgaaggttctccaaggccccaccagagcagctagatacagagtgttgattggtgcactcacaaaccctgagctagacacagggtgctgattggtgtgtttacaaacctcgagctagatagagtgccgattggtgtatttacaatccctgag

SEQ ID NO: 31340 - DNA, 809 bp, Artificial sequence
  DNA replication origin
gggcggggaccactttgctctgggaggggcggggtttggtgtgggagggcaggaagagagggaaggcaaggtttactttgggggattgcagtgggattaggtcagaggcagggcttccccgccgggggtgtgggacctggactcctgcaaccaataggcctcttgtgggtgtaaacggctttcaaccccaacctgtccagaggcctctggatcagtttgtgctgcagtcgcacgcatggttcaacgtgtcctccctcccctatgcggtgcccccgctcagcctgccccgaggggaagctcaggtgagtgtggggggatggagcagagaccagtcctgcaggacccattgtcccccagtcagtgcccagccagaaaagtctgaggggtggtacgggtgggtggcatggctggaggtcaccagcctgaggtttgagtctttgtgaaaggcaggtgtcaaggtgactgaggagacacgtgggtttgcccccaggtgtggacacagctgctccgggccttggaggagagggccattccaatctggtgggtgctggtgggtgtgctgggtggcctgctgctgctcaccatcctggtcctggccatgtggaaggtgaggtgtgaaggacggtggagtccccagcggggcacaggcttggctctgccctgcctcacagggagtcaaggagagatggtggcccacccaagtgggtaatccagggaccaggggtctatgtctccactattagaatgtcattctcggtccagtggggtggctcacacctgtaatcccagcactttgggaggccaaagcg

SEQ ID NO: 31341 - DNA, 754 bp, Artificial sequence
  DNA replication origin
ttgtgtctggggtgagctgaaagacacttgcactttttaaaagcttcccagtacgttaaggagcataaaacaatgccaaagcaaggttatcatagatctgagcattgtgcgctgggggatgaccctccctgcatctctgggactatgtgagcaagcccgtggaaagacagcatccgaagcttggatccaaggcccttcctgatgggaaggccaccgcttcctgaacccccggccccttctgcgttgggtcctgggggtaagggggtgggggatgatggggtgatgggccgggacgggctggggactgacgatgcttcccctcagagctgcgactcggcgccctgtactgtggtgcagtgtgacctgcaggagatggcgcgcgggcagcgggccatggtcacggtgctggccttcctgtggctgcccagcctctaccaggtggggtgggccgtggtggggcggggccgggccttctgggcggggaccactttgctctgggaggggcggggtttggtgtgggagggcaggaagagagggaaggcaaggtttactttgggggattgcagtgggattaggtcagaggcagggcttccccgccgggggtgtgggacctggactcctgcaaccaataggcctcttgtgggtgtaaacggctttcaaccccaacctgtccagaggcctctggatcagtttgtgctgcagtcgcacgcatggttcaacgtgtcctccctcccctatgcggtgcccccgctca

SEQ ID NO: 31342 - DNA, 977 bp, Artificial sequence
  DNA replication origin
aaaaataaatatatacttatgtgagtgtgagtcaatattgaaaaaaagactggaaggaaatccaccaaatgttaacagaggttcctgttaacatttggttcctaaaccttttttgtttttctggtttttgtaatagagttttggaattctgtgccattagcaagtattcctcctccaaattaaaaaaaaaataaaaaattacatctttgacagcaaagcagaagagaagagggactctcagggagggagatgagagagccaaggctccagtgcctcccaggtcccgggtactgttcccagggtgggggccatacctcgacattgcttagggcccgcatgtagtgggcgccctggggcaggtgcacggccagctctgcttcataggccccctcgccctcgttggctgcgtccatctgcagctccaggacattatctgccccaactaggagcggggagcccgtcctgtggggaaagaggagtgaagccagggagcctgggtctgggcccaggatgtgggaaaagaggggactaaggtgtggagcaggtatgataggcagaaagggccagggtcgggcagaatgggaggcctcctcacacgctggcagtgagctgaagctggggcacacatacgtcatcttccccacagtccaggacgattcgtgtctagaggggcacattggggtgtgcgggtaagttggggatgtgtgaggtttagggattacatcagggttaggaaaacagtgggcttggggttcacataggggcttagggagtaagaagatctgaggacgaaaaggagtttgtagatggtatcggggctcgggtttatttggaggtttgggacaatgtcagggtttgtcaatttacatcagagcttaggggatactgggattttcaggtgtttattttatttttggagacggagtctcgctctgtcgtccaggctggagtgcagtggcactatctcggctcactgc

SEQ ID NO: 31343 - DNA, 921 bp, Artificial sequence
  DNA replication origin
ggaatgagagccttagaacctacccacttcccgctccccgttctgcacccagggaaaaatgtgtgtgcaggaagatttccctacataggggagatttcaggaaggcgctcctccccgggctgggctacccaactcccgccctaagtggatttcttgcctgtagtgttgagatccccgtcgaactcgcccacggccaccgagtaccctgaggacaagggcgcaaattagtcttttccaggggaggaagcacagaggggacggagggcaaagaaggaggagattaaggccactcagccccagccctgcattgtgcagatggaaaaacggaggccttcgaggggccaagccctgccccaggctgcgctacgagtccgcagtggaagggagcggtgggcgcatgggaggtgggcggtctgcggggaagccgcaggagcggagggcgggagcggcttaggcggtgggttggccggcaggggtggccatggaggctcccacaggggcaggacctgaccgtctgcggtgggcggtgaccctcggggtgctggaagtctggaatggcggtgttaccccagtagccgtcgaagtactctgggttgctggagtcaaaggagaggctctgggaggacacgtgccacaaaaggatgcctgggcggtaactcgagaaaatatccgcaactggagcctgggccaggagacctagggcgggagggacagcgggtgtgaagcccaaagcggtctccttgggccgcgagaagggagggaggtgtacggatgggcacgtacctaagaaataatagccgccaggagccccaagcaccagctctccggcctggaagggaagtcctgagggtgagagggggccctgtttgggagccgcccccactgcgcttttgctccctactcgcctgagtgaccacggag

SEQ ID NO: 31344 - DNA, 988 bp, Artificial sequence
  DNA replication origin
aaatatccgcaactggagcctgggccaggagacctagggcgggagggacagcgggtgtgaagcccaaagcggtctccttgggccgcgagaagggagggaggtgtacggatgggcacgtacctaagaaataatagccgccaggagccccaagcaccagctctccggcctggaagggaagtcctgagggtgagagggggccctgtttgggagccgcccccactgcgcttttgctccctactcgcctgagtgaccacggagctgaagcccgcttcacagtaacgcttgtcccagcctgcaggagacaaggaggaggggtcagcgcaggggtgaagggaggcgcgcgcgagcccggaggagggctgggggacaggggcggggccttgagtcggcggggccctggggcgaggccagatccaaagcaagggctgcggcgctgggggcgggatccgatgggggcggggccaagccgtcgcgagtgggcggggccaggtcgtagctggcgcttactaaaatcattttccacgtaaatgcggctcagggtgttcccgcgacagggggagtactcggcgcggcggccgctctctggctgagccaaaaagcagctacctacgggcgtcttctcagcctcctcagtcttttctaggacgttccagtgctgccagggggcgcaggcctggagaaaggccacaggagtggggacgggcgcgagacttgggctcctcctggccccaggtgtccctgcccccgattgttccctgtgccctgtaccgcggggcccaccacaatgacgtcgctccagctgacgaccgacgcccccagtccttggcgggccttgaaggtttgtaaagtttgggagcctacatttcgggtctcatcacctggaaggcacaagaaggggtggggcgctgaagcccggcagtccacgtccctctgaccccaaccttgctctccttgcctgggactcacggaggtcaaagagcagcgaggg

SEQ ID NO: 31345 - DNA, 944 bp, Artificial sequence
  DNA replication origin
ctggccagaggggaggaaaatgttttaaaatttacagaagggaagagcagaggaaaaaagcagagggaggaggggattatctaaacttgacagtttggagatgttgctgcagaggggtgggtagcacttactggtgttccctagcttagaaacacagaagagggagggacaaattgagaggaggacaggaaaaagaaatccctgatagtaaactgaaagcaaacttcaaatctaaacccacccctgcaagccaaaactcaattctttggctgtcagacactgcccatcccagcttctacttgctggtattaatggctcaacacccccaagggaacatttatgggtctcctcccctggccctacctaggatcccatcccccaactcacgtgccatggctggggggatgttgcaggtcctgacctgagaagatggggtgaagtagtgggtgaaggtgaagtgcagtggcagctgctgcagcaggccgtggagcaagtagggtggggtagagggcagcatgtgggacagggtgaaaggtgaagggcccaggatggatggctgaggcgggaatgatgtggatgggatggctagcgagaaaggtggcagggtggccagggatgattgagtgagtgaggtgggacaaagaaatgggggtcagatggggctggggaatatgatgcacctgggcaagtggttggggatgggggtgagggtgaatgccgatggcggcagcagctgcggcagcatgatgttgtaggatggcatgctgaacagttgtgatggaggtggcagaggctgtagctggctgctgaatgtggatgggttgcagggctggtgtggctggggccagggcagctgaggctggaaaggcctttacttgcttggccagaagctgctgctggatgtgttgctgagcagcctgctggagcttgctgtacttctccat

SEQ ID NO: 31346 - DNA, 737 bp, Artificial sequence
  DNA replication origin
atggggctggggaatatgatgcacctgggcaagtggttggggatgggggtgagggtgaatgccgatggcggcagcagctgcggcagcatgatgttgtaggatggcatgctgaacagttgtgatggaggtggcagaggctgtagctggctgctgaatgtggatgggttgcagggctggtgtggctggggccagggcagctgaggctggaaaggcctttacttgcttggccagaagctgctgctggatgtgttgctgagcagcctgctggagcttgctgtacttctccatctcctcaggggtgaaggtgatgggctggctttccaggggggccagtgaagcatcctcagccccatctgttgactcaatactaggatccccactgggaggtgcataactggggaaatgctcaaggtctggtgctataggcagcaagctggactccacagggcctggctgactgctgctatccagggactccagggtgtccccatcactggggtcggggaggtagttatgggagatggttgggtccccagggtagcagtcagaatgtgctggggtgcctagtggagccacagggtgatcagcagtagcttctccagactttgactcttctgggggtgggtctaataaggggccagttgtttcctctgaagggaactgatgcccaaatagggcatcactactccctgggggcccctcttctgtctctgactgttcttgctcttccccccttt

SEQ ID NO: 31347 - DNA, 1225 bp, Artificial sequence
  DNA replication origin
gagttatgtgagttcttccactggaatgaaatccccataagaggagatcattcctgtctcgttcaccgttgaatcctcagggtgagctgagattcgaagctaagcagtctggctctaaggtcgcgctttcggcccaacattatgctgctatttagtgaagacgatggacttctgcgcacacggggaagcaacagtgagaaaagacacccggaagtgagcaacagcaaaacatccagatttgtccgcacggtgccccctctgacctttccctccggaagctctcgcggctctcgggcgggagtgcgcacgcgcggccaccggggtcgctccgggtcgcgcgcggagcaggggctagagggaagggtcagcctccagggctggcaggcgcctgcgccgcggggctcccgtcaggacgcgcattctcgctccctccctcggctgcgcgcgcccggtgggcgtgggaggaggcggggaaccggggaggggtgggtgtcgcaggagggaaggagcgaaccggagagcgtcgtcctgagaggagtgaaggcggcaaaatggcggaccgcttctcccgcttcaacgaagaccgagactttcaggtaaacacgggcgtcgccgaggatgcggggaaggcgctggtctagcccagaacctccttcatctccggctcccagccctctttccttccagttttgctccgacttgcgaaccagctcgctcttctcccgtctctgctttctcaagaggcctcccggcttgagggaggccgcatctcctcgcacccgcattctcttacccctgaaactcaggccgcggggcttgcggcttccgcctgtttggcatcggatttcggaaccgggcctgagcgccgtgtgaggggctgtgccctccaggtctgcccgatctgtgccggcgaagggctggctcccaggggacaagaggggtggttgggttgggctgagagggcttgggggagagtattgctgaggccaaggcttccgaaccccgggattttgctctcacggatccttttggggtccttctcttttctttcttcactgtgataaatcaattcctttcattgtctgcttttcctcttccttacctgggaaaaggttgccttcgctatcagacgccttattggttagtcatacattgagatttcgcggggcataagtgttgctgttattaggctgttaattgggcttggaaagcagtaagttactgg

SEQ ID NO: 31348 - DNA, 1213 bp, Artificial sequence
  DNA replication origin
acacctcccggacggggtggtggccgggcagagggactcctcacttcccagtaggggcggccgggcagaggcgcccctcatgtcccagacggggcggctggccgggcggggggctgacccccccacctccctcccggacggggcggctggccgggcagggggctgacccccccacctccctcccggacggggcggctggccgggcagaggggctcctcacttcccagtaggggcggccgggcagaggcgcccctcacctcccggacggggcggctggccgggcggggggctgacccccccacctccctcccggacggagcggctggccgggcagaggggctcctcacttcccagtaggggcggccgggcagaggcgcccctcacttcccggacggggcggctggctgggcggggggctgatccccccacctccctcccggacgaggtggctgctgggcagagacgctcctcacttcccagacggggtggctgctgggcggaggggctcctcacttctcagacggggcggctgccgggtggagggactcctcacttctcagacggggcggttgccaggcagagggtctcctcacttctcagaccatgggtggccgggcagagatgctcctcacttcccagatgtgatggcggccgggaagaggcgctcctcacttcctagatgggatggcggccgggcagagacgctcctcactctccagactgggcagccaggcagaggggctcctcacatcccagatgatgggcggccaggcggagacgctcctcacttcccagacggggtggcggccaggcagaggctgcaatctcggcactttgggaggccaaggcaggctgctgggaggtggaggttgtagcgagccaagatcacgccactgcactccagcctgggcaccattgagcactgagtgaacgagactccgtctgcaatcccggcacctcgggaggccgaggctggcggatcactcgcggttaggagctggagaccagcccggccaacacagcgaaaccccgtctccaccaaaaaaatacgaaaaccagtcaggcgtggcgtcgcgcgcctgcaatcgcaggcactgggcaggctgaggcaggagaatcaggcagggaggttgcagtgagccgagatggcagcagcaccgtccagcttcagctcggcatcagagggagaccgtggaaagagagggagagggag

SEQ ID NO: 31349 - DNA, 1264 bp, Artificial sequence
  DNA replication origin
cggcagccgccccgtctgagaagtgaggagcccctccgcccagcagccaccccgtctgggaagtgaggagcgtctctgcccagcagccacctcgtccgggagggaggtggggggatcagccccccgcccagccagccgccccgtccgggaagtgaggggcgcctctgcccggccgcccctactgggaagtgaggagcccctctgcccggccagccgctccgtccgggagggaggtgggggggtcagccccccgcccggccagccgccccgtccgggaggtgaggggcgcctctgcccggccgcccctactgggaagtgaggagcccctctgcccggccagccgccccgtccgggagggaggtgggggggtcagccccctgcccggccagccgccccgtccgggagggaggtgggggggtcagccccccgcccggccagccgccccgtctgggacatgaggggcgcctctgcccggccgcccctactgggaagtgaggagtccctctgcccggccaccaccccgtccgggaggtgtacccaacagctcattgagaacgggccatgatgacaatggcagttttgtggaatagaaaggggaaaggtggggaaaagactgagaaatcgggtggttgctgtgtctgtgtagaaagaggtagacatgggagacttttcattttgttctgtactaagaaaaattcttctgccttgggatcctgttgatctgtgaccttacccccaaccctgtgctctctgaaacatgtgctgtatccactcagggttgaatggattaagggcggtgcaagatgtgctttgttaaacagatgcttgaaggcagcatgctccttaagagtcatcaccactccctaatctcaagtacccagggacacaaacactgtggaaggccgcagggtcctctgcctaggaaaaccagagacctttgttcacttgtttttctgctgacgttccctccactattgtcctgtgaccctgccaaatccccctctgcgagaaacacccaagaatgatcaattaaaaaaaaaaaatccttagcaatattacagatatttgacaagagagatgaatttccaggccaaaacttaaaggaaagtgggatcccagagaggcattggaagacagagcagaagaaattacccagaatgcagaaaagggacaaaaagaagagtttgagacacatggaggatacaatgaaagaatctaatatcgtttaatcagaattctagaaggaaaaaaaaaaaaagaagcc

SEQ ID NO: 31350 - DNA, 1012 bp, Artificial sequence
  DNA replication origin
cgcagaagaagcgggagggagaagccgcagctccgggccattctcctttccctcgctccctccaagccccccgccccaaccctccagctccgggcctccgagttcctgagttttctcactttgaggtgccaccgaacacaaagaaccataatgggctcctttgtgttggctacggggcaattacgcctcggagtcctggtccctttaagagtctcttaaagagacaggatcccatttttcagagggttttttaagggtgtgtggagggggagggcgagggatctacgtgtaaagtgaagtgaaactttcgcctgggctccagaaagagcggacagaaaaggtctttgtaaattgttagtttttttaaagtctgttttaatttttaaatttgagatttttcactcgatttgaaaaattggactaggaataggtggggttcgaggatcgggggcgggggcaagggtttaaagagtccccacccggcagagcacctcggcccgggaagaggagtgagccagggtcgagtagtgtcccccgatctcgccgcggcaactccggagaaatcccgggctgggcaaacagcccttaatataataatagcttgtctctttaaaaagcaaaagggggggaaagttttgttggcatctggtttctgatctcattatgttgtggtcgaccaatccagccctcgggcctggtcctcgggtttaaatctgattggccgagagcacattttgggttggtgcttagagctcgacggggcggtttcaaggatcccttttttggggggctgaggagagggcggggccgccagcgggggcccccttgaaaccgactaattgggatcggagaggccgaggtgagggctggaggaggcacaaagaagtcgctgggtgcagaagggaggggagagggggagctgagaggcgagaggaggaggaagaggagagagggcagcagcgcgcggtgtctccggctgctcagtccgaccgcggcaagcaagcgggcaggc

SEQ ID NO: 31351 - DNA, 832 bp, Artificial sequence
  DNA replication origin
tggccgagagcacattttgggttggtgcttagagctcgacggggcggtttcaaggatcccttttttggggggctgaggagagggcggggccgccagcgggggcccccttgaaaccgactaattgggatcggagaggccgaggtgagggctggaggaggcacaaagaagtcgctgggtgcagaagggaggggagagggggagctgagaggcgagaggaggaggaagaggagagagggcagcagcgcgcggtgtctccggctgctcagtccgaccgcggcaagcaagcgggcaggcgcaccgccccctcccccgcccggcctccccaactctgcggccgcgagtaaagtttgcaaagaggcgcgggaggcggcagccgcagcgaggaggcggcggggaagaagcgcagtctccgggttgggggcgggggcggggggggcgccaaggagccgggtggggggcggcggccagcatgcggccccgcagcgccctgccccgcctgctgctgccgctgctgctgctgcccgccgccgggccggcccagttccacggggagaagggcatctccatcccggaccacggcttctgccagcccatctccatcccgctgtgcacggacatcgcctacaaccagaccatcatgcccaaccttctgggccacacgaaccaggaggacgcaggcctagaggtgcaccagttctatccgctggtgaaggtgcagtgctcgcccgaactgcgcttcttcctgtgctccatgtacgcacccgtgtgcaccgtgctggaacaggccatcccgccgtgccgctctatctgtgagcgcgcgcgccagggctgc

SEQ ID NO: 31352 - DNA, 897 bp, Artificial sequence
  DNA replication origin
gcccccgcccctccctccccgctcggacttcccttacccgcacactggctccaggcagcgcccgggcggcggaggcggctgcggagacggcggggtgcgggctgagggagccgggcctggacgccccccccatcacccccgtaccccaggagctgtgcctagtccaggagaggctggggggcgccccatggaggtgagacgcggagacacctgcccgcgccctcacccctcaggcctgagggaggaaggacttgaggtaatggatgaggaagggcagggtccagggggcggccagacttgcaagaggcgacgaggaggagaggctgaggagggggcgcgtccctagacggggcggcagaggcgggtcgtcggtggggaggccgaacggggcgggcgggcggggggcgcggcgcgggctgactggacgggccggacggagcgcgggtcgccgcgattcccgggaggcagccgtcgcgctgaggcggtggccggggaggggcgcccctcggggtcagcactcagggggcccgaggggagagtgagaatcccgaggctggaagcgcgggcccccacattcgtgtcctctgagagggttcggaattgagccgaacagccgaggtagaacaggtgtcgggccgtttcagctccggcgtcaccctcgtgaccactttctgatatttcctattcccgtgtgctgcagcccaaagtcgcgttccccggaggtgcgaatcgctgttggaacctcggcgccgacgccggcagcaggttaaccgacgtcttcggcagcgtgatgttgactggctccgcttccttctacgattgctacacatcgcaggtcctttagtaaactctgcctctgttagacgatttattctcaaatggatttactcgagccac

SEQ ID NO: 31353 - DNA, 1084 bp, Artificial sequence
  DNA replication origin
aggggtaggagagggcagcccccagcccagattctctcccaaagacctggccagtgggaggggtggctctgtcagctccatggagctgagcgtgacagctgcttgctggacttcaaaggccaggcccgggcctccttctagctcttttggggaagtcctggggttctgcccctcctgcgtcctggtcagccctggccgggtgtgcagcacccagcagaggagtaagttgtatctgtggcccttcaatctggagctgcctggccctgtgaagagccaagcaccttggggactcgtaggagcagctctctgccagcatggggctggggctggggctggggttgggaccagggctgggagacagggagacagggcacctggagaggctggggggcccagaggcatcgggaacagctggctcccgcactggctggcaggggctgcaggagggaggtagacctgctctctacaggtgctcccgagggctgcacactggtagctgagtacaggggagctgatggccagcctggagctgtggggcagctgaggagctggccagcctcctgggatacagggccagtggctgtacactcagaatcctcaggccctgggggccaccctttccccagccaggagggctgtgtggcccagaactctgctggtctgtctgtgggctgccaggggaaggggtctgggagagagaggcaggtctgtgagtggcacaagggctggagggaggcgaggagcctggactcatggcctgtaaggggaagagagggaagacgcttgccactagttgtcctggtgccgcaggggttgggggctattgggacaaaaaatgaagcctgtggccaggaggcccccactctcttcttagcactgccactggggaactgaaccttccgcttgtggccaaaaagtgccaggtctgggccagaggagagttccataaaaccagagctaggcaggaggcattggcaagcagggctcctggacactggtatccctggggggtccacaaacacatcaactgacacccccaggtcctggcagcttgctataggtccaggtacctcaccagtccctg

SEQ ID NO: 31354 - DNA, 1808 bp, Artificial sequence
  DNA replication origin
gaggcgccagctgcggagccggggcgggggcgcggggccgggcgggggtcgcggagaggtgggggcggcagggacggcgccggggctcagcgcgctccggccgcggccatcccggcggggcggcggggccgggttaagagctgagcagcgagcacgtgagcccagggcccgccctccgctctcccgccgccccccggcccccccagccccgcagggcccgggccgccgccgcggcaggacaaaagaggcgccgccccggggtccctcctcgcacctcgaagtctcctcggcaggtgcggggcggtggcgctccgcgtacttatcccgcggcctctcctcggccacctctgcctgagcatctccgaggactcgtagatttgtaggggagggaagcaggggacggggtacccccggggtcgacccggcgactgcctgtctggggcccgggggcaggggcgtggctgcggcgcccacgttcgcccctctgtcgtggtaccccagagaggctgccccagccccagcttggagcgccccgcttgaccccaggctgtggaagctggggttggggtgggcaaaggctcttggcgaacgccgggctctacgcctctgggatttcttgcaccttcgctacgggtcgtgtcactgcggagtcctctcacgcccgcggtacagaccccttcccatcggctccttctccccgccaaagatgccccggcctccaggagggcttcagggatcgctgtcactccaaccatcaggaagggctggcatgtccgtctgggttcctgagtctctcacaggcgtcctgtccttcctcctagataaaatataaactagccaggtcacttatatgctgctagcatgccccatggctccccctcccttgctagtcccaatccttaggagcagaagacacctctggagccccccagcattccctctctggtcagactaggctgccctgtctgcaaaatacttgacctcccaacctacattcccagctgtgccctccacccagctcctggggatgttgggtcccaataccagggctgggacctcagacttctgctaggggtgctgaaggccagatacctgagatggtgtggggtgtggtagggcatggtgggtgggccgctgagtccccaccctgacctttttggtacccatgctaggggaccacaggttgctgaagaacaagattggaggcaggaaaccccttcctgggtcctctgcttccgcaaggacccagggcctctgctggggatgagggaactgcctctagcttgtgacacccccaccccccgctctattttaggcccaggagaggtgagaaggcgatttcccaggaggcgctgacatcaatgtagggaaccaagtgactccccccacccccaaccacctgccatgccaggcccagatgctcagtaaggctgagccaattcttccttcgctctggagacatcttgagaacctcctccaagatgtaggcatgaggaggctcctgggaatgagggcctactaggtggtattcctggaaactcatcatgagcccagagggagagattgtgctccccattttacagatggggaaactgaggctctgagaggttatgtgagcttctcaaagtcacacagctggtgaaaggcacatcccatactccatggccccactcctcttagccacccctagtcctacttccatctctgccctccatttgggaccagaggggactggtatatctggtcccatgcaccctcaccacacaccccagacacgaaggtggctgtcctgctccagcctgcccatg

SEQ ID NO: 31355 - DNA, 802 bp, Artificial sequence
  DNA replication origin
cccaagtcttctgccccagggtgggcagctgcctgcagccatggccttgtttccccaggtcttgggacccaaggtcctgctggagctctgcgatgggggggcttaccccagctgggaggcccaggagcccctgaggtcacggaacccagccgtctggttagggagagctccgggggagaggtccgaaagcagcagctggacacaagggtccgccaggagccaccagggggcccggtgagtggggctgggtggtgaggccaggggctgaagcaggcctcagagccccaggaagcccacggggtaaccagggttggagtccccctcagcagctgccccgcagggtccccttctgtacagtgggctatccggtgggtgctggagcccactggtggggagcaccaggcctgcccagccccagggcccccttccattattgtagggtcccctgccctcagtgtacagggaccactaatgcctaggtctcaggtctgctttgggtcagccttccaatggccccctgctctgctctggccaaagctagttgttctgttcaaaacagggcttggatggggcaagttgggggcagggagaggcagcccagattccagtcagggattagggctctcaggttctcaccacagccaccttagtgggctttcttggaacaacttagtgcttgctcctgcctcagtttccacacagtgcccagataggcttgttgttcttcctgtcctggctgaaggtggggccttggaaaataacttgaggccccaagccagctctacctgcctgcccactgtcc

SEQ ID NO: 31356 - DNA, 823 bp, Artificial sequence
  DNA replication origin
ggtcagccttccaatggccccctgctctgctctggccaaagctagttgttctgttcaaaacagggcttggatggggcaagttgggggcagggagaggcagcccagattccagtcagggattagggctctcaggttctcaccacagccaccttagtgggctttcttggaacaacttagtgcttgctcctgcctcagtttccacacagtgcccagataggcttgttgttcttcctgtcctggctgaaggtggggccttggaaaataacttgaggccccaagccagctctacctgcctgcccactgtccctttcagctgccaggcccctcctgcctcccagaggaaggttaggcatgaaggagattaattgcaattaataattaattaatatcatgtgaataataatcacccagatggaatattcattcagcacaccccagcgctccaagagctggagctgaaagtgagccaggccaacagggcagcagagggcaggttggctggcaaaggcccggcacaaacaggaggtataggggggagacccagaagaggggtacaactgaggcctgggaagttttggcagcggggagtggtgggaggtaaattgggctgggcagagggaggaaggagggaaacggaggctaacattacggacatctgtcagactggcatctggccctgcctaatgtacttggttaaaagcccttaagggaggggagcagagggggatgcggggtggtgcaggggtggagaatactgatgaaatggatggagcaggaagggagcatgcataatagatggaccatcactcagggccgtgcagag

SEQ ID NO: 31357 - DNA, 1472 bp, Artificial sequence
  DNA replication origin
ggaatattcattcagcacaccccagcgctccaagagctggagctgaaagtgagccaggccaacagggcagcagagggcaggttggctggcaaaggcccggcacaaacaggaggtataggggggagacccagaagaggggtacaactgaggcctgggaagttttggcagcggggagtggtgggaggtaaattgggctgggcagagggaggaaggagggaaacggaggctaacattacggacatctgtcagactggcatctggccctgcctaatgtacttggttaaaagcccttaagggaggggagcagagggggatgcggggtggtgcaggggtggagaatactgatgaaatggatggagcaggaagggagcatgcataatagatggaccatcactcagggccgtgcagaggggcagggggagggggctaatggtccaaggcccgcagtcactgggggtggggtggggggtggaagctgccttcagcaactgcccaggctccctgggaggtgtgcagtcctagggccggggatggggtgtcctggccgctgagtctggctgtcttgcctggtgtcactccctacctgtgaactgtgcaccccgtggttacactgtgggggaactgatggtctgcccgactgctgggactctggcttatgctttaagggatgtgcagattgagtcatggagggatgtcaccgcagggaaaggggacagagttgaggaaaagcctggagtcaggtagggatgaaaagtcaggtattccaactgggcaggttgctccttcagcctgaccctttccgaacagagacagaggtggcaaagggtaggaggttctgggctgtggtggtgtctgcagctgcgtgggaaggtcaggatgggtgcagttgaactgcttgggttgggggtctctgtgttgttctgcaggtgagtgagtgcatgtgaggtgtgtatgtgatccaccgattccagatacttctgaggggtgtctgagagcctgcggggagggaatggagttccatggatctgccgggcagtgattatctccaattttggggtctctctgagactgagacttcctagggccctcatggcgacctcctcaagggacttgtttggggccctctcttatctgtgcctcagtttcccctgaggtaccaaagctgtggacttctatgggccactctgccaagctttgtatgcactctacatcacttatttctcacaactctgtaaggcttgtaacttttgtgtgtttatgtgtgtgtgtgatggagttttgctcttgttgcccaggctggagtgcaatggcgtgatctctgctcaccctaacctccacctcccgggttcaagcaattctactgcctcagcctcccgagtagctgggattacagacgtgcgccaccatgcctggctaattttttgtatttttagtagagatggggtttctccatgttgctcaggctggtctcg

SEQ ID NO: 31358 - DNA, 877 bp, Artificial sequence
  DNA replication origin
ggcccccagccacatccatctgagccttccttcgccccagccatagatgagggtgccctcctgctctgggccacggcctgaggtctctctgcagcccgaggtctctgcagcccgaggtctgtgcgggcccccgtacctgccttttccttctcagcctcggccggtttggaggagccgactgggcaggcacagcaaacaggcagcctgtggggaggggcaggtgaggggggcacagccggcccctccccacccccccttccctcccttacctggttccctgcatccgaggggatctgggaggagaggggtccggtaaatgaggtggggaaggggtccctgcaatgaggggaaattagttcttggggtgccaactgggcctgctccaggcccacttggcgggggccagatccagccctcgcctccaccccaccctggggtgacccagaactggccacagctcccatgtcggatctgatctcccagatgctcagattccggggtcaagacctgggggcaccctgagagacaggggcaaaggacattggagcccaatgggaggtcacttatgggacagatgggacattggagctgggggcacagggggagctggggcacaggagggagggaaccagagctggggtcactgaagagggcagtgaggctggggttactgagggaggagccggaggaggaagaggtggcagcaacagctgttgggacaagcttggcagggccaccagagaggatggcaaggggttgtgtggggcttacctgaggggctccccaaggtccagccacctcttggggctccacgatgtaagtcaagttcccatcagagaagaccccactgtggagagagaggcgcagctcccctccg

SEQ ID NO: 31359 - DNA, 1239 bp, Artificial sequence
  DNA replication origin
ccccccctccttgggttcttttttttctttctttttcttttttcttttgagacagagtttcactcttgtggtccaggttggagtgcagtggcaccatctcagctcactgcaatctccacctcctgggttcaaacgattctcctgcctcagcctcccgagtagctgggactacaggtgcacaccaccacgcctggctaatttttgtattttgagatggggtttcaccatgttggccaggctggtcttaaactcgtaacctgaaatgatctacccgccttggcctcccaaagtgctgagattacaggcatgagccaccacgcctggcccctccttgggttcttttgcccataaggcaaaggagaggctcccagtagaccatctctagttgcaaggcccttttattagatttttttccctactagggcactgggtccctgaggaagggatgctgggacagtttgaaaggggaaagacagaactaaggggaggtgagaggcagaagaggaccaccagggctaagacaagggcatcaacctcagattcaggggatgatgcccagctgttgcatgtggctgggggtaggtggcaggtgcaaggtgagcccagtccccagactctgagaggagcagccagcacagggcaggtgttaagtaatcccaagcactgtagcaactagcagaggctggcaggaggtgcagggtgggggactcacgagaagaggtgggtggcatcactgggctcaggcagaccctcccgtcggtagaccatgagccgggccagggtctccaggaggtcatcctgcacctggatcttgtccccatctgcccatgtttccatggcaaccaggacgatgcgagtgttgagctgctccttgtatatctggggagaagatgagggggctggagggtgggagtgggtgttggggccagggctggaggagggcctgtctgttctctccaggaagtgggagccaggggctgacagtgccccctaatgtgtgtggtggggtggggggcatgaggaggagggaagggagggagggagagctgcttaccacatcggccaggttcaccacggacttggcaaagttgctggtgaggaccaccgactgtcgcatctgctcgaactgggagagagaagaatgggaggagggccaggctcctcaggggcctcccagtgtcacgccctgtccctgccctggcactcaccagctggtggtcgttgatcacaattagctcc

SEQ ID NO: 31360 - DNA, 970 bp, Artificial sequence
  DNA replication origin
cgccctatccaggttctacctgccccgcaagttctcgcgctgtagcatcgacgagtacaaccagtttctgcaggagggtggtggcagctgcctcttcaacaagcccctcaaggtaccagccccgcggcggggagcatgggagcgggccctgggcggggtccgggccagactcccgacctgtcctcccggtccagctcctggaccccccagagtgcgggaacggcttcgtggaggcaggggaggagtgcgactgcggctcggtgcaggtgagcggtggtgcgggcgccaggtggggaaccgggatgcgggggtgggcacgagggagcgtctgagtgggaggattagggctcgcccgcctccttcccctcctcccgcgtccctcaggagtgcagccgcgcaggtggcaactgctgcaagaaatgcaccctgactcacgacgccatgtgcagcgacgggctctgctgtcgccgctgcaaggtaagcaggaccggccgggaggcggggccaggacgcaggaggagcgattggaggccttcatataaggggtgggagctagggagggaagcggagccttcggggacgaaggcctctggggcagggcttgatgcgaagacagcgccaatggggagcaaggggcggggctgaaggatgttgaaggcggggctacgaggagcgggaagggaaggctgcccagaatcaaggaggggcgggaaggtgggcgggcttgggggcggtgctgagtgcgctgggagcgaggtggggagcgttcaagaggtggtgggagcagggaaataagaacaggcctgaaacggggccctggggagctggagggcccggggatgtgggggtccagagagcgaggggcctggggagggcagggccgaggcatccatcctgcctgactcgaggagcgcgtctcttccctagtacgaaccacggggtgtgtcctgccgagaggccgtgaacgagt

SEQ ID NO: 31361 - DNA, 1126 bp, Artificial sequence
  DNA replication origin
agtcccaatgggcgggcacgtggcaaatgaggtggcagggtgcagggtgagggcagattagagttcagtagttgagtctgaggtcaaacttggggctcactgtctctatatgccccaacagggacgtgctgtgtggcttcctcctctgtgtcaacatctctggagctcctcggctaggggacctggtgggagacatcagtagtgtcaccttctaccaccagggcaaggagctggactgcaggtgctggccaggaccaagactagggaggggaggttgcagctgtgctgggggttaggagacagggggctgaggctggctgtgtcacttccccaggggaggccacgtgcagctggcggacggctctgacctgagctatgtggaggatggcacagcctgcgggcctaacatgttgtgcctggaccatcgctgcctgccagcttctgccttcaacttcagcacctgccccggcagtggggagcgccggatttgctcccaccacggggtgactgcctggagcctgggatggcgggagaagcttacaagaggggacaggcccctgctcacctctcctggccctgccctgcctctaggtctgcagcaatgaagggaagtgcatctgtcagccagactggacaggcaaagactgcagtatccataaccccctgcccacgtccccacccacgggggagacggagagatataaaggtgaggctggagctggccgaggggggtctgtctgtcctgctctctatgcctgtccttgccagctaagccctgccatcctccccaggtcccagcggcaccaacatcatcattggctccattgctggggctgtcctggttgcagccatcgtcctgggcggcacgggctggggatttaagtaagagacacacacaccctgtgccccctggcatccttgaggggggatcagaatccctactggtggagctgagggggccctccctgaaagcccaactgaaccagagctcacacgtcataggtccaagtagcctgcagggcttaacatttagaaactaggagattttaggctagatgaggtggctcacgcctgtaatcccagcactttgggaggccaaggcaggcggatcacctgaggtcaggaa

SEQ ID NO: 31362 - DNA, 1076 bp, Artificial sequence
  DNA replication origin
caggtgtggtggcacacgcctgtagtctcaattactcgggggacatgaggcgggagaatcacttgagcctgggggggtgaaggctgcagtgagacgagattgtgccaaagcactacagcctaggtgacagagtgagactccatctcaaaaataaataaaaataaatgaaatgggaggaaatcataaatgcgggggaaggtccaagggtgacagctttcaaggaacaggaacagaaagaaattcccaaggcaggagcctagcggggaagatgggctgaaacgggctggagaggcgagcagggaaggggcaggtgagccagagctctggccacagccacgctgggaggagggtctgtggtgctcagcctgtaagactggagcaggtggtggcatgagcaggaggccggtttggagttggcagcccgcattgtttgccccaaggaccggacagcagtgggaactgtggcagtgggagcggcggcagtgggagcggcagtgccagggtgcagtggggctgcggaggcgctggggctgggggtggttggggtggtggtttgtgtttaagggtgaaaagggctgggttatgggaaggagcaggaaacatgggggagaggattggtaaatggcagaaccatggcctgaagtggtacgaggggcaggggctcgaagcaaagtgggagggattagcccttggggaagagcctgaaggtgctgggaagaagcaagctgggagcttgggagctggcctttctcctaggagcatgagggaagaggccatcagggagaaaaggggtgggacagggtgagttctgaagagagcagaggaggagaaattaaatggcaggaagaggggagggaaccccgggcactgtgggtgtgaaggccacacagtgccccactgaggctggagatgctggttttgcagagacacctgtctgagccatcctggaacccccataccccttagagcagccctacgcctctaccccactcctgcacttatatcctccacccagaaatgatgggagaagtgacaggtgccccacaataaaatggagttttctgcagcaaagtccc

SEQ ID NO: 31363 - DNA, 920 bp, Artificial sequence
  DNA replication origin
ggtgaggggcggccgcagggccggctgaggagaagcgggccaggggcggggtcccagggggaggcgggagaactcttggggagcccggggaggggccgaggagaacctccggaggtccggggaggagcgcggccagagcgggagaaggaggggggcgccgccgaggggttcccgccgagtccggaggggcgtcgccggcccgcgtcctgccactgtccccggcgcaccctccctctttgtccccaggcgcgcggctcccaaatcgggagggaaacggctcgggggtgtcctgggccgcggaggtgtcgggcgacggtcggggagcccggacagaagcggcgcgcactcggcggcgccccggcggtgccgacaactacccgggcggttaggggcgcagggcggagccgggccgcccctcgccgcccgggctcttcgcgggctgctctttgtctccccgacctcgatccctgcgtctccggcggcgtgcgggctcgtctgaggcttcccgcatctccccgctggaactcctgcctcccgggggttagaggagggttcgttcgagggctggaagcgggaaagcggggcggaaggactgggctcatcgcctcctgattaactcgttgtctttacttaaaatgacttttcccccactttgtcaaacttgagaactgttttgtgtgtgtgtgtgtttccttaagtctctagcttcaaaattaagagtaggcgctaccgctgtgattgtgggcagttgtgtggttggcggctgcgtttggagctctgagttgaaaagatgtacgtgaatgtatggtttagattttgttcttttttttgcgattgtctgattgggagtacttttcctttgcgaaatgggcgaatttggttttctttttgttcattgagaactggcagtgataccgatt

SEQ ID NO: 31364 - DNA, 1184 bp, Artificial sequence
  DNA replication origin
cttctcctcagccggccctgcggccgcccctcacccggcggcgggttcccccggagccgcctcctccgccgggcctcggcccgtcccgccggtcgcggcctcatgtgccccgcgtcgccatcgccttcaccctcgcctctcctccacctcctccgccgctgccgccttcgcctcagtctccagccgaggcagaagccgctcccgccgctgccgccgccgccgccgcctcccgctcccgccgccgcgacccgcgggaaggcgcctgcgcactgcgcgctgcggtgggggcgggggcgtcccgccgcggcccgggagcggggggcgcgcggcacgtggcgctcgagtgggaggggggcgccccagaacgcgcgggaagcgacgcgagcgccaactttccgcggtcgagtcctcgccgctctctcggatagtccgggacgcggcggaggcgcggcgcgcgtgggagtcacccgcgtggagtctggaccccgggtgggcgcagacttcgctccggacagttcattcttccaagctgattttcgggcgagagtcccccgccagccgcgcctcagtttgagcgggccgctaacggcgccgtgggttctcgccttacctgggtatcctgggttggtttagcgggcccagagttgtcttctgcgcgctccgccgaggccttggtccattgtagcacgggatgctaatgtctcctcccaggttctgctctacaattcctcgaggatctggcgggccctgcgtggatctagctagagtcggggctcttagcagtgctctagatacttttcaggtcctgaacttctcggattagcaagaccctaataggctatttcctcttaactctttgcatcccagcaggatcccattcagaggacttgggaaaaattttcatgcataggaatccccagttttaaaatgcccagtaggaaaccgaaaattctccaaatgctttaagtagagtaagactttgggtaataaaggaaggctcagtaaagagatgggcgacctctggaatgatctcatctgagcatcagaatgccgatggacaggcttttattattttgcccttttgaccagaggggaaattaagcgctaacaagtgaggttacttgctgcaagtcaaactcccccacccaaagccaagccctaaggggtagccccagagtggaaat

SEQ ID NO: 31365 - DNA, 1278 bp, Artificial sequence
  DNA replication origin
agtcccagccagggccaacgtcctggggttaactggggtgctgctcacctccctgatttcccagagcccgtgcctgcccatgggcccacacagccccccatatgtgtcccccacctagtttgcagacctgacagacgctgctgcccgcaacgcggagctgctccgccaggccaagcacgaagccaacgactaccggcgccagttgcagtccttgacctgcgacctggagtctctgcgcggcacggtgagcgcggccagggcaggacggggacgggcggagcagggacggccaccccaggagatgccaggggagaagggccagggacgaggacctgggtcgagggcggggcctgaacgttacccccgggctagaggcggggcctggggccgggggccgggcctcgaaacctccccaagtcgggtcggggctccgcgggaccggccggctccatcccacagaacgagtccctggagaggcagatgcgcgagcaggaggagcggcacgtgcgggaggcggccagttatcaggaggcgctggcgcggctggaggaagaggggcagagcctcaaggacgagatggcccgccacttgcaggagtaccaggacctgctcaatgtcaagctggccctggacatcgagatcgccacctacaggaagctgctagagggcgaggagaaccggtgagccctcatcacagcccctggggaagtctccctgctgcctcacggtagagctcatcttgctcccttcagggactgagtctttttcagccttgtgtgcagatcccttcccacctcaatgcccagcacagtgcctgcctcacacatagcaggcagtcactagatgtttgatgactgaatggatggatggattcaaccaatattgattaggcctcaaggccaaggacttgggtcaccctccaaactaagaggcatactccccatcttcccagccaagattggactcctcacctcacccatctcttctgcctccttggaactttcttcaccactttcccctcccttttccatcttccttcagatagacatgcgcccctcccagataacactcaagccccttgcagacgtttggaactccagatagcacgttggctgctggggaaaaagctaggagatggagttagactttcctggcaaggaaaagggcgttcaagttgtcatgatggccccgcaccaagacccagcctaggggtgtcccaggcagcccgggcagccctctccctctgctttctttcaggatcaccattcccgtgcagac

SEQ ID NO: 31366 - DNA, 1667 bp, Artificial sequence
  DNA replication origin
gacattgagcaggtcctggtactcctgcaagtggcgggccatctcgtccttgaggctctgcccctcttcctccagccgcgccagcgcctcctgataactggccgcctcccgcacgtgccgctcctcctgctcgcgcatctgcctctccagggactcgttctgtgggatggagccggccggtcccgcggagccccgacccgacttggggaggtttcgaggcccggcccccggccccaggccccgcctctagcccgggggtaacgttcaggccccgccctcgacccaggtcctcgtccctggcccttctcccctggcatctcctggggtggccgtccctgctccgcccgtccccgtcctgccctggccgcgctcaccgtgccgcgcagagactccaggtcgcaggtcaaggactgcaactggcgccggtagtcgttggcttcgtgcttggcctggcggagcagctccgcgttgcgggcagcagcgtctgtcaggtctgcaaactaggtgggggacacatatggggggctgtgtgggcccatgggcaggcacgggctctgggaaatcagggaggtgagcagcaccccagttaaccccaggacgttggccctggctgggacttttcccaacaactgtgacccatggatgcgggcagggtagcgggctgccagacctcagcacctagcacaacacctggtcagcaagcgaatgaatgaacagtgccacagaatccagaaccttccacactgacagctgcatctgcgggactgaacgctgtcgtcttaggcgagcggaggcctgggtgttttgtgtgtttttgtttttttgttttttttgttttattttgagacagagtcttgctcttgtcgcccaggttggaagtcagtggcacaatcccgggtcactgcaacctctgcctcccaggttcaagcaattctcctgccccagccacctgagtagctgggattacaggcatgcgccactacacccggctgattttgtatttttagtagagacggggtttcaccatgttgaccaggctagtcttgaactgctgacctcaggtgatccgcatgcctcggcctcccaaagtgctgggattacaggtgtgagccacctcgcctggcctcaccctgggttctaatagccctttctcccctgcctgcagggaggtcctcccagccccatcgggccctcaccctgctcagacaccagtggcttctgccactcacactcctcagctaggtgccctggctaggctagcatcttggggccctgcctctctgtgcttttctgcctccaggctctgtcctccactaggaatggccctcccttcttctcttcctgtccacagcgtgcctgtcctgcctagcccaaatgccccctctacagtgtctttcctggctcccacactacatataagctctgagctgtggtgttctctacgggcactatgtttgggtgcacgtcaatatcacaccttccaggtcagacacctctctgtgtcctggggggtgcctggcatatggtagaggctcagtaacccaaaacagactggcagaggcatggaatgcaggctcccaagtgagatgtgctagagttggaaatccaactctaccacttaggagctgtgtgactttgagcaaattagttaacctctctggacttcg

SEQ ID NO: 31367 - DNA, 1148 bp, Artificial sequence
  DNA replication origin
aatctggaggagggcacggtccaccgtcgcctcccgcagccctccccagggcacagactgaaacccctgcggggtgaaaatgtttttattataactttggtcagacggggcacagccgggcgggggctctgagggtgctgggaagctatccagcccccaactcccccctcccccgggcgcgccaccccggagggagcggagggcagctcatctcagagcgcaggaagcaaacccgccgccgcgacctctccccaggctggggtgggctggcaggcggaggtgggcagtaaacagtcctattgtacaaatatatagcgcgggctgggcgggggcggtcaaccccggttccctggcacggggacagggcgcgctgggcccggctctgcagcgagccggtgggagggcctagctgtggcccaggcggtgttgagcacgggccgggggcgtcatagccggggagggccgggcagcgagcgggtgggcgaggggcgagtcatcgtctgccccgcccggaggggaccccggcgggtgagggacgtgggtggagggagacgtggggagctcagtcggagtagatgatgaagccagagaacgtgctgtatttgttgctgttgccgccgtgtgctttgcctccatccagcttgatgaagacctcgtcgccggcgtccaggtgcaggatcacgctgttgctggcgtagtcgtagttctggtccgcgtcctgggcaatagcactggcccgcacctgcgggtgggggacacgggagggagggcgagaggagagagaggatgagaagggagggaggtgaggcagtcccgtgggggaggatcagcagacccagaaacctggcctccagcctcgcctcatccctgccacgctccccctcccccgcccccttccaatcatacaggacttgtttcaggaaaggggcagagaggatccctggatttctagggcaggtctgatctgggcctgaattgggagtcaaggcagagtcttcctccttaactcttatagggctttccctccagctggctgagaacctcaatacctccaggaagcctggaagcctgtccttgcaaagaggaattctctggacctccagggaatggagggccttccctactctcatcattccttcctctctgct

SEQ ID NO: 31368 - DNA, 2820 bp, Artificial sequence
  DNA replication origin
ttttttttgagacagagtctcactctgttgcccaggctagagtacagtggcgagatctcacctcattgcaacctctgcctcctgggttcaagttattctcttgcctcagcctcctgactaactgggattacaggtatgcaccatcacgcccagctaatgtttgtatttttttttttttttgagacggagtctcgctctgtcacccaggctgtagtgcagtggcgcgatctcagctcactgcaagctccgcctcccgggttcacgccattctcccgccttagcctcccaagtagctgggactacaggtgcctgccaccacgcccagctaattttttgtatttttagtagagatggggtttcaccgtgttagccaggatggtcttgatctcctgacctcatgatccacttgcctcggcctcccaaagtgctgggattacaggcgtgagccaccgtgcctggcctaatgtttgtatttttaatagagatggtgtttcgctgtgttggccaggatgatctcaaacccctgacctcagttgatccatctgcctcagcctcccaaagtgctgggattacagacgtgagccaccaggcccagcctctcctgtttttcttttgagggggctggtctgaataactattaaagtgctgggcctttgaaacccctagttaaagccacctccttttttcctactagcctgtggtcccatctccagtgagcaccccttcatcagactctgtcaacaccctgcccctgctggagggaaaaggagcttttgagatggttttacctcccagtgactgaagcaagttccccattctaagcacatagcatctccggggcctcttgttgcctcatctctggggacctgctgggacttcctgaggtggtgcagggtctagggccaacctgtggcccaatgactgcctccctatccaggcaagctgccaatcccctgaaacctcagctctgtgtcagcccaaacttctttgggaaaggaagacattccattgatgaaggtgacattgctgcatcccttattggtgattaatagggggaatcatggggctgtctgcagaatgagcctttgctggatactggggcctcccatttggtcaggaaccaaggacaaagaggagagacacggggatgtctgatagacacacgtgggaaagagagacatacaaggaatagagaagagtggggttagatccggggaggagaggccagaaacccagggagagatggaaaaggcagacacaggagagagatggacaagaaacagcaaaatagaagaaagaggcaggggagaggcagaaaccagagaaaaggtgttggcggggcagcagccaggcagaggaaagagaagaagggctgacttataagcacctggcaggctatctgctcactttccctgcctgcccctgtctctgcccctaagacttgcagacccgcaggctggcagagcctcagggcagtgctgctgtgggaagggttccaacaaggtcttgtatcttaatcgtgagagattccttctcaacttccactagctcagctttagttctgaccagtggtccccttcttcgaagagaatgctcagcctgaccacacccccaggtcacaggccaccacgagtgagagcactgggaagggaggtggtatcaagagagctggctaaaattgtcaccccagggcggggctgggtggaggctggtcctggggtcggccattccaaggagagctacacgcacatgcgagtcccggtaccagagtccccgacacactcagtgctttccagctgcagcgtctgagatggggacggagaatggagaggaccccacacactccagagtcaggaggggctggagctgggagaccaagaggagggggagtttccatctcttccaccaccccccaccccccaccccctccccgcctcaggaggaaaaactcccccgccccccagactgccttctttttggggaagctctgctacagtgggaaacagctccccaactcccggattttgcaaagggtgtcagattcgcccaatggtcccttctccagggcaggggaggcactgcagccagggctgtaagcaccgggctccctttgcctttgtgccccaaacatttcctgcagccagccttctccgctcgcgcccatggccacgcgcctaggcgcccgcgggcgcggatgctgcttctccctgttccatacgccagagcccatccttgccctccccttatcgcccactgctgtcggcccgaatccacttcccaaggggcaagcccccaagggcaagtccgtgcacctgggagccctgcgctctgactagttgggttcatttcccgcatttccagtagcgttccagacggtgcccagcagcgtctgtcttggagcgggaacccaggaactgaggatcggcgatgtccgctggctccgaccatccccacacgtgatgaccaagcggggccgctgtggggtgggatctccacctgcgtccgcctggcgcccccgccaactccgatcaggtacccatttgccccgggctccctgggtgccctgggcccagcccagccccatgcccccgcctggcccacctggccattcttgcagaggtctgcccacatactggtgccgtcgccgccgcgcatgaggacatggtaggtgaaaaagtaggtgccgggaatgttgcacgtaaacttgccgctggccgcgtcgtagttgttgcctaggttggtgaccacgtcgtcaaacttgagtacctcgtaaccctcgtgggggttcttgaggccggcgtagaaggccacgcgcggcac

SEQ ID NO: 31369 - DNA, 2297 bp, Artificial sequence
  DNA replication origin
ccagcacggggatgagcaccaccagcaccagcagcatcaccacacccgcggcggccgctagcagcgtctttcggcccgcgcggagcctggggagcgccgggccgcccggccgcgccgtcggggcaatggtgccggcgggcagggggcgcgggctaggcgcccgcgctcaaggacggtccggcggggctgcgggcatggggccgggcccggggcgccgcgctgcgctggctgcgctgcggagcccagccgccggctcctgcctcgcgcctccctcctgctgcgctgccggactgagcgccgcggccgccgcctcccgcctcccgcctcccgcctgcagcctcccgcctgactcctcccgcctccttgagccgggccaccgccccctcggccgggccccgccccgccagctccgcgcggctctgggctctctaggggtggggctgcgggcggggccggcgcctaattgggccgcgggcgcctcgaggtgggcggggcataagggggcggggccgcggagaccccgggcgggagcagggagaggaaagaagagactgagtacgcggagaccgagattcggaaatggggtgggggccggggtccgagagacccgagaggcgctccaagggaaggggagagtagggaccaaaatgcgaaagggagagagggccacagggagagctagagagctccgaggggatcgggagaggagaggcttcgagggtcggtcaccaggaaaacagagggactggggtcgcgacgggccaagacccgcagggggcggaagcgaggggatagcgcccaggtctgcaggggacaaagagcgattgaggggaggacggagcggggagctggaaggtaggatgagaaagggggttatgaagcgaagaagaggatacggaggggaccatttggcactcaggcctcgcagaccacccgtctgggagatccagatatcggatgaatgcctgtccgggggcccagcggagccagacggcagccgcctcctcctttctggatctgactgttccgggacccgtctcccccgaggtggggcaggagcttccaacccctcctcgcctctgccccttcctcaccgaactgtggccaggctgctttttcctgggcccttttcttccatctccctctgctcaatccctttacttctgcctctagaccagggagaaaaggggatcctaaaaaggtgggcacccccacgttatttctccatgctgacagatgcaaatacgtccctgaggggtaacccccttttccagcctccaggatgaggggtggatctcatccagcccctcagctcctcctccctcactccccagcctcctccgccgccccctaactcttctccccatcaggctgtgggaggctctcctcttcctcaagtgcagcaaagtgtttaggttgcataaaccgaaacgtgtctgcttccatcaaaatatttgtcacattatctgaggcccaggtcgggctgctccaccgctcctccttcgccctcctttatccggcccaccggggaggattcagccattcggaggcgactggccggctgctaaagaatgacatcccagcctctcctctcccgagagctaccccccgccggctcacactctccctgttgacccttcaccatgggcaaaatgattccctggccttccctacccaaggttgaggtcgctcacctcatccagggctgggagtagaaggacacagggacatccaacgagggggctgtgaaagaggaccctccaagcactaatggctgaggccaggttggagtgaccccaccaccaccaaggagggagctaaaaaattttcaataagtagcatttattcagggtttactctgtgctaggccctgtgttgaatgttttacatacatgatcacccttgatcttcacatcagtccaaagaagtaaaatccaagattattttaattttacagatggagaactgaggctctgggaagttaagagatttgcttaaagtcacacaactaataagtgggagagccgggactcaaactcgtagcctggctccaggctcttccaacctcagcgcgatagagtctctaggtaccgtttactgcccaaagcccaggggtagggggctcagggcagccagacctccctaggctcaggaagagtagtcttcagcgctcggctgtcaggcaatccggtccccggttccccacggcggtctcctcggtgtgccccaccaagagcgacagggctggtgacccgaggggcgcgtgcgcggtcgtcagcctgggatttgcacggacc

SEQ ID NO: 31370 - DNA, 1136 bp, Artificial sequence
  DNA replication origin
atgtgaaactgaatctcagcttggacactcgctggccaggtgaccttaggcaaattgcttcatctctgagtcacagtttatttacttttctgtgaaacgcagtaagtaatacccatcaccagggtaccattgactttttaagtatatacgtcaccaaagaaggtgcctggtacacagtagggcctcgaccagtgctagtacctttccctgcccctttgccagtgatatatgctgcatctctcctcacaggcaaggaaaggaagcttagggggtatggggagtgcaggaggacccagcattccatgtgccattaatctatgttttatgctgtcttcccaggcatctgattctgttctgctctatgggaagcctcttatttaaggggaagagggtgaagaggcctggctttgccacctgaaccacctgaatactccagagaaacagcccctttcttcactgtttcttctttctctggctttcaagtttataaaagcatattgtgggtctggtggttatggaatggtggtggtaacagtggtgtgatggaagtggtggtggtggtaatgatattggtggtggtgatggaggaggtggtggtggtaatgatattggtggtggtgatggagaaggtggtggtggtggtagtgatggaggtgctattggtaatgatggtattggtggtgatgatgcaggtgacggtggaggtagataatagaggtggtaattgtggtggtggtggtagagatggtggtagcgatggaggtgatggaggtagtagagctggtggtagtgatggaggtgatggaggtggctgtggtggtggtggtgatagtgatggaggtgatgttggtaatgatggtattggtggtgatgatggaggtgatggtggaggtagataatggaggtggtaattgtgatggtggtggcgatggaggtggtagtggtggtgatgataatgatggtagccatggaggtgatggtggtggtagagatggtggaggtggtgatggtgttgggagtttatctcaaaatcccatgctcagattttaagagctagaagagggctccatttcagtgaatctctgagggccagctatatgccaggcccatggtgctcacctccttttcacagcaat

SEQ ID NO: 31371 - DNA, 3262 bp, Artificial sequence
  DNA replication origin
agtgaatctctgagggccagctatatgccaggcccatggtgctcacctccttttcacagcaatgccctgagtttactatctccttttgcagataaggacactgagaccaaatatcaaatgacctggtcagaggcatggagaagtttttttctgtttttttgtttgtttgtttgtttgttttttgttttgtttctgtttttgtttttgttttgagagagagagtcttactctgtcacccaggctggaatgcaatggaacgatctcagctcagctcactgcaacctccaccttctgggttcaagtgattctcctgcctcagtctccagagtagcttggattacaggtgcctgccaccatgcctggctaatttttgtatttttagtagagacgaggtttcaccatgttggccagggtggtcccgaactcctgacttcaagtgatccacccgcctcggcctcccaaagtgctgggattacagacgtgagccacctcgcctggcctatggagatgtatttaaaacctgggtcctttaacttctagtccatttttcttctctatgccatcatgatgccacccacatttcacggtaggggaaatggagatccagagaggtcaggtaatttgcctaaggtcatgcagcagttagaagcagagcctggccatttcatctgcactcctaggtctcagcagccttctcatcaccaatggctgggggtctcactgagaaggttagaaggacgaccagcgcattgcagaggctcacagccatgacagaggcccagagccagacctcctcaggttcctggggcaggctctcgatctgctgtccttctgcccctgcacactgtcaactccaatctcccctccagcctcagagtgagagtgacagacaggccagccctggccagcccattaaacctgacacctcctctcccagatttggctgtgggcctcccttagcctgagcaccatgctgcggcagctctgactggcactgaggtggggtggcggggctggcattcctctactatctcctccccatctgagctctgaggtggtgagcttggggatccagtcatcttgctctccttttcctttaccagtctcagaccttagtttcctgccaaaaaaaaaaaaaaaaaaaaaaaaaagagtagctctaccttaacccactagcagttagtgaaaaagggaagagagagtaagaattgtgcccaggctctgtatcgtccacaggccccctcccccaagaaaccttctgggactcatcccaccccgttccactccctctgaaccctctgcaccatttctcctatctcaaagctatgtgtctggctctaatctgagtcatgatgatgatggtggtggtggtggtggtggtggtattggcagtggcaatggaggtggtggtatcggttgtggcgatggaggtggtggtatcggctgtggcggcggtggtggtggtatcggctgtggcggcggtggtggtggtatcggctgtggcggcggtggtggtggtatcggctgtggcggcggtggtggtggtatcggctgtggcggcggtggtggtggtatcggctgtggcggcggtggtggtggtatcggctgtggcggcggtggtggtggtatcggctgtggcggcggtggtggtggtatcggttgtggcggcggaggtggtggtatcggttgtggcggcggtggtggtggtatcggttgtggcggcggaggtggtggtatcggttgtggcggcggaggtggtggtatcggttgtggcggcggtggtggtggtatcggttgtggcggcggaggtggtggtatcggttgtggcggcggaggtggtggtatcggttgtggcggcggaggtggtggtatcggttgtggcggcggtggtggtggtatcggttgtgccggcggtggtggtggtatcggttgtgccggcggtggtggtggtatcggttgtggcggcggtggtggtggtatcggttgtggcggcggaggtggtggtatcggttgtgccggcggtggtggtggtatcggttgtggcggcggaggtggtggtatcggttgtggcggcggaggtggtggtatcggttgtggcggcggaggtggtggtatcggttgtggcggcggaggtggtggtattggttgtggcggcggaggtggtggtattggttgtggcggcggtggtggtggtattggttgtggcggtggtggtggtggaggtggtggtattggttgtggcggtggtggtggtggtattggttgtggtggtggaggtggtggtattggttgtggcggtggtggtggtggtattggttgtggtggtggaggtggtggtattggttgtggtggtggtggtaatggctgtggcaatggaggtggtggtattggttgtggcaatggaggtggtggtattggttgtggtgatggaggtggtggtattggttgtggtgatggtggtggtggtattggttgtggtgatggaggtggtggtattggttgtggtgatggtggtggtggtggtagtggtgatagtagtaatggtagaggtggtagtggtactgatacagaaggaaagtgctgggaagggaagagcatggtccctttaaatgatatggaggcgggtaaggaaagtgctgggtagaggagggcgtggttcctgactagggctccacccccatggatctaggtgaggataggcattcctgtccaaatgttgcatttcccaagaccaccctggcctgccatgccccatcctctgcctataaaatccccgaaattctagcaggcacccacaaatggctggacatcaagaggagcatgtcagaggaggagcacgcgggctgctggatgtcgagaggaatgtaccgatagtccctggcatgatggcaggccatcgaccatcgaccagctgaactagcagagtttggctgaggcagagtttggctgggaagtcagaggagagtggcccaactgcaggggaaaaccatcccccttctggctcccccatctgctgagggctacttccactcaataaaaccttgcactcattctccaaacccatgcatgatctgattcttctggtacaccaaggcaagaaccccaggacacagaaagccctctgtccttgtgacaaggtagaggatctaattgagctggttaacacaagtcgtctatagacggcaaaactaaaagagcacatggtaacacatgcccactagggcttcaggaactgtaagcattcaaccctagacactgccat

SEQ ID NO: 31372 - DNA, 1545 bp, Artificial sequence
  DNA replication origin
atcgggctccagccagtaactttactggagaaaattattatgtgattatttcaaccttgctccaaacgctgttttaattggatctgggaaaaggcgatttgggcatcagaggagccacgcgggggcgggagcagcataggaatgtcaggcaggggagccccacctgcccatgaggttcgaaaggcagacaggactgcttcccagccccctacctctccccaggccccccacgttcatcgtagatggagggtaagcctcagccggaaagagaaaatgggtgtggggagaaaggcttcccaggcaagtgggttgtggagggggttggagggggttggagggggttggagggggttggagggggttgggggggtttggagggggttggagggggttgggggggttggagggggttggagggggttggaggggttggagggggttggagggggttggagggggttggaggggttggagggggttggagggggttggagggggttggagggaacaggttcctagcagcctgtctcctgcccaaagcagccatcagccacttagaaaactactttcctgccaatttccttccctcctctgcccccagtcccagcccacctggaatagacttttgctcaaacactagcccaaggaagcagagttggaaagaacatttgattttccaggatccaggagggcctttgaaagggatttggatttatctgctcctgggatcaccctttctccctgctagacagatgactggtgtttgaacatatgctaacctttctgagctttggttttcccatctgtcaaagagagggtcctaggtgacccccaagacccctcccaggaacgaaggaagccatttgcactggttctccctgtgctctggctctccatgaggctagagaagtccagcaccaactctttggtggccaattctgcaggggcttgtaggcgctgagccttgtagagcccatctgcctcgcagctaaggatgtccctccccaccccgagccagagctcagccaggtgccaggagcgagagtgggcctgggattggggcaggaggagaggggaggggtgtgctgaaaggttgaggggccaggaggaaggacgcatcttcatggtcttgaggtctggctttctcagggctctctgtaactccttttctccacaccttaacaaacaccatgtcaacacttctttaaaaattgtttattttgtttagaaatgaggtcttgctctgttacccaggctcgggtgcattggctccatcatagttcactgcagcctctacctcctgggttcaagcaattctcctgcctcagcctcctgagaagctgaaactacaggtgcacaccaccatgcctggctaatattttaaattttttgtagaaatggggtcttactatgttgcctaggctagtcttgacctcctgagctcaagtgatcctcccaccttagccttccaaaatgctgggattacaagtataagccacagtgcccagccaatgctttttaaatattttttatttttttagagat

SEQ ID NO: 31373 - DNA, 1560 bp, Artificial sequence
  DNA replication origin
tgaacctgggagatggaggttgcagtaagccaagatcgcagcattgcactccagcctgggcgacagagcaaagaaaccacagggttggtggctgctggcagggctaagtctggttcctctggccagtgcccagcttccccacgctcactatcctctgggcctggggcatgctaagccccaggagtcaaggtgggactctgaagggatctactcccctccctgcacctctcagccaatcaatgtctgctctgccctccctgacttcagcagagttggtgccagatcctggaactcactgattggttgagggagcaacccctctgcccacccctcaccatggaggcttttggagagacctagccatgggcaagctttgtgccctgcaaatggctcagtggtaccaaccactgagctgcctgcccctgggccctcataagaccatgtctgcagcctcagtggccttctgggcacggctggcctcctggtcagcagctgtaggggtgagtcacggctctcattagagcttaattaatcaattgagctaatcagacagctgtgatgtgctgtggttgcagatgggggggagagggagagagttggagcgtgagggactggtaaggcgagctggggctggcagggcctggagtggcggcagggcctggagtggcaacagagtctggtgggttggcaagggcggagggcgctggaaaggaggatgaatgatcctgacaaaggcccgtgataggttgctctgaaaggtgaccttggcaaggtgccagagaccgaggctgggggaggaggaagcaggacctctcccacctccagcttcctctctcattttttatcttgttaagtgtgtctccaaagctttttgaaatcctccactgaatgggatgggaaaaggagacaaagacaaaaaaaggtaggtcctcacattcccagtgatcccagtctgatgggggaggccagaggtctactggcagcacagacagagacccagactaagagatggagacagagacacggtgtctctccaggtgagctgctcaggcttggacatctggactgggtggatggggaggagccagagggaccagagccaagggtaggcgggagtccagtaagaatattgggaggaggggagcgcctgagcgggttttacaatgtgatgtgcaaaatcttgtttcatctatttttttctcacatccgaccttggtgttaccttggggtggggagcgagcagggcaggaagtgcaatggtgggaaatgggttccgagaggactcatggacagctgggatagctctgccctccaggggcttccatttccagaggcttaccgggagtctgaggctgtgagagagaaagatccagggcctgggacatgcaaggggctacgggagatggatcagaggagggcaagcatttctgatgaggctacctggtaaggattcctcccagaagaggtggcatttgagccaggtctttcagaatggatggatttcaatcagcagaattgggtgtggagaggaagaaggatgttgcaggaggagaagcggcc

SEQ ID NO: 31374 - DNA, 1949 bp, Artificial sequence
  DNA replication origin
gacagacatggaagaggagactggctttggagcccagtgcacccagcacccagtggcgctcaggaaagacctgagtgattgcaccgaacaacaaggtcatcttcaaagtttgtttggagaggtgcatagggagaacagggtcagcgccccgcgacgtctccttccccgggttttctagcctagtacacaggctcacactccgcggtggaggtgttggggttggccctgtgtgtgacccccgcttggcacacggtggccacccctccgctcagctgagctgagctaaagccgcggctcccgggctcctagcaccgcctccgccatcccaccctcgggcgctgcctcccgcgggccgggcgcccggtgctcggcgatccggaagagggcgcccgcccggcccacgtccgccgtgtccccgcccggcgcgccgcgctcgccagcccgcgggctccgcgccatcgatcgggccgcagggacccgggtgagccgcctccccacccctcgcttttcgcttttaattgaagtttgtttgagcagagcgcggagcgggcaaaggcagaaaccaaatatttagttgctgcaaattggcacctccagatcaattacccggccagtgtcagggccctcgccgccccccgcgccccgcagaatctcaatgccacgctgcccccgcccgggccgcccgcgccgccctcgccgccctcgccgccctcctccattacactgcacgtttttcatcagctccagccagacatcacccgtggccgcgagggaacagattttcaatgggaaaagttccccgggagggtccttgttgctgattcccgccgcgccctgcgctgtctggcccctgcccccacctggcttgtctgacggagacagcagatgggtggagcgagctcaaagcaaggacttggggtcaggaagaccaggccccgtcataggaactccccttacccgctgggtgaccttggggaagttacttatgctccctgagcctcggagtcccccataacatgggggctcaaccttcaccttgtggggtcaacagcatggagggacagcaccctgcccagggctggcacacagtgactttccacagatattagttctcaccctgctaggggttaaaacaggctctagaatgaaatgagagacagtgagttcgaggcgactcaaccaagccactgaaaaataccaaagggaaagcagcagacagccagcatccccagagtctctggcaggggctggacaggccccaggaccctggtcaagctccatcagggaaagtcctgacccccagcccaagtgcatctgggcacaaccaaaagagaagccgcttttccagtaccaggggtggagaatgagagagccatgatcccaaggccacagccaggcaaggaggccggagggatctgaaaaaggtcaccaagggctcctgacccttgccaagctgagtaccaggaggccagccttgtggcaggggggaatcaggacagctgggctgtagttgaggctttgccttctcctggctacatgttgctagtcaagtacttaacttcaattttcccatgtgtaaaatgcggctgacaccctctacctcccagagcatttgtgaggagcaaatgaagtatgggagaggggaggaaactcacaaccagcatgaagaagatggggccaagtttgtgtgggagtctcctttcccatgctcaacactgctcccatcccaagagcccctgagggaactggagtcaaatgcctagcctggcatttttaactgtctgctctgccagagtgacagggcctctgggtgggaggagaggttaggggaagactgtgagcctcaggcttagtgctttgagagccctttttaaagaatgaggctcctcctctgccagcactaccccccagctgtcccgcccccagggtctcagtgcaagagtcagccc

SEQ ID NO: 31375 - DNA, 1763 bp, Artificial sequence
  DNA replication origin
cattgaaaatctgttccctcgcggccacgggtgatgtctggctggagctgatgaaaaacgtgcagtgtaatggaggagggcggcgagggcggcgagggcggcgcgggcggcccgggcgggggcagcgtggcattgagattctgcggggcgcggggggcggcgagggccctgacactggccgggtaattgatctggaggtgccaatttgcagcaactaaatatttggtttctgcctttgcccgctccgcgctctgctcaaacaaacttcaattaaaagcgaaaagcgaggggtggggaggcggctcacccgggtccctgcggcccgatcgatggcgcggagcccgcgggctggcgagcgcggcgcgccgggcggggacacggcggacgtgggccgggcgggcgccctcttccggatcgccgagcaccgggcgcccggcccgcgggaggcagcgcccgagggtgggatggcggaggcggtgctaggagcccgggagccgcggctttagctcagctcagctgagcggaggggtggccaccgtgtgccaagcgggggtcacacacagggccaaccccaacacctccaccgcggagtgtgagcctgtgtactaggctagaaaacccggggaaggagacgtcgcggggcgctgaccctgttctccctatgcacctctccaaacaaactttgaagatgaccttgttgttcggtgcaatcactcaggtctttcctgagcgccactgggtgctgggtgcactgggctccaaagccagtctcctcttccatgtctgtccacccctttactcttgggttggcaaaagagctgccagtgaatccatcccaggacccaaccttggaggggtctgaaggggagggcttggaattgggagaagagtagtgagatcctgggggtttggagaggggtcctgggaggtggccacagcttggagcagaggaggagatcattgggtcacagttgccttttttggggttcaagacaaacagcaacaatagtcattcactgggtgaagttagcccacagggaagtttctcttcctcaagaatcttccagtcctttgagggtagaggggaagggctgggaagaagagctcaccactgtgcgacaggcagagcatctctggtcagccgggtagggcagcctggggcacaggaacagttctgggagagatgtgatgggaggaggtggggctggcaaagaggcatccaggtcggcatagaaggcagaggtagattcagatccaaggaaagaggaggggagctggggtcctttcatctgagtgaaattttcttgagggccagaggcaggagctgaggcagaggagctaggaaggtgagggagggggcccttggcctttcccacatttctgtgccccaccttccagggtggaagacttactccttcaccagatgaggctgctgctagttcactcagctgtgggctgtggcccctttccttcccgctccctgtcgaccccttcccctgtcctcctaggtaccccgtggcccacagcgggctgttagagcacaggtcttgcttgtgtggaccctagcctccaggccctcagatgcccactccttggtgcatagggctctgggagagggtggtcctgctatctcggcttctatcccttttgacactaagatgcctcgcttgccggaccctcaaccacactcaactcccagctctgtctctcttagtggcttggggcaccaatctccccatcacacagaagttggatccagagct

SEQ ID NO: 31376 - DNA, 1446 bp, Artificial sequence
  DNA replication origin
ccctgccctgcccgggcctcgccagagctccctctccagctcctcttgcctccctgccccaggatccccttcccggccttgggggtccaaggcggccttaaaagaaggactactttctccgaaggggacttgaagttgaggccgctcagcaactgcagaggtcgggcctccgggacccaggcccgcgcccgagccggcggcctgccgttcggccggcaggtggcagcaccctcccgggctgggccgggcctccgcggcgggcgctcgccgagcggcctaatcttcctcctcccaggccgcgggcggcctcagactcctgccgagcagctgccgcgggagcacgggccaggtgggcgcggaggctctgcctgaccctgagcgctaactcaaaaggtgcgttgttcgcccacgtcctctgagcctgggctgcgggccctgggtgccaaagggcgtgtcccctgcccacccaccgcgacggcgacgggaccctgcagcctccgcgttccgttccctcactttgggccttagcacccggagcggagcaataagacaccagcgagggtgaagacgcacacgccttctgggcgggggacgaagggcgcaggcaggcctctaaaacacccccacccccaggcccgactggcccgaaggtcattcgcagtttcacagtttacaaagcacgttccagttatccccttgaaatctcccagctgtgtgaggcagacaggtccagaattttacagaggctcagaggttgagccaaggggcctaagtagccaacaggtataaccaccaagcttcttgactcccagtacagtgctcctccggctatctgcactgcccccattatacactttggctctttagtaattgacaactcttcttcaaatgttcattctctctctctcctcatggggggcagggcagaggcagggaaaggtttaggaccttccatgatgagcctccatggctagaaattgaatgggagcaggataggcgcgctgctgagcgcccctagttctcaccaaggcactttaggtcagaaggaaacagtctcagagcaggagggggaatgcgatggcagtgatgacttcaggccatggggtcatataggagtgggcagggagacccccggacatggtgggagagaaggagcaaaaggaaggaggtgatgtggtgctataggttgctttcctgctccttccaggagagacgtggctggtggttcctcatcccacctgcagagctgaggctgcacccagctgggacccaaaccgcctctctttgctccccaccttcccctccgctcccagtcacttagattccaatacaatttccagctaaccagcatgtcgatagaacaagtcgggcggccggattgctggccaattacaggaaatcattctgctccacagctcagcgctcaggaagggagagggagggagg

SEQ ID NO: 31377 - DNA, 1418 bp, Artificial sequence
  DNA replication origin
ccgctccgggtgctaaggcccaaagtgagggaacggaacgcggaggctgcagggtcccgtcgccgtcgcggtgggtgggcaggggacacgccctttggcacccagggcccgcagcccaggctcagaggacgtgggcgaacaacgcaccttttgagttagcgctcagggtcaggcagagcctccgcgcccacctggcccgtgctcccgcggcagctgctcggcaggagtctgaggccgcccgcggcctgggaggaggaagattaggccgctcggcgagcgcccgccgcggaggcccggcccagcccgggagggtgctgccacctgccggccgaacggcaggccgccggctcgggcgcgggcctgggtcccggaggcccgacctctgcagttgctgagcggcctcaacttcaagtccccttcggagaaagtagtccttcttttaaggccgccttggacccccaaggccgggaaggggatcctggggcagggaggcaagaggagctggagagggagctctggcgaggcccgggcagggcagggctgaattcgaggtttctccacacctgccatgctctgacattcctgcttcaaacccagctcactgggtcagggaaggttaattctctggaactttacagtttgctaagggttttcagtgtcctccactatgaagcctaacgatgtatgagtagaaactaaaggcaggaggtcacatggcaagcggagccggaatgcgagcccaaggcccaaccccaggctccagctcctcctgacaagaggctcagggcacaggagagagttcagaagcctggctctgcaacctggaccaaatccatctttctgagcctgggatggaaataatcagtgttatgttaactatagggtcttacacatccagcagtgcctggcatgctgccgatactaggaagtgccatttcctcaattattggggtgatagggcactgtgggggtccataccttccctctcctttctccgtcctggcggatcgcaccaaaccgaggaagtggcaggctcctgccaccctcatcctgcctggccacccacctggcagcccaccactgccttacccggcccttctttgccccttaggggtttgcagcaagttaatgagctagactcagcacaagcggctctgggaaagggggcactaagtatggccaccacagcatttgcatccgtcacactcatttctagccttaataggcttctggctgcaggatcaacacatcagcaagtctgcaggccctggcagggaaggcttatgtctgcgctggtctaattgggttggggaaggcagatggggaggcggggcaagaaggtgtgacgctgcctcagccctctacccacctcccacaaaggtgcctcgggcctggctgcagtcctcctgggacccagg

SEQ ID NO: 31378 - DNA, 1063 bp, Artificial sequence
  DNA replication origin
aggcttctggctgcaggatcaacacatcagcaagtctgcaggccctggcagggaaggcttatgtctgcgctggtctaattgggttggggaaggcagatggggaggcggggcaagaaggtgtgacgctgcctcagccctctacccacctcccacaaaggtgcctcgggcctggctgcagtcctcctgggacccagggagaagcctgatggcaagtgcaccttctggggccctcacctccccctgagctccgggaggactccagcccagtgtgggaagaagccaagtctgggaatcttggttggtctggggcatttcagatcaacacactttattaaacaccaacagcgggccaggctctgcactaagaacacagagatgaataagacactgtccctgtccctagagggcttacagtctagtaggaaaaaccaggcaagtttcggctaattactgtactgttggattaaggtaaaatgttgagggggagttggtatcctagaccacctaacccagcctggggctttagacagtgcctgaactgagagctagttgtaggttaaaaaaaaaaaaaaaaaaaaaaaggaagaagaaataaaagaaaataaaaggtatcccaggccaggagcagcaggttgaaggcacagaggcaagaaacagcaaggatggtgtacacggaataccaagaggtccaggcgagaagcaggggtggcaggcaataagcaggatgtgggagcactacacaaaccctacgtggggagaggggtctcccagaagaggctggtcctgcctggctacagcgttacccacgagagaatccttgctgcttgctggcagcaagccatactggggggcctgggccttcagtataaaaaatatctcaacctaggggagggccttgttgactgtttgaacatggaaacccttggtccaacatgatttcccgtggtccactgaggaggtttaggccacaatggggtaggtgcttagagaggattcaagcccagtgaacccttggcctcccagctctgaggagggccacagagccagtattccctacccccac

SEQ ID NO: 31379 - DNA, 1297 bp, Artificial sequence
  DNA replication origin
cttacaggccggctcagcgggcgaggcgggacctcgggagcgcgcgcctgcagaccggacgtccggccagcaggcggggccgggagaggttggacgggcggggccgggagaggttgggtgggcgggcggggccgggagaggttgggcgggcgggcgggcggggccgggagaggttgggcgggcgggcgggcggggccgggagaggttgggcgggcgggcgggcggggccgggagaggttgggcgggcgggcgggcggggccgggagaggttgggcgggcgggcggacgcgggagaggttgggcgggcgggcggacgcgggagaggttgggcgggcgggcggacgcgggagaggttgggcgggcgggcggacgcgggagaggttgggcgggcgggcggacgcgggagaggttgggcgggcgggcggacgcgggagaggttgggcgggcgggcggacgcgggagaggttgggcgggagaggttgggcgggagggcggccggacggacgcgggagaggccggcggggagagctcggccccggagcacggcacagaggtcccccgcaacccccgacccggagccataaattttcctttccccggagccgggaaggagagggagagagaggagaggggcaaaactgcagggtcctaacttcggatataaagctcggccactcgctacttgtgcagccttggcagaggtgatcatgagcactttccacctgccaggtcctaagagcactttgtgggattatctcagcccgcacagtccgcagggtggatactatcatcatccccattttacacaacaggaaactatgtttagcggttaatccatttgccctctcatacaaagtcatgtgattgcagagcccgcatcctgtccatacaagcctagcaagccactcagcctctcatcctgtctcctctcaaagtggggataatcgcagccgtgcagcgttgttgaaagaatacataaaagccgggcacggtggctcacacctgtaatctcagcactttgggaggatcacttgagcccaggagttcgagaccagcctaaacaagagtgagactaacccccgatctctacaaaaaaaaaaaacaaaaaacaaactagccaggcatggtgacagtgtggtctcatttactcgggaggctgaggcaggaggatggcttgagcccaggaggtcaaggctgcagagagccatgatggtaccactgcactccagcctgggcaacaaaacgagaccttgcctcaaaaaaaataaagcatctaggccgggcgctgtggctcacg

SEQ ID NO: 31380 - DNA, 1753 bp, Artificial sequence
  DNA replication origin
gtcgcgtgcattgtagtggctgctgtgtatattctgatgttgagggaccttattaagcatcccttcctgatggcctcccgggccattctccactctttcctattagaaacatcgctcatctctgtgtctcctttcctgcctcccacccctagccagcccctcacaaggcggtggttgaataactgactgactggctgccacaggggcgagaaggcctaacccttcatcctccacgttggcccccacagcagctgaagggccgggtcctggtgaagggaaagaagttgcccgctgctcggagcgaggatggccgggctctgtcggatcgggaggaggaggaggaggatgacgaggaggaagaagaggaggtggaggctgcagcgcagaggcggctggtgagagctgggatgggtggggtggggaagggggggaaggtgggaggacggatgtgggaagcgggggccagctgaaccccgctgagcctggtctcctaggccaagcagatctccccggagctgtcggccctggctgtgtactgccacgccacccgcctgcggaccctgcaccctgcccccaacgccccacaaccctgccaggtcagctccctcagcgagcgcaaagccaagaaactcattcgggaggcaggtaggagctggggcactgggtgtctgggggcgagagggtgagagacctcctgaagggagtctggaaaggagttgagggggctttgggggacagtaaagaggtcaagaggaccccaaagaggggctgggctgagggaatgagggccccgcacatgccagggtggatggaggggagtggcacgctgagggcggcctgctgtctgccttcagagccctgtggtggggccggccatagagggtgatgggtcaggctgggctgggggctgggggagcccagcagctgctgcaacactggggaggaattcctggggcaggtgatgctgagaggacacatcacctggaggactaggaagcagccaggtgaagaggggagagcgctttccagacaggaggaacaggttgttgaaggcctggggccttggcctggagaagaattccaggaaccacagtggagctggagggccgtgggcattcagtgtacttggttggaactttgtcaggagctgggaattgggggctggggatgcagggccaggctgtgtggctggagggggtccctgcagcctcctcagtgagctcccctctcactctaggtcagaagagagtgaggagcgggggcagggtgacctggggacgggcttgggctctgttccctggaggttacaggccggggctttgggtgagggacccccggagtctgtcacggtctcaccccaactctgccccagggaacagctttgtcaggcacaatgcccgccagctgacccgcgtgtacccgctggggctgcggatgaactcagccaactacagtccccaggagatgtggaactcgggctgtcagctgggtaagtgggggccacaggaatgagagcaggcggggtgccacagtgtgggggaggcctcagcagtgaggggcccacacagccttccagacggtggaaacacgcattttgttgattatttttaaagttgccagcaatgtaggtgggaaaatcaaatcaggctcgtttgttcttgacagtgtacaggtctcgcatttttatcatggtagaaattaaaatctccactcccatgtcccccggacacacacaacccccacacacctggca

SEQ ID NO: 31381 - DNA, 1999 bp, Artificial sequence
  DNA replication origin
agtcatgccacttaaccttcgaccagaccctgggaggaagacaaactgttgtgccattttacacatgtggaagctgagtctggaggaggtgaggtaacctgcccgagatgatgcccgcgccagcccgcagcagaacccgcttagctgggaacacagccctttcaggtgccacgacctggccgtgccaccccccccacctgtctcgttgagctcataggtctgaatgagctgctgggcgcgggccagtgtggcgccctcctcgccctggtcctccaggaactccagcagctcaggggcactcagcacgcggtcctcgcccgagtactgatggaagatctcctccagctccggccgcttcagcagccgccgcaggaactcctcgatctcagccccctctagacggtcgttgttggagtggtcacactcctggggagcagcaggagaagctcagaggaggcagacactccaggaaacctggcccctttgacccatctgtcatctaccacatctgagaaggcaatggtccccatttcacaggtggaaaaacagagtaagacttgtgactctagctcacacagctggtaaattacagggcaggattttttggtttgttttttaggtttgtttgtttgtttggtcttgctctgttacccaggctggagcgcagtggcatgatcatagctcactgcagcttccaacgcgtgatctcaagtgatcctcccacctcagccttccaaatagctggacagctgggaccactggtgtgcaccactgcacctggctaatttttgtattttttgtagagatggggtcttgctgtgttgcccaagctgatctcaaactcctggcttcaagcaatcctcccgcctaggcctctcaaagtgctgggatgacaggggtgagccactgagcctggccggcagggctggacttaaaaggtctctctggttcagtgcctgcccctctgcaccatgacctaccccaggaatcaagatgtggaaggaaaaatggtgaccctgggccaagacagggcccttgggccctcacactcccctaggtggacacgttactatcctgacatgcacatattcacacccagcatcattgaacaagtcaatgagaattcatggagcatccctgtgaagctgtggcccaggggtccagctgccatgggctctcctgtctttcggggtcacaggtgggtcccaccatccacatgcacacagaggtctgccatgggctccagctgggccatagctgcagagcccactcctgtgtgcccctgtgctcccatgcatgaggtgccaacacgtgccacagtggagggtctgcgtggagaagggtgcacacgtgtatccgtgcacatgcacacctgtaggctggctcctgcctgtgcccccacgtgcaaaaggtgccttgcagactcagggaaatgaaaacagctttgctgctcactttggaggggtaggaactgaggatgaggaaagttctgggccccggctccccactcccttcctggcccagtggcctcaggggaggcaaaaggctaactaaccccagatgttgcctttgtgcagggaaaggctgctcgctccaaaaaagctgcaggtggagagggcaggggagctgatgattcagatggctgggggcaggcagaggtcagagtgatggcagagccaggggctggggttcagggcggaagcccaccttgaagaggaggtaggcgtacatgtcgttcatgtccacgttgaccattctcagcaggctcttgatctccttgaagctcatcttgctgtcctggttggagtcagcccggtgcagataggagtggatccaggtgtgggtgctcaggaaataacagcaacacgccaggctgcccccagccctcaggtaactggctggtaagtcacccccacctgggtctgggggatccccagtttaggggctgtactttccccttggcctgtgcactccccgagcacggtagcagtgtctcctc

SEQ ID NO: 31382 - DNA, 1353 bp, Artificial sequence
  DNA replication origin
tggggctctccaaggttagggctctccaaggatggggccctccctcccagccccggcaggatattggtctagccgctcgcgctggctcatggcgtccaggcgcgcgcggagcttggtcagaccgcgcacccagcgctgcgcttcctcagccgtgggcgccgccaggtccaggttcttgcggcggcccttgaaggcgatggtgaggcagcgcgctggcgcgaaggcacccccgaagcgccgcaggccctcggactggtggccctcgcggaccgcctcgatgtgctgcacgaagactgagaggagggccgggtcagggcggaggaccgggcctgtccccacctccctgtccgcccggcgctccccggcctctcacagatgtgctgcgatggcgcacgcgggatgcgccgctggaaccacacgctcaggccgtcctcctgcagccggtacagccgctccttgtgccacgtgcgcgagcggatcttgcggagccgggagccccgcagcatggcgcgcacgtcctcgtcctccgtcaggcctggcggggcgggaggacccggggcgtcaggccgtacctgcccagaggctcccctgccctcccccgctaggacctgctgccccatcctccagcctctccaaacccaggccttcatcccacagtaagcttccctccccctcacaggactcccctcctccccgattgtaagaagcctcctgcactgggtttggctttaggctttggagccctaaacgccccccaacccgtaccccatctccctccttccttccaagcagcggcctctgcagtccctcagtgtggaactgccctcggacaatgcctgggactcaggcctcactaaaggttgccctttctggcagggcgcggtggctcacgcctataatctcagcacttgggaggccgaggtgggtggatcacttgaggtcgggagttcgagaccagcctggccaacatggtgcaaccccacctctactaaaaatacaaaattagctgggtgtggtggcacatgcctgtaatcccagctacttaggaggctgaggttgccatgagccaagattgtgccactgcactgcagcctaagcgacagagtgagactgcgtcttaacaaaaaaaaaaaaaaattgccttttctgccactatcccccaccacatggcttccagccttcaagtccagaatttgccaccaacagcctttttcccttgatgtgaaaccgtagccatcaggaaggtctcaccatctaacctagatctctcttgctgtaacccaagcaccttgcctctgctttcccaaagacaaggaggacagcagaggccaccctggctccagggtcacaggc

SEQ ID NO: 31383 - DNA, 1608 bp, Artificial sequence
  DNA replication origin
tggaaaggaccgcgccactgaagtgctgcgttggacctgccattggtagaatagtcagtgatggagaggctaggtgtggaactccggaacagaaggacaaggctgccagggaccccgtgtagaacttggggcagaattcaggggtcctgattgccagttttgccttcttgttacctcgactcattccacctgagcgctgactatgtctgggcgctgtgcctggcactctggttactgagacataggacaccatctctaccctgccatccattcaactgtgcatgcattggacaagcacttatgcggtgcccatggtatggtactatggtacaagcacttgtggagtgcctatggtatgctccaccctggggctcttgcattagagagctgaggttccagcagggagatcagacagtgaaacaaaggaacaggaccttgggggtgggggaacagggggcagcacatgaggggctggggagccagcaggccctggctggccccagctgaggaagacgggagtggcaaaggggagaggctgggggtgggaggagctcctccaggccctccctggagagtcatggactttatctggagggcatcaggagccccagaaagggcttgggcaggagtgagtgtggagagtggggggcaggttggatgaaggcaggggcgaaacagggagacccaaggagggaggctgaggagttagttgggcaaggggtggggaccagacttgggggacacccaggatggaccccagaactcccaggagatagactgggctggactctgtgatcgacaggtgtcattctctgggctaagaaatggtgtggtttggggatggctgagggcagccctgggagtcagccctggcagggtcacgggtgccgcggaagggctgaggggaggccccatgcccattggcctcttcatcccacacgtttgctgagcgccattagtgggccagggtgctgtgccaggggctggggctacagagatgagtagcacagagctttgccctcagggagtgcacagtttagtgggcagagtcacatgcagacaaataattacagctgagcccgggcctcggtactcatcagctgagtaaggctgcacgggagctctgggcacctcatcaaggtgacactctcgggaactacatagatatcagaatgtcatctaggtcaccctcattcctcaccactgccctgtcctgctgagtgactgcagagagaggaatgttgagtccgagtctgttgggaatgtcccttccccaggccatagggagtccagggacagggtggagaaggaaacccagtcttggggcccagccccttgggccatcagaggccaaggcctaggcctgtcacccaggtagcctcccccgcctcgctctgcccctgccatcaccacaccccttagcctaacagagaatagattttatatcaaatcaggtcaagggactagggcagggagtggcttagaggggcctgaggaaggaaaatcctttagggccacactagggagacccagatgagcggggaaggaggaagaaaacacccccacagtgagtgggagtcctttgtcccccctccagtcccccgctcc

SEQ ID NO: 31384 - DNA, 1644 bp, Artificial sequence
  DNA replication origin
agtcacccttgcggccaagatcagaggctcgcccggactaaggggagacggactcacgagcaggggcgagcgctgaggctccgggcttccaggccaccgcctggccccgccctcgcaccgccccggccccgcccccttcccttcccgccccgccccgccccacctcctgctgcctcctccgactccctcccgcgccgctaagtttcttcgctcgccgcctcgctcagagccggggccgggccagagcggcgccccgctgccctgtccccgcgtgcagaccccgggcccggccccggccccccgccaagccatgctgtgcggccgctggaggcgttgccgccgcccgcccgaggagcccccggtggccgcccaggtcgcagcccaagtcgcggcgccggtcgctctcccgtccccgccgactccctccgatggcggcaccaagaggcccgggctgcgggcgctgaagaagatgggtcagtgacgggcaaggggcggtggggtgggcgcggaccgttcccagaggcccagtctggggcgctccagggagcagttcgtggattccccaggctgcacggggctgggaggctatggctaggggcggagggccagctccctccagctgggggtcgcacctggggtcatccgagggtcccggggcgagccgggcgcccagggtgttctttgcttcccaccagggggcgctcgcggggcgtctgaagcgcgaattcgggcacggggcgctggtggggtctccaaggagaatggagcgggagagggaggcttggggtgtccctcgtccggctccccagcagtatctaggttctgccagggtgtctcggggtcttggcagcccttaggaaggatgcgagtttgcggtcggcctccgcagaagaggctggcctccacagcagccctccaagccgcggccccacagaggcggccacagccacactgctctggcaggactggtctaacagcctacgtccgacagccaaggctctcacctcagatttggggaagtcagtcgtggagaaggaatgtaactgtggctcattggaacatcacagaggcagctggcactgggtgggttacacaggtggtgtcttgcaatcttcctcgacttcctaggtgggaggtgaatcctcatttcacaagtgaggaaactgactcagagacggcaaggaatttgcctatgaccacacagccaacaaagggcaaagtgtgactggcaccccggtggtgccccaccacatgggccctggtaccctctcagagtctgggaaaagtgggacccgcagggcagtggagggcttgaatgagagggtgtgtgcgagaatgttgtctgacgtggaaaggaccgcgccactgaagtgctgcgttggacctgccattggtagaatagtcagtgatggagaggctaggtgtggaactccggaacagaaggacaaggctgccagggaccccgtgtagaacttggggcagaattcaggggtcctgattgccagttttgccttcttgttacctcgactcattccacctgagcgctgactatgtctgggcgctgtgcctggcactctggttactgagacataggacaccatctctaccctgccatccattcaactgtgcatgcattggacaagc

SEQ ID NO: 31385 - DNA, 1355 bp, Artificial sequence
  DNA replication origin
gggaatccacgaactgctccctggagcgccccagactgggcctctgggaacggtccgcgcccaccccaccgccccttgcccgtcactgacccatcttcttcagcgcccgcagcccgggcctcttggtgccgccatcggagggagtcggcggggacgggagagcgaccggcgccgcgacttgggctgcgacctgggcggccaccgggggctcctcgggcgggcggcggcaacgcctccagcggccgcacagcatggcttggcggggggccggggccgggcccggggtctgcacgcggggacagggcagcggggcgccgctctggcccggccccggctctgagcgaggcggcgagcgaagaaacttagcggcgcgggagggagtcggaggaggcagcaggaggtggggcggggcggggcgggaagggaagggggcggggccggggcggtgcgagggcggggccaggcggtggcctggaagcccggagcctcagcgctcgcccctgctcgtgagtccgtctccccttagtccgggcgagcctctgatcttggccgcaagggtgactagagcccccatgctgcggggctgggggtgggagccggcaccggggacgagggccatcctctggcacagacaccctctccttcccgggggccctgactcgaggctgacgcaggaccccctcctccttcccttccgcgtccccgtcgcgccgcaggcctcagcagggaaccagagccgggacaggacgcagggccgggagcgaaggcagaaccccgggagctgagccgctcggggcagcgcgaacccgaagggatgggcatgggggtggggaggttggcagtgacgtcataggattaacctccctgtgccaggccaggtgctgccccctcggagagccacagtctcggagctgacggacctggggagcgtgaggcggagccgagcctggagtccccagcaactggttctgggttcgaggcttggacaggccggcaccccagcccggcacccgcggtgtagttgtccgcgacgtcaacccgtgggtgggcatccgtgtgcaggttctggtggccgagtcgggtgtgcacttactatttatatgcaagcaccagagtgcgtgcgcgaagtgggggacgtccaggtggcagcgtttctgcggccggtggcctgggtccggcagagacatgggcgcacaccgccactttgcggcggccagcggcgtggcatcctacagagaggctagtgctcagggcctgatttgccacctacttgccctgctctaccccatcctcagatctcccaggcccagagattctgcacactggcttgggtccctacgccactctggggtcct

SEQ ID NO: 31386 - DNA, 2096 bp, Artificial sequence
  DNA replication origin
tgtgctggacagagggaggccaaggcttctggcccgtaccccccgacggcgactgcacgcgggcgctcggcccaccccgacaggggcttccaggcgcgcagggccctgctccctactcagggcggggcgaggacgaggctctcgctgggccttggcctcccagaaaatcccctgggaaggcccaggcccggaggtcaaggtggggcaccgggaactgaggcagctgaggagggggcagcggacatttctggggccgggggctcggaaccccatctctacgcccggggcgcggagctggagcagccgcggtccgctttgggcgggggccaaaccagctcctcggccccgcccagccgtgctccgctcctccccgccacccccagctcgctcggaccccgcgtccccgacggggcggcgggctgggccgcgccctcggccccccgcattggccccgccttcccaagggcgccccgctcccagcccgggccacccttggttcccctccctctcccctccacacagaggcctgttttcccttcgcttgcccggggaggagggaaaatattccccattcagaaacaccaaccgctggcttctttcagggccatcaggggggcattgggtggggagcaggaaagggacttgtgcctcgctcgcgccgggccccgctccccgctccctccgtaggggaccagacagcagaagattctggttttcttttatttagtgaaacattcctttgtaagtgaatcttcaatgaagacgtcccgagtgtgtgtgggggcggagggggccggcaggggaggaaagcgagcaaactgcgctcatccccctcccccggggcctgctcactcctcccaactggtccgggcctcctggcctccctcccgcggcctcccagccaatcattcttccaggccccggcccaagtcccaacttgctcaagagctcaacctcctcggggagaagcaggggtgggaaaattcgggtgacccagagactggggaaggcaggggctgagacccgatcgccccgcccccgagtcacggccaacccagcaccggggacgtgtaccacaactgcagcctcccaggggagcctggggtggttgcggggagggaaggaagcgtccctgtgaagctgcagggaggggtggggtcttatttgccccccgcgctgctttaggggaggaggtgcgaaggcaaacactgacaggacggggaattttgaatgctgttcttctaaaccctaggaaggctcagggcacagcaagatagtctcagttggctgcagagacccctccactgacagtcacctcttttgggtccgaaacattcggaagagccactggacgacgaagggccacaggaggaagaagagcagcgcgggccccgggagcccaaggggccatggccgagcactgggcctgggctgcggcctctgcagccaagagggagggagtcagaggccagtccaggcctcagcacagcctccctaggaacctgcttccaattcagtggaagattggaaagaccctgcccctaagtctgcaccactagaaaggaagtggcccccaggtggtcctgacaggttgaatgccaactccctcccacatcttcctccccagggcaatcccagtatcaagagaggctggcggggctgcgggtagagggagcggcttccatgccatcttctctgggccacaaagcaatgacccttggtatgacctgaagacctgtgttgttaaggatgtgccacatatgtcaaatgaggaccctgggtacctagattttagtttccaagtatcattctccactaaaaaggagccaaggctccttggagaagtggctggttccaggcctggggcagggaaggtgggagtgaatgtggggcgccttgtaccaggaaagcaaggtcgcttttaaagattcatcaggtcgtgttataagaacataagatccggtatgaaagggtcttgaatggccaaagttgtgactgtctgagcataaaaaagaatgactgtggcagaccgggtgggatggctcacgcctgtcatcccagcactttgggaggccgaggcaggtggtcacgaggtc

SEQ ID NO: 31387 - DNA, 1221 bp, Artificial sequence
  DNA replication origin
agggaaaacaggcctctgtgtggaggggagagggaggggaaccaagggtggcccgggctgggagcggggcgcccttgggaaggcggggccaatgcggggggccgagggcgcggcccagcccgccgccccgtcggggacgcggggtccgagcgagctgggggtggcggggaggagcggagcacggctgggcggggccgaggagctggtttggcccccgcccaaagcggaccgcggctgctccagctccgcgccccgggcgtagagatggggttccgagcccccggccccagaaatgtccgctgccccctcctcagctgcctcagttcccggtgccccaccttgacctccgggcctgggccttcccaggggattttctgggaggccaaggcccagcgagagcctcgtcctcgccccgccctgagtagggagcagggccctgcgcgcctggaagcccctgtcggggtgggccgagcgcccgcgtgcagtcgccgtcggggggtacgggccagaagccttggcctccctctgtccagcacaagccctgtcgtccgtgggccgtcttggctcaagcctcggtccggcctgtattcagtggcgaaactggccgctctgagggccgcctggtgccagcgcctccaagtccactggccagggtctctaccgcagtcccccgccgctgccaccacctgggccctaggaccttcctacccctgggtaaggaagaggcagttctgaaggcccctggctgagatccttaaactcctgagttccctgtcagcctctagtctcgaccaccgtcccaggcttcgccatcattggccccactggaagccacagtcactctttagtcgtcagtcctctcaaagccgggaaggcatccctgaggctagacggtgcgctctgcacctgcacggctcagcccagggtcacaagcacaggctgaatagcccctgtgataaggctggactgcagcaagcaggacagacaacagcagggccaccttggtgggggatgcaggcctggagctgaagccagctccaccacttgcacagtagctgtggaacttgggtaagatattttttttttttttttttttttgagaccgagtctcgctttgttgtcaggctggagtgcagtggcgcgatctcggctcattgcaacctccgcctcccagattcaagcgattctcctgcctcagcctcccggaagtagctgggacta

SEQ ID NO: 31388 - DNA, 1949 bp, Artificial sequence
  DNA replication origin
cgggcgggggcgagggggcagcggctggcggtggcggcgggggtctcggcagcggggggcgctcggctcagcggcgcgcaggggccggagcgcggcgtcccatcggggcggccccgtccgtgggaccgggcggcgagctgcagggttgggggaggaagtcaggctgcaggccgccggggccagagggctgggccgggggcaggaagctgcggcgctggctcccccctcggcgattttcgaacttctgctgtcgctccccgtgcgcgcaaaccgcagttcgccgccgccgccgccgggcacccagccccaggggggcgggctggagggagggggcgggcgctggccgggggacccccgcaaccatggcgggcggggagtgggctgccgagccgcttcacctgccgcagagggggcggccggcgccgcttcacctgccggagcgggaggccaccgaggcgaggccgaggcggcggcgcgctcggcggcgcctccgggtcctagaaccgcatcctcccgctcgcctcgggcgagggattggccgggtctgggtgaaggggatcacggcctggggattggaggggcacatcttctccgcaccgaggatctcagcgactgcgagcacggctcggagacccacggtggtgcagcgttggggcgccagggctgcgttcccgtctcgcgtcccggactgagaaggtgggaacccccttccaggccccccaccttttatttctctcctcccctgcttagcccagagacgagctgaggacgagggggagccatctccaaacaggaactcctaaacagggtggggggcgcggacgcaggccagtggagacccccgccacctgtcccacctcgaccaaccgtgcgcctgtgcagggcacccctacaggttttagaatgggggcacctatggaatatggcaggctgcgagaagctgggcccgccaaggtggtcccaaggaggagtggggggttgcggaaaggaggatgagagccagccacaaggctggaaaaggagtgggcaccgcagaggagggaaaaagaatcttgacactgtcaccgccagggatctaggggggcctcttaccttggagaataacaatctctgatgtctgctaattacagaaatactttcagagctctttcattcatcctgacaatggccagagaaggtaggtattggtagccttattttagagatggggaaactgaggctgagagtaggtaagtaagctgtccaagggcactcagctaacaaaggacagaagcaagcctcctcactgtctacctccaaaacctacactggcttggagttgctgtcctggccctccactgcccatctcatgtaggacgggagagtatggggggctggggtcccatctatagcctgaatttgagactttcagttgctcctctcattccccatttaatttgtggggatccccaactgacccctccctacacttccagggcactgaggagggagggcccgctgaaggagccccgaattatctctaggccaggtcaggagccattagtgtcccctcccctgacagcatcctcctccttctgccctcacattcagagccactgacaagactttaagcaagagacggagagttaacatctaatctggaggaagaccctggaaggagccagccccttcccccaggctgacctggtttaagcctttcttctgccaaggtcaccagcaccccagatgggtgagagatgtgatcactggtttcgtggcctgaccaaggacctccaaggtgagtcaaagcagaattctccttgggcatgcagggaaaatgatccattccctgcacactgccatattctccttctcagacagaccagagccttgcccttgggtccttgcccttgagattagctaggacctcctcctcttcttctccttctttcttcttcttcttgtctcta

SEQ ID NO: 31389 - DNA, 2337 bp, Artificial sequence
  DNA replication origin
gccctctggccccggcggcctgcagcctgacttcctcccccaaccctgcagctcgccgcccggtcccacggacggggccgccccgatgggacgccgcgctccggcccctgcgcgccgctgagccgagcgccccccgctgccgagacccccgccgccaccgccagccgctgccccctcgcccccgcccgggccgggagcctcgtccccgtcccccggaaagctggatttccgaggctggaggcgcctggccggctgggtggggaccaccatgggcaacgcggccggcagcgccgagcagcccgcgggccccgccgcgccgccccccaagcagcccgcgcctcccaagcagccgatgcccgcggccggagagctggaggagaggttcaaccgcgccctggtgagtgcgacccggaggcgggtcgggcgcgggcggggggcggcaggggcgcggcaggggctgggcgcgcgtccccgcccccggggactcaggtgccgcttggagatccccggtccggcagctgccccctccaggaggtgggagcgacagtggcctttttttcagagtgacttagcactctccccccaaaactttcttcagttatcgcccggtctccctccctaagacgcctccaccccagctgggtcttaaggtctaaacaagtatgtcctgtgaagaagttgggagcggggcacgcacaggggtcccgggtcgcccccttccccactgcacgcaggcccagccaccgggcgcgggtctggggcatctgcctttctgtgtctggagtcaaagatgaaagggttacaacctcccgggagcgggagacctgctggaggtgttgggtcctgatttgttgggcgcctgggctgcggggaatggggttgtcggatcatggccaggaggtatctgtgtttctaccccgccatatgtcagagccagggtgcctgtgggtctttatcttggggcatcctttccaagccactgaagggagtaagatgagggagggtggggtcaggacgggtgggtcgcccaggctaggggtggagcaaaatctggaaccacccccctctgtgcctacctggggaattggagcggggtcgctggggaataggtctctgggagggaaccagcagctcaggccgagcctggaaacagtcaacatgttcagtggggtgggggctccagagcagactcaggggtctccaagaccctgcataaggcagaagtagggagaggaagagctgctcactctcactctccccacccccgacgccctggccctggctccctcctctaactaattgcctggtggcctgcctgctgtcagccttcccttgctggacgctgggtgacaggcaaaatgaggctgtgccttctcccagatgcatttcccagtccctgcaggtctgagggtgggggctcaacggagacacaggccgcagagggttctggctcagttggtggccctccatctccttgacatcatttcccctcgcctggctggtcattaggccatacgtgctagatcctcagcatggctccagagggtcacctcctaacagttcctgaaaatgttggcttctgtcctctcccaagagaaggctggggggagtttggaggagctatggggtggcgagggatccatccttgtgaagacaccttgcttgattagaggagggcagggacactgagggacgcctcacaccaggctggcccctgacttctccatctctccacctgccctgctccccgctccccaagcataggacttcacaaagctgagctgagctgagcagatgggggaggggggagaatgaggagacacagtctctgggggccatctggagagcctgcattggtggtgggtccttggacccctgccaacctggttggagggacatgggtctgtctttccgccaagtgtgtgtctatggtcgcgggtgtgggctcttggggtgaggtcctgaccccaatcttctgtttagcacgctgatggggaggagccctgtgaataattcagaccaggggaaaatccacaagtcaaatggtgaggttctgatgtgtgtgtaggacttgtttgccctgcttggatttgtggctgtgattggctgagtctgacactaaatgccactgggagtccctgagtaccaggatgtggaggggggacacccacaggtgggtcagagagggtgtgctggtggagaaagtggaggtgcctagcagaaatttagggtagcagcacccaccagggcttaccccctaccaggtgcccaggaaccccagtgtgtttataccttcttcccggggtggctcagcctgtcttatatcctgttgtgggc

SEQ ID NO: 31390 - DNA, 1478 bp, Artificial sequence
  DNA replication origin
gtcctgtcctcggtcagtgtctaagaggagaagaaccttagattgctgaggggaggggcccaccgccatcagtggtccccagtctcaatgggagaagcacagtcctgccctcagggatgtagtccagcggccccagggaacctcttccttccccttttgtccctggtggggcataggatcctgataccccaaactctccttcctctcctggctgtaggacctctcttgtgggtgaggggtgtccccacttacagccagacaggaggtgcagggagcccttctcccatgcaagggtgggtggtggggggctacctttccaagaaagctgtgaaagaaaggggtgccccctgcttaaaatgggggtggagagaaagagcaggttgagccagggtttccggctgctgccttagcaacagcagaggagcgatggctgcccagccccacgggcctgctgtgatggtgggaacaccagccagcggggcgccaagctctcgcctctcctacgcccatgcccaaggctgggtgtcttccagccccttcatgccttcccctgggaggcacgcagggtcagggactgggatgacaaggcgacctttccaggcctgccagaagagccacacttacacctgggcctgggacacccctgatctgccgggcagggagaatcccataaccttggggcagagggatcaagggaaggtgtcaggggtggtgtacgtgaggccaaaagccatgctggcatccagtagcagtggagaggaatttgcctgatgggtgctcttggcttgtgcccagaggcctgggtgcctggccaggctgtgtggggaggtcaggatggccccatgttgggtgtgggcctggagtcctgcttgcagctggggcccttcccttctggggctggcagtaaagggcaggagggactgcaactgaggcactgccccctggccactcccacctccgggacagggcagatgaagtgtggggacctggagccatggggtcgctcaggccttatgcctgccatttgcaggacagaggatctccggggggatgtggccatgtggtctgatgttgggctgggcagaggggaggggtgacattcccagcaggcagggctggcacatactaaccctggaaagccacggatgtggtgggcatgattcacagtgacatctggggctgactggcagagagctgggtgagacgggtagaagcaggtgctctcagggctacctctgcctttttcctgggaacatggagccctggaaggtggcttggggggcctttgaggggacaggggttacttatgggaaaggcagggacgtttcctgagctttggggtcatgatgtttgggggttgagattcatttttgtcactacctgcatggccctggacaagttacttaacttctctgagctgtagtttccctcacctgtaaaaagagaataataatggcatctgctggcctcctaggatt

SEQ ID NO: 31391 - DNA, 939 bp, Artificial sequence
  DNA replication origin
gctgggtcagcttcagaggagctggcagagctggttcaggctggggcagctggggcctcgcactgtcactgtcctcctgctgagcttcctgagaaacctctctggactggggaagggagagggcgaccctggggttggacatcttcacctgaccccatgggagggagggaggaaggggcgggaattcctgcccttttgccttgggtccagaggagctgcagttgaccagcaactccccaaggccagccactttggacccctgctttggtgctccgtccaggtgcctggactcacgggtcactcagctgtccccacccctccagcttcaagggctgcggtcggccatgggccgaccctctcccagcgctgggctgggtggggctcggctgccgcagggattctgtgaaggagggaggctgcagaggctgggggtggggagttgggagctgagagcctcccctgggagccaaggctgggcctttgcctcctgctaatgaagcagatggcctgagccggctgggcagcagtccaggggtaagggctgggaagtgggaagagggtggagagctgcccctggagtctctggtaggggtccccttggagcagctcagcctgacatctcagaggttgggggctcaaagggctggaagaagtgaaagtctgaggggtggctcggcgaatctgaggggtttgggttggaagggtgggggcccctctggggaggggtctttgccgtggtccctgcctctttgtgtgagtggccgctggagcctgcagtggggtggggggattaggaattgcatcactgagcacaggagaggagcacgcaggttcctgccaacgcagatgtgcagggcggctgggtccgagtcctacccaggtgctgggtccccttcacgaggcacctccagccgtccttccccgccgtatgccagctct

SEQ ID NO: 31392 - DNA, 845 bp, Artificial sequence
  DNA replication origin
ctttgtgtgagtggccgctggagcctgcagtggggtggggggattaggaattgcatcactgagcacaggagaggagcacgcaggttcctgccaacgcagatgtgcagggcggctgggtccgagtcctacccaggtgctgggtccccttcacgaggcacctccagccgtccttccccgccgtatgccagctctggtccagggagggcaccacctgctggctagactgagttccttcccaccccagggcggggcctacggcaggactgacccctgcatagtccaccccaaagctgtgtcagggctgtggcctgggagcccatacaggaagggcaggctaggcctaggccaggggtttttaaagtggcccgatgctagctgggcgtggtggtgcacacccgtagtcccagctacctgggaggctgaggtaggaggatcgcttgagcccgggagtaggaggctccagtgaactatgttcgtgccacagcactccagcctgggccacagggcaagaaaagagaaagataaaagaaaagaaaaaaaaagaaagtggcttggtggactgtttgggtttatacctttggtatttcagaggcgtcttaagaaagcctgggacctcagatcggagctgagaatgggacactgggacgagaactggtcatttgccctggggtagctctggctggttttctgtacaccccattccatctccccaggagcggtttcaagtcaagaatccccccgcagcctacatccagaagctgaagagctatgtggatactggtggggtcagccgaaaggtagcagctgattggatgtccaacctgggggtacatgtctcccctctt

SEQ ID NO: 31393 - DNA, 907 bp, Artificial sequence
  DNA replication origin
cggaacttagtctggatgggcttcttggccttcactcctgggacgggggtttgggggcagtggtgagcactgggggtactactggagggaacctgggcccagggagggctgatggggcagccaggaggcagcaggaggcccccaggcagaggaccctggaggacactgaggcccaggcccctccctccatctccccccagccccgggcccaaggtggtccactccactcacctgggcccaattctgagtcgcgtcttcctagggcatcaggaggacctccgggaggcggcggcggcggcggcggcggcggaggcaccggcccgtcagtgcccggaggtggtggcggtggcgggggtgggggcggcaggtctccgggcagcggcggcgcaggcgggggctccgggctgccagggagaggcggggcctgtgggggcgcagagggcggggcttcctgcggggaggggaggccgggcagtgggggcggcggcggtggcgctgctccgggagccggctctgctgcaggtgcgagatctgagccagcgagggcgcggcgtgggggaggcgcgagtcagctccttgacttgggtgggcccctctccgcctctccgctctacgcatgcgctcctacctgagccgagcctacaatccaaacctccctcgcccaactctgcccgccacagatgcccctgggctcccctccagaccctgccccgcatccccgccagcctgaagctcctgcgcacctgggctgggggagccggtcggcacccccggagtcggagcatcaccgccgctcggagttgccacagcgacggggaggatctcgatggagacagcatcccccggcccccgcagaatacggattaaccccttctcctccagctcctccaccttcagctccagggcc

SEQ ID NO: 31394 - DNA, 1848 bp, Artificial sequence
  DNA replication origin
tgggctgtgtccgggaagttgcccaggaaggtgagtgtggtcatgcgctccggcaggcgcgggatgcggctgaagcatagcatgaagcggtcctcctctgacagctcctccattggccgctgctcccgctcaaagcgggtgatgaggctgcgctcatactctgtgggcaggaagcgcatcagcagctccaggaagtccaggcccagagcctgcaggtcgtacctgtgagagggaggagaggggagattgggcatcatccatacccaccagtccctgggagcagggctacccctgccttgattgaataaatgaatttcagtattttctatttgccaacagcttcagagagcaagaggtaggaatccagagaaactgggaactgggaatccagagaaactgggaactgggcagccagggtccccatcgtacgtcagcggcggacgcccggctgtaaatcccacagcctgggtgctcacagctaggcaaagaggcagggaggaagtgggacatcctaatttaggcatggactgagttttctccaccttaaaatggggacaagtttcctggaccagggttggtatgaagcctgatgaaagagctcaccattgaggctcttttactaggatctgcctgacaaccccagcctagcaaaggggccggactgcccacaaacccaggacagggacactcacgcctcaatggcttggcagatgcgctcggcccccaggttgcccttccgcagggtgatggccaagttcttggcccggttggcctcaatgagtgtcgccttgctgggggccttctgggctgccttactcttgagagcgctgaggtccaggctggggccttgggacttggtcttgaactgttcctcaaaatcactcatgtctagctcctgaaggtacagggtgaggaggcggagctgggtggggctggggtctggcactctcctggctgagcacagtgctagagccatccatctggccctgaccaggccaccagcagagaaccagtaacccagcctgaccacaggccctgatgggaggcacaggggaagcacagggagcctggaggaggagggccgcctaacccgggggatccagacttggggccacaagagctaaaggaagagctgaactggccagcggtaaaaaggagaaaggaaaagacattccaggcagaggaaacagaatggaacaatggcctagaggcaagagaatacatccttttggaaaactggaagtggaatcaggagggctgaagccttggctgcctgtgggaaagtggaaggaaagaggcctggaggcagaagaagtggggtgaggggaggcacccctctgcagggatggaggggaaggcgtttgggaaagcaggattctgcctgttagaggtattggtccagtctggcttaatgcccatccctgggcctccccctcctcatctgtgaaatggcttggagaaaatgactacccccagggcccagcctgatccaggcaactcccctcttcctccggtgcccacatggggagccaggcagggccactcacctgcagcaccttctcatcattgagctctgtgaagacagtgccggtgatctggctgggtttcagtgccacccagttcaagagtggcattcggaacttagtctggatgggcttcttggccttcactcctgggacgggggtttgggggcagtggtgagcactgggggtactactggagggaacctgggcccagggagggctgatggggcagccaggaggcagcaggaggcccccaggcagaggaccctggaggacactgaggcccaggcccctccctccatctccccccagccccgggcccaag

SEQ ID NO: 31395 - DNA, 1501 bp, Artificial sequence
  DNA replication origin
taaagcgtttgctgagcggaaacaggctgcgggtggctgcggcaggcatggagccgacgcggatcttttgcaaacatctttattaatctcatataaaaataaggtccatggacggtcctcggggctggggcttgcgggggcgaggtgcactttataagttacaggccaggctcctgctgaggctaagtatggctatttggagggggctttagggtgggtgctgcaagcagcatttgggggaaggggcgggcgatgctgccctctgtggccaagaggaggatgcaccagcccgtttgaggcgggccacagcggaggaggggctgcccggccagccgagctgaggaccaccttccttgagcctcagcctgtccacggccccacacccctgcagaatccacctgcagaaatagcggctacagcgagaggtcggaggtgacctgcagtggggggcccgggggacgccgacgggcactgcggcggcctgtgtctgcgcggatgtagggctggttccgcagatctggcagccgaaggagacacatttaccattcaggagtccgcccagagctgggagcatggctccagggcacaaagcttagcctcctaaggactcagattgtgtgcacatggcaggggtaccgtttatgtttgccagacccctccaccccacaaatcacatcccagccatccactggcccaggagaaggcagcatgcctcagttctcccaagggtcccaggggctgtgggcagcgtggtatcagaggccaggtcatctgggtacctgaggggctagaggggcatctcttctcccaggctggcctcacagaggagccgggatgtccgcttgccggtgcgggccgtgaagggcaccgtcttgatcactgagtgggggtggggcaggtgaaggggagtagagaaaggaaaaaggaaagaaaaacagaaaaggtagcaagaagcagtgtggcagccagtcccccagaggatagcgcattgggtcagaagaaagcatagaaggacagactgaggataagaccaaggcctggccaagcccttacctgtgatgatgtcttcaatggccccatcacggtcgctctcataaatgagtggctccttctgctgcctccgtttcagctcagagatgaggtccatctgtggccgccgggcctttggcggtgactagggggaatttatagctccagctccaggatgcctccccatcaccaaaaccctggaatatctgcctggtcccccacagcaaggacagctggcttgagcagaaagaaccctttcccatcccaggctcctggggcagggtcagtctgtaacagtgagggtgtgggggtggcaccagagggtgatgagatgccatgcatccctgcagcccagtaccaagcccaggagcagttgcctaccttgggtgctgggggctcccctttgcccggggtatcagcgcctgcctcctgggcagcggcttcttttttccactgttccacctcctgctca

SEQ ID NO: 31396 - DNA, 817 bp, Artificial sequence
  DNA replication origin
tgtctcggcctaggtgagagccggcgggcgggggagggacacgcagtgaggggcgggacaagtgcccggaggacagacagatggggcgacactggctggtggaggggaggggcaggcgaggagcgggggcaggcccggaagaaatggggacccggcaggcggtgacggaggcggcacgcgcggagatgtaaggcgaggtcacttatggcgtcactaagtactgggtagggcgaaaggaaaaggggccagatgcccgggtgggaggcaggactggcgcaaatggggcggggcagccggaaggagaactgctgcggggctggcccggcgtgtctaaccccagctgcccgctcgccccctccggcctcccgcagggatactgggccagccacgaaagcctccgccccctcgaagcgggctccctcgccgccaactctagtgaagaagcagcccttctccccggcgcccgctggtttgcagaggcctgctatgaagagcttgtgcaagtaaagcgtttgctgagcggaaacaggctgcgggtggctgcggcaggcatggagccgacgcggatcttttgcaaacatctttattaatctcatataaaaataaggtccatggacggtcctcggggctggggcttgcgggggcgaggtgcactttataagttacaggccaggctcctgctgaggctaagtatggctatttggagggggctttagggtgggtgctgcaagcagcatttgggggaaggggcgggcgatgctgccctctgtggccaagaggaggatgcaccagcccgtttgaggcgggccacagcgga

SEQ ID NO: 31397 - DNA, 918 bp, Artificial sequence
  DNA replication origin
tgtcctgcgttccgggagcgccaacccctccaggttaggaatctgagagtacgggctgcgcgcacctggggcgggtgcctgggaggaggtggaggaggagacggtcctcagaacgggtcctgggggtcggaggcgagggcgggggttgtaagtggccgggagaggtccctcccgcgggtcccggcgccccccgccccgtcggggacgcacctacttcgtgcagtttgtgcagcgagcgcgccagctcctagttggagaggtcgctgatgcgcgccgcgtggcagaaggcgagccccgcgtgggagcgccccccaacccccgcagcctgggctgagccgcagagcccgctgcttcttgaagtagtagcttggagaagagaggcggggcggccgcctcagacactcccagccctctctgtctcacaggtgcggaagccaaagcagggccggaagccgctgctttgtctttgtcctggggcgacttggggcccaggaaacagactcagaattcagggctcccgtctctagggcaggaatatcaggggtccctgcggggggcagggtttgctcctcccattgtgggcccaggagctggtatggttgtgcccacctcatcaccccccgtgccaacttggagggcacaaagccccggcccagcagcttgaacagcatttccaagaacagggtctgcagtccctgggggtacagagctggctgttcctcacccggcttgggggcaaaaaaggtgaaggagggtgaggagggggcaccccctaagccaggcccacccctcctccaccagccttgcccctcacccatgcactgagccaagcggtggttgtcatcgaagacacccaggaagtcaatgaagcttacgattccatcacctggggagagaggagagggggtgctgtgggtg

SEQ ID NO: 31398 - DNA, 925 bp, Artificial sequence
  DNA replication origin
gtgggcccaggagctggtatggttgtgcccacctcatcaccccccgtgccaacttggagggcacaaagccccggcccagcagcttgaacagcatttccaagaacagggtctgcagtccctgggggtacagagctggctgttcctcacccggcttgggggcaaaaaaggtgaaggagggtgaggagggggcaccccctaagccaggcccacccctcctccaccagccttgcccctcacccatgcactgagccaagcggtggttgtcatcgaagacacccaggaagtcaatgaagcttacgattccatcacctggggagagaggagagggggtgctgtgggtgcctgccccctgcagaaggcctgccttgcacatgcctgctggcagttccaggtgttagagaatctagtcctgcctctagccaagggcagaccccagtttcaatgggggagaaacggcccatgccttgggggttcccaaatcaggattaggatgaacacagcagcaacgtttacaggccatgagataggtgtgttggtcagggcaggcttcctggaagagggaactttaaaataggaccaggccaggattttgtgggaaggggaggcattctttaaaagaatgcctggaggtgggaggggacaagaagacagggttggggcacccaccatccaagtctgcctgccgcagagcctcgaacgtctcctgtggactcagctggatacccacattgcccagggcaactttcatgctgtgcatgtccacggtgcctgttgggctggagctgaagagtttgaagatatcctggaaggctgagggtagaggggacaggtggcaagacgaaccacccacacaagaaccctgagagctgcccactctaactcaggtggaactgacgacttggctcattccaactccctcctgggt

SEQ ID NO: 31399 - DNA, 801 bp, Artificial sequence
  DNA replication origin
gagctcagcggtcggcggccggcggcgggagatcgcgggcgagcggagcgcaacactcgcttggttggggagatcggcgcttggccggtaggtgacggggcgggaccctggggcccggtgcgaggcgaccagggagcggctgggatggatcgcctctcagccccgggctgggctgcggcctggcccctcgccccggagcagtggggtcggcggccaggccagcgcagtccgacgtaccccgtccaacccactcgcagcggtccgcgggcgcgccctcgcacgcgctgccggtgccgcgctcgccccgggcctccaggccgcgcactcctgctggccacacgctggctccgagcgcgcgcaggggccgcctgcttccccttcactagtgccccgcgccgccgccaggcccgcccgcctgctctgcgccccagtgcccccaggatggagctcgcctgccgcggggcggacgtgtctcctgcaggagtgcgccctggcatctgccctggcgtgaaaccctcccggcctttcatgggaagttctcaggtcacacctcaaggcggggagcaggagctaagcctgtcctcagcatgcagcggggcagtgctggccgcccgcagcatcctccctccgccctcggaccccagtcctcctctgtaattcttctgggctctccaactcgggactttatctgtcggttcaaatataacattcccatcttggaaacccatcgtggccctggcatcttgcagccactgggcaccaggcagagaggggccacttgtacgtacgtttcccacctgc

SEQ ID NO: 31400 - DNA, 1034 bp, Artificial sequence
  DNA replication origin
aggtccagacagaacacacccagcttagttcctttcttttcacataggcccaaaggttggatgggtggtagctgaaagaactgattttccccctacccaggctgtactctggtgtgggaggagccttttctggggaatgaggtcactcactggaccttgagcaagtcacactgctgctgcaggcctcagcgtccttgtctgtaaaatgggatggtgtgtggaactggtgcatgccgagcggcagatgcaaggtgtgcacttggtgaatgggaagaagccttgcacagaacaccagtgggtcaaggacagcagaggcccgggacccccaacaggaaagcagatgaaactggcccacagccagcctgtgagaggctcaggcaggaggtcatccctgaggcctgaggaggatagcttcagcagcccacactgaaggctgggtcagtcctgtttccacagtggggaagtgatcagagctgcctcatgactggcacagtgccagcacagggccagggcccacagggtctctgtgaaggcctccacgaggtgagggccagaagcagccaggaagccctccatcaaactcctcctcccagcacctaccattccagaaaacaaactctcacccccacacacgctatcgcacacgcacagtaggcgcgatgcaacagagaaaaaaccgaattaacccccaaacaggacgtgacgggaagggaaggggggatggggagttgggaagaaggaatcacattttgcaaactgcccactaggggtcaccgtaccctcagaaccgagggtgcagaagtcacaccggcctgcggctatgcgctggcggagggtcccagagagaagaaggcccggctgcgtggcctccgccgcccagcttgtgtggcaggaccgcggccgccgccccagtcacaggccagcagtcagtgcggcgggaagatgtccgcgcactgctgcaggatgagctccaccacctggttctggaacaccatggtcatgggcatgctggtctcttccacctcgggccgcag

SEQ ID NO: 31401 - DNA, 1192 bp, Artificial sequence
  DNA replication origin
gagttgggaagaaggaatcacattttgcaaactgcccactaggggtcaccgtaccctcagaaccgagggtgcagaagtcacaccggcctgcggctatgcgctggcggagggtcccagagagaagaaggcccggctgcgtggcctccgccgcccagcttgtgtggcaggaccgcggccgccgccccagtcacaggccagcagtcagtgcggcgggaagatgtccgcgcactgctgcaggatgagctccaccacctggttctggaacaccatggtcatgggcatgctggtctcttccacctcgggccgcagcagcgtgggcccgaacacaatggccacgctctgcaccgacatgcggttctgctcgccgtgctcgatcaccctgtggcaggggtgggtgggttcagggctccgaactgcgaactgcggggaggcgctgggggcttcagccgggacctgcctcccccttcccgcgcgggccgcccggctcaccggcagaggtgctggaagagcatccgcagagtgtcgtggttgggagcgggcagcgagcgcaccaagtcacgcacacagcggctgcgccgggcctggtcctgcaactctgggtgagggaaggtttagagggagggagtcggaacgggaggtagggggtatcggctgggcgaggggagcctgctaaaggggtgccccgccacgcccctaccccatccgccccacctgccccaggtgctcactgatggccgcaatgaactggcggaagtgcgagaaggggaagaggggctcgggcagctcccgaaagaagagcttcagggctccggtgataacgtggacgtcctcccagcgcccgtcatccaggtcaaggcgctcatctgtggcggaggaagggaggaggacggaagggaaatcagtaccccttgcgccttcaggccctggggcaggggttggggacgggcctcaccgtggtccaccttatagcgtagcttctggatggtggccaggtttccactgatgcggtacagcccgtcgatgtccagccctgggccagagggaggcgctgatcccgggttcagggatggggatagggtggggctacgggtccctgctatgactcccactcggggcctcccgtactttccccctggaccctgcgtccatccaggggtctccagcctgcggtcctggcaggaggcctgcgggc

SEQ ID NO: 31402 - DNA, 1414 bp, Artificial sequence
  DNA replication origin
ccaagacttagcctggggtgaggcccttgctccattaagctctgagtgcctgggggcagggacaggtcacctctatctctgtacctacccccaactagggccaacccccagggcagacccagggtaccagagatgacccactgacttgtgtccctccagctacggagccgagatggctctgagtacctgatccagcacgactcggaggccatcatcagcacctggcataaggccattgctcagggcatccaggagctggtaagcagagcccagggcctctaggggcagtggggagggggtggccattatgagtggggccctctgctcaggctcagggagctctaaggtaccagtgggtaatgcaaatgcagtccccactaatggctaggatggcagggtaggcggctgaagaaactgccttctgtaagtctgtgaatccagccctggggttggccctgcaggaagactctccaggtgagggtagggcacattctaaaggaagttcccatttcacgggaggcagaaggccaaataaatactctgcaagccaaccaatggcaggctgaaactagcagataaaattttaaaggattgatttcaatagtcgaccatttttttaaggctgaaaacaccaattgcataagtagagctaggacaggggccctctgacaactactgacctggaaatgacctggggctttttgacccttaattccctatgagccaacattgagtgaagcttttggctgtattaatagaggtaggaatccagagccagagaggtgatattggtgcagttgttggcagtgctccggccacagctggaggtgcaggctcagaactgggagccacgtattgaggaatgctgacccagttagaggagctgaggaaaatagagaaagaaggcaccaggtgggtaggagtccccaggataggaaggggtgtgggagaacaggatgactgtctctgcaccttaagggctccatgcagctaagggaggtgaatgttctcaggctcactggtggaggtaaggagagttaacctggttaagggaagagaggactcttcgctgagggtctccaggccatgcctgttgggagtgcatttcgggtcccttgccccatcctggaaggacccgcagctggctcaaggccccgcctctctgaggctatgggaatccagtccgcagagctgcccccagaggagagcgagagcagcagagtggacttcgggtcgagcgagcgcttgggaagctggcaggagaaagaggaggacgcgcgaccgaatgcaggtgtgcgcaaggcaggatggggtgggggctccaggaggcctctcctggggagtgacggttgctggggcctgcctggcctgccctggcgctgcctcctgactcagtcctgcctttccccgcggc

SEQ ID NO: 31403 - DNA, 1134 bp, Artificial sequence
  DNA replication origin
ctcgaccacatccctgatcatcagctacgccctggtcacgatcatggactttcccattccccagggcctggcactgaccacccatccaggctggcattcagtactgatgcccacccctccctgtactggacgcagtcagctctaggaagggcagagaaaacaggtctatgggagctaagctatgaggatgcaaaggcctaagaatgatataatggattttggggacttgggagtgggggaagggtgggaggggggtgagggataaaagactacacattgggtacagtgcacaccagtcgggtgacgggtgcaccaaaatctcagaaatagccactaaagaacttattcacgtaaccaaacaccacctgctccgcaaaaccattgaaataaacattacaaaaaacaggtctagagtgaggtcaactgctgaggcctgggaagaaagtgagggggcaggtgggcttgtcctggggcccatcgcaggcccctgggcgctgaagggagccaaggactaagaggtgagagccaggcacaggctccagcgagacctgaagagatcatggggcctgcaggagagccagggggtgcggggggtgggcagggagatctctgggtggacagcaatgtggggtgagggtgggagggagatccaagaagctgctgtctcctaagtcaggtcctaggcaggcagaggggctcctgggacagcctggggctgcaggtgagtcaccgggagggaactgggtcaggtgtaaagaaaccagcagggccaccccagggtggctgccccacctgggggttgggggtggggggtgccggaggagggagtacgagcaaggggctagctagagtcccttcaacttggcctcagcttcctgctgttaccaacaccccttgccaaagtccccctagctggccccgaagggggacaggagggtctgtcccaaggccagttcctttctctcagtcacagtggcctcgggctgcccttggagtttgtcctaggaagtgggtgctgggcctggatccagaggggaggggcccccagatgggttttaggattcgggaaagggaggggagagattggggaaactgctgtggccaccccctagtcccccaggggcgaggactcac

SEQ ID NO: 31404 - DNA, 1419 bp, Artificial sequence
  DNA replication origin
cgttccctgccacagagctttattcaagaggcagctgtgggtctccctggtgctccacccccaacaaagtccagggtagggagttggccctgcccccgcaagggaaccccatccctgctcttagttgtcccaggcagagtttccccaccatgatcctccaggcccattcactccttcattaggcatcaactagctgaatacctgccaagccctggtgagccttcggatctggagaggactgaggcacagccacgatcctgggggactcaccctcttggataggaggccagcaagagaagacatggggccggggctcagagtggagcatagggttgagagtgggtgcccacccgggcagggcctcgtgggcccttgccaggaatgtgcacattatcctgcagccgctgtgaggcttttagcagagacaggaatgggattgagaaaaaaatccctgtggccagggcttcaagaatggctgaagctcttggtggtctcgtgggcatgtgtggaaacagaggtttgggagatggatgggcagggtctgggggccgagggaggtgggagggaaatcaggttgagttctagattcccagctggcactcgtgggcagacagtggtgctgcttcctgacggggggatgacttggggaggagcagagtggaaaaaagatggggcccacctggatttaggtgccaaagggaagagaagcatgagagtgctggctcagaggccaagaagtgtccagaagaaggacgcacaggaaggtcatgtgagagaaaggccgtataacacttaccctaagtgaccactagacgctcagctggtcagggggctgctgaaggcagagggcagtggtcagtagtgaagtgagggtgcgaattgagtgtgtggacaacgggcagaaggagagagacacagtgtggccagagggggtgtagggtcatggatggaaccgtccccaggctcaggtgggtgggcaggagatggggaggctaaagatggggagaaggttgttgctgagaagggatctcagaagaaagtgggtgcagaacagagggggcaggatgtggggatggcatggcacgggggcactggggagtgtgtggggatgcccttctgtcaggcagcagctcagggcttagggcaggctaccagacagggccagggacccccagaacagaggagctcctgccatggatggtgttttacagccttgtcactccccatgcactctaatcgcgcatattgagcacttggggtgggctggtcactgtgctggacactggggacaaagtgtggtaagatgcagtcccaaaggggctaacagtcctgtgggctcttgctgaaaggcttgtaacccagggttaagctcccagcagcttggaaggcaggcgtaggcacctccatttgccctgagta

SEQ ID NO: 31405 - DNA, 1098 bp, Artificial sequence
  DNA replication origin
accgcgggccccgacggcgcccccgaggagtccggaggccgagccagctccctgtgcggccctgcgcaacgcggcgccgcgacccagcgcagcagcctggcgcccggcctgccagcctgcctgtacctgcggcccgcggcgcccgtgcggcccgcgcagtccctgaacgacctggcctgcgccgccgtctcgcctcccgccggcctcctaggaagcagcggcagcttcaaggcctgcagcgtggcgggctcctgggtgtgcccgcggcctctggcgcgcagcgactcagagaacgtctacgaggtcatccaggacttgcacgtcccgccgccggaggagagcgcagagcaggtacctccccgggcgctggggcgcggaggcgggtggcgcgctagggaccgcgcccgcacggagccggggcgcaaggagacccgctccgctcagcgtcgggcacgacgcccacctctgtccgaagacttcggatgagctccctctccccaaccgcgaaacgtgaggggtgcacgcccgcagtccctcatcagcaattcccaagctccaaagctccctggaagcccagaggcttttcgtaatccaattggtggcaaaattgcgcttgaactgatgtgaggctgctgatggtctttatttatcgcacttgtgtgaatattcatgtttcgctgcagaaatgcaaatgagctcgatggtcggctgctgccccaagccctgctgggaggttatataacctactgcaggtgtgtgccccatattatctttccaagtcccagctgttctgtattccgaagcgcatctgggcacggaacgggggattgcgggcctgccccggcccaaccgacttgcccgtctcccaggagtctggggtcagatgagagggtggatgtgaaagtcaggcgtctgcttccctttgagggtgcttccagcatttcagttcctttttttaaagaactcttgatgggtttgtttcagaaagacgtccggttaagtgaggttgtttttttccccctcttcagagtccagttgtgttcatctgggaaatcgaaaatagagcacgttttaaaaacaggtcttacatcctcagaa

SEQ ID NO: 31406 - DNA, 1752 bp, Artificial sequence
  DNA replication origin
gcgcacaggagggacgcaggcactcccggacagcaaatcccggggggtggggggtgggggggcggggaatagagggggaaggcggagcgggggcggtcccatcctccttgggctccgctcgcgacctgccagtgccccttcagacgcagcagtcccggctccaggtgccggccttctgctctgggcctcgtcccaatgccccccaaggtccccagcagaggcattcaggctcctcctcgccccacccagacacggctgctttgggtatcggtgacagcactcctgagcgtccctgtccctcttcgctctgcttgccagctcctgttccgcgcagcctctccggcctcgcccctggaaaccccgcccagggcgatggtaggggcctaacctgcagccaccgccggctccgcccacccagcccatgggctccctgaggcccgcccagccgacgtgagtgcgctgcggggtccaaggggagggggcgccgggggagtgtcctgcttggggtttgttggttcagcaccgggcagctcgatgaccccgcctccggggcccagcgtgcttagtgactcagtttacaccctttcctcgtcgaggaacgcttgacaaagtggcggaggagccctgctggggcccccgttggaacctgctcctctgcctcggcaagcggcggtctcctggccccgggtccgggccaccttagggggcaggaagaggtgtggtcagtgtgggagtttggaggggccatgcacttccggagaaaaccgactcatggctttggtggaggggcgcagacagatttagttaggctctcccccatccctgacaccccgaagcccgggcgggagcggggcttatgaccaccactccggagagctttgggtggccctgctctgggactccgcacttatagtcactgtctcagagtgcattctccaggagccactcgtggggacactgtaggggtcacagggcaggtggacaggccacaggggcagggcctttctcggggggcggcgtgagagctggagagcagggggcggtgcgggccgggctgggcgggccgggctcgggctcacgtctgcggtgatgcagctggggaaggaaagagaaaccgagagaaccggttcccctgcattggcagcggaggcctctacagcaaggccctcggactaaggggggcagcgacagcccccaggtagagctgttcgctcggccccctacagagcccacattccaactctgaccagggggtcggggcgcaagctgctggagggaggcagtgctacgagaccctctgctgattctctgcgggcgggaggcttccaggcgggacagagccggggagcggcagtaaatggggtgttcttcctacttgactgacggaaaactaaggcgcagtcaactattaagcaagcgtggtgtcgaccttagagcgggcaatcacccctcgttttaaagccaaggcttccctcgcagtcgatttggaccaagactacccacaatctccccaccgcaggactgaagcaagggtcaaatcttagaatcaaccccacagaacgaagggctgtcctaattccagcactgagtgtaagaatggaagccttacatgtgattttatgcaagttcccattttagagatgggaaaactgaggcccgaaggcgaacggcgagtgcaggatcgggactcgaacccaagtctgtccccgagtgcggggctattccaggctcggtggtcttgacctccgcggc

SEQ ID NO: 31407 - DNA, 1266 bp, Artificial sequence
  DNA replication origin
cccgctcccgcccgggcttcggggtgtcagggatgggggagagcctaactaaatctgtctgcgcccctccaccaaagccatgagtcggttttctccggaagtgcatggcccctccaaactcccacactgaccacacctcttcctgccccctaaggtggcccggacccggggccaggagaccgccgcttgccgaggcagaggagcaggttccaacgggggccccagcagggctcctccgccactttgtcaagcgttcctcgacgaggaaagggtgtaaactgagtcactaagcacgctgggccccggaggcggggtcatcgagctgcccggtgctgaaccaacaaaccccaagcaggacactcccccggcgccccctccccttggaccccgcagcgcactcacgtcggctgggcgggcctcagggagcccatgggctgggtgggcggagccggcggtggctgcaggttaggcccctaccatcgccctgggcggggtttccaggggcgaggccggagaggctgcgcggaacaggagctggcaagcagagcgaagagggacagggacgctcaggagtgctgtcaccgatacccaaagcagccgtgtctgggtggggcgaggaggagcctgaatgcctctgctggggaccttggggggcattgggacgaggcccagagcagaaggccggcacctggagccgggactgctgcgtctgaaggggcactggcaggtcgcgagcggagcccaaggaggatgggaccgcccccgctccgccttccccctctattccccgcccccccaccccccaccccccgggatttgctgtccgggagtgcctgcgtccctcctgtgcgcggctctgggaatgccgggctggggctggttgtctcgtgcgggcgttcctgttcccggggaggtcatttgcaccctgaatcacccactgcgagcccttccaaccggattgcaaatccgcccgctccgggcccacctcttccctcaccagggcctttcccggagcagcccggccgggcctggaaaaactccgagcgggattcccagcgcagggacgcccaccggagctcgatgtctcgggctggataagaaggggaccggacctcggttccttccccgaccctggggaaacgcagagaaggggagggattggggaagccgggaggatccctggagcgcgacagcgcaccagtcgccaggaggtcccctgcgtccactgcccaggcgactcaagctacaggggcgtcaacgcctggg

SEQ ID NO: 31408 - DNA, 1094 bp, Artificial sequence
  DNA replication origin
cgcttgacacatccagggacagtggagaccagagtggcaggagagaggagatgggggcgtggcagtgagcgatgaggtcaatctgacgaggcctgtgggccactggaagcactttggcttcagctaagggagatggccgccactgtggagttttggggcagagggacatgctctgacttccctttaaatgggtcatcatggctcctacgctgagggactacaggggagaaggggagaaagaccagttaggaggttgtcatcacaagccaggccagagatgacagtgggtggggtgcagctggggagaggcggggattccggatgtgtggaaggcagagccaatgggatttgctgatgtaggctgcgaaagaaagaaaacctggggtaacaccaagatttttagcccaggcatctggaaggatgaattttgctatttggtgagatgaggaccattcaggaggaagcaggctggcagcaggaattcatcctggacatgtcagctgagatcctagtggacatgtatggcacaggtggatatatgaatgtggatttcaagaacaaggtccaggctggcgataaaaattgggagctaaagcctgagagcaggtagagtggtgagaaagtggcatctacagagaggagacaaggacccaggactgacatctgggcactctaacgtgagaggccacagggaggaccgagccagagagatagaagggtgggggcgagggctgaggagtggccttggggtttggcaacgaggagggcattgaccatctcagaaacagtgtcagtagaatggggggagagaagcctacttggagcaggttcgagaaggaatgggagcagggaaactagagaccaagaggttttttgttttgttgagacggagtctcactcctctgtcacccaggctgaagtgcagtggagtgacctcagctcactgcaatcccctgccttcccggttcaagccattctcctgcctcagcctccctagtagctgggattacaggtgctcaccacacctggctaatttttgtatttttagtagagacggggtttcaccgtgttcaccaagctggtctcaaactcct

SEQ ID NO: 31409 - DNA, 1161 bp, Artificial sequence
  DNA replication origin
ctggcacccatcatatcccctgaattcagcatcaggactgatctgccatcagctctggcagggagaggcccttacaagtgccaagaaaaggaacacgaacaatattctgtgaccacagccaacaccacacagaacttcccagaagctctccagggcgagaacaccaaccagaaggaagtgacagcttccatcattctgtgctaagtgagctgagtgagtggccgtctctcaccttccagatatttgaatgatacctaccattccagcagccagcacaagtcatttaatatgaatgccaaaaacacaatccctgaggacaggtgcaggagaccagatgccaggaaaaaccccggccccacccaagagttggggagagcccactgctcctccacccttatttaccacctgagcccctgcacccgccaatcatgctgctcagtctgtaactgcgggtctgagtgagcacctacatttggctgttgaggggcagctggtggagttggcaggcgactctgcactaagttctcaggttgaatgggagttgggtcgagggaagcaatggacgcagagttggggtgaagagttgcggtgggtcagcgggggtgaaaggacatggagatgtcatttttaacaagattgggtgagggtggtaggaaaggaggcagcaagagttcgggacagtttggcaaagacttagggatgggctgtcctcagtacggcaggagacgcaaaggaaggtatacagtggctaggagactaaggacgagaagacacagttaagacttggaataaggctgagatcggagttatccagaagaaagcggtgagctcaacagggcacctactttgggggtgggtcttagatgagagggcggaggtagaatgtttgggatgagcagatcttggggagctagacgggggatgggggtgactgggataagaaagctgagccagaaaaggggaaacctgaatggtgggtctcggggaggtaagcgcggagcatcgggattaccagaggggtggggagagaggatgaggtgtgtcagggcggggcgaagggacgtggccgagatcggtgttggaactggggtaaagtggggtcacgagtgaagctgcatttaagcaagaccgctggtgaggggatgcgggcgcgggctgggg

SEQ ID NO: 31410 - DNA, 1004 bp, Artificial sequence
  DNA replication origin
gcgctccgttaacggaagaaacgagatggaggctgaaggcgatccgcagtggggccccagccattcggattgagccttctccctccaaccgcttccgcaggccgggcccctcctgccctgcccctctggcctccccacccggccccagccgcccccactgcgcccattgcgcccgccccttcccggccgctttcccttctccctccgcctcggctccaacatgaggggccggcggggcaggccgaccaagcagcccgcggctccctctgcggagcgctgcgccccggccccgccgccgctgccgctgcccacgtccggacccatccggggttccgctcgcggcaacgcggtagcagcccgggcaggtgggtcgccgccaggctgaggtggcgcccaagacgcgcctgagctcgcccaggatgggcagcagtagccggagaaagccgccgccgccggccccaccccagcaccagcgccccggccggggggaggcgggggcagccacctggcccggacggctgcggtctggagggctgtcaacaaagtggtgtaggaggacgccagttactgcacggaaagcagcgtcaggagccatagtacctacagcagcactccaggtacccactcagcccagttgctgcagactccttccccaccttctctgccctccccctttgctcactcgtgtgctgtgcatcctgctccgatctccccccaaccccgccgacccccagaggggaaatgcgagggcacatcaagtggcaaaaaaccagatttataggaggaaagaggcgcattgttcaaaatggagattgcattgttgcagttggcgggccacactcgctctctcttcccgcctcccgccaacctcctctttttcctcctcagaatttgtaccagtgtagtgtctccaccgggcaagattgaaacttgggcaaacacatatccattgctttcattttttccccttgttttggtagttttctggaatgaaagaagcctct

SEQ ID NO: 31411 - DNA, 1373 bp, Artificial sequence
  DNA replication origin
cttgggcgccacctcagcctggcggcgacccacctgcccgggctgctaccgcgttgccgcgagcggaaccccggatgggtccggacgtgggcagcggcagcggcggcggggccggggcgcagcgctccgcagagggagccgcgggctgcttggtcggcctgccccgccggcccctcatgttggagccgaggcggagggagaagggaaagcggccgggaaggggcgggcgcaatgggcgcagtgggggcggctggggccgggtggggaggccagaggggcagggcaggaggggcccggcctgcggaagcggttggagggagaaggctcaatccgaatggctggggccccactgcggatcgccttcagcctccatctcgtttcttccgttaacggagcgcggtcacgtgagctgagcagcctacgagcctgggacggggcgaggtggcgcagcggctgcttgggggagcgcgggagcattgagtcgggggcagagagcctggggcgccggggctgggcgcagcgaggcgcggctggactccgggcttggtggcgcggttgagagagacgcgcagctggcgaaatgccccgcgtctaaggccttcggagaccatagtctccgcggacccctggctggagcccaaagccggtcggacctcctccctgcgtctccccttccgcggctcggagaggaaggcaggagagcccccaaatattcccctcccgccctctagggaaactgaagctgaaagaaccagcgaaagaaaaaaaagtctcggagtggggcggcccgagcgacctaagggacggggcagtggcagcgaccgagggaaattagtcggggtgggggaacagggagacaagcccccagaatttaggaaactcctaaattctactaaaaatacaaaaattacctgggcatggtggcgggtgcctgtaatcccagctacttgggaggctgaggcaggagaatcgcttgaacccgggaggcggaggttgcggtgagccaagatcctgccattgcactccagcctggagaacaagagtgaaactacgtctcaaaaaaaaagagaatagagagccatgcagtccacgcgggattgtgagctgtggtgtgagagggtgaagccagagaacaaggcggcgctggaggcgtgggtcaggcagacaggcatcgcctggtgcaggtgaacgggcagaggaagtatggcgggccacccccaggctgggtgggcagcccgccgccggctgggtcagaggtgttcatcgggcggctgcctcaggaagtgtatgagcaccagctatcctgctgttccagcgcgtgggccgcctctacgagttccgcctgatgatgaccttcagcggcctgaaccgcg

SEQ ID NO: 31412 - DNA, 1424 bp, Artificial sequence
  DNA replication origin
gcctggtgcaggtgaacgggcagaggaagtatggcgggccacccccaggctgggtgggcagcccgccgccggctgggtcagaggtgttcatcgggcggctgcctcaggaagtgtatgagcaccagctatcctgctgttccagcgcgtgggccgcctctacgagttccgcctgatgatgaccttcagcggcctgaaccgcggcttcgcatatgcccgctgcagctcgcggcgcggcgcgcaggccgccatcgcccgctgcacaaccacccgctgcggccgtcctgcccgctgcttctgtgccgcagcaccgggaagtgtgagctgagcgttgactgcctgccgccgaatctgacccgcaccgcgctgcagcccgcgctgcagccgctgggtcccggcctgcaggaggcgcggctgctgcccagccccggaccggcgcccgggcagatcgctctgctcaaattcagctcgcactggaccgctgccatggccaaaaaggccctggaggaagggcagccacacctctgtggagagcaggtggctgtggagtggctcaagccagaactgaagcagcgacttcgccagcagcttgtgggtccctccttgtggtccccacagccagacggcagccagttggccttggcaagggacaagttagggtcccaaggggctcgggctaccctgcagttgctgtgccaacgaatgaagctgggcagctctgtgttcctcaccaagtgtttgggcataggacctgctggctggcaccgcttctggtaccaggtggtgattcctgggcatccggtgcccttcagcggcctcatctgggttgtgctgatcctagatggccgggatgggcatgaggtggccaaggatgctgtgtctgtacggctgctgcaggcactcattgagtctggggccaacctcctgtggtctgctggggctgaggcaggtagcatggttaaacagtgactccattctctctccacaggcagcccgaatgggcatgcacagcctgtgtcaggccccaacccagcagacctgggtggccactatctgacccccaaaggtggggaggggcatgggcccaggcccatcagcctccctgctgggacagggacctatggcacctgggggcagcttaggttttgcttaagttgtggtgatgggccttgccctccccctcccagcccagggtccaacctgacccagttatcttccctggccattccttgtcccacccccacccgatcataccttcccccctctgccacagcttagcatgaatcttctttattgtcctgatttgtcctgtttgttggtttttatttgtggggaagggcagctgagccaaaggggtcaggaattatgccctttgcctccaccacatggcattctggttttggtttctgtatagttttgggtctttc

SEQ ID NO: 31413 - DNA, 1412 bp, Artificial sequence
  DNA replication origin
taaactgcatttgcctctccccattgccccaccctcccctaccctgagccagcggcccccacttcctcatcccctggcggtggcaggtgcccctcctcaagcagtgccacatcctgtcagcagccagctgtcctggcactggcctgagggccgggggacgcagagggcggggctgcgcggctactccaggtagatatcttctgtggggcaggtgtactccacaaactgcttgtgaaactgctggaatgctctccccacggactctgccagggctttggtggagtcttcagacacaaagacgtggcaggcaaaccggtggtcggcgaggtgcttggtgatgaacccaaagtacttgttgttctttggatgatatccgcggaaagagatgttttttaactggaaaaagtggctacatttattccccttggcctcctgggagtcatcggccttgacacctatcttcacaccccgcacgctgatctccaggacacagctggagggcgggttaaagtgcacggttagccggcgggtggtggcaatcttttgcatagcggcagagaggacgacatcgcccttgtgatagggaacctggactgagcccaggaacttcacccggaactggtccacccagtcactgtttttagccagggctgccatgtgctcgggctccttggtgacttcgatggcgtaataggcagtaaagaagccccgggcaccagtgcgcatgttgtaggcctcgtaccagtagtcttcagcctggagctccactagcagagggtcatccacttccagctcaggttcgtcttcgtgtcgaggcacaaacctgaatatggtccggtgggtctgctcctgctcctcccggttgatgatgcaggagaacagcccgaaggactcggcactggaggagcgggagcggccactcatgaagatgttcaggaacttcttggagaaatggacgtcgggttcgtcaggcgtggagtccttggagaggcaggcaggaggctggggccgggaggcctcctcatattcctctccgatggctgactcatagggcgaggagacggaggcacagttgtcatagacgatggccgagtcactctcgtcactgtagtctccgaagcacggccgcaggctcaccggctccagctgcgcgtgctcatctaccagcagcgtgggctgttggtggaggtgcctcgatctgtggtgggggcggggctgctctgggggggcagctcatcgctcaggcaaatgggttcatgcggtggtgtctgctcccctgtcttcaggggtgaggatgatcgagacacccgatcctgccaactgtactttttgcccagagaattattattcagtgtgtcctgagacaactgcacctgcggaaagaggttgagcgtggtgggccgcttgggccg

SEQ ID NO: 31414 - DNA, 893 bp, Artificial sequence
  DNA replication origin
ggcgcctccttctgccccattcccattgttagggagggcagagcgcggggtgggctcagggcaggggcgcccgcggccgctgcccggctcgcttcaggaggggcgccccgcgggatgcggcttcccttcctctccgcgtcggtccgtcccacctcggctcggcctggcgccccgagctccgctccgcgcccccggccgcggccccggcccgccccccgggcagccaggccctcaggccactcggccggcagcccgcgtcccaggcctacgagtgggcgctgggcgggcgtccccgtgccccacacacgcgtcccctctcccccagccccgccgcttccagggccctcggcggcgcccgctccccgggccccgcggccccccgcctcccagccaggccgctccctcgagctcgtcgggtcagggacacctcctctacctcaccatcaccctggcccactcgtgcccccacccccaggggcaccagtgccaaaggcagctcccccagccccggacctacctgcacggttcaaccaagcctagaagtgggggcggggaatcttccgccctcctctggcgctcattggcccttcaggggcacatcgtgagcgccattggctgagcaatggtgtccgtcagagcgatggggcgggacagaaggggaagagggatgcaggtgccttggcgtctctgtctctgtgcatctcgttgtctctgtctctgtctcagcccttggaaacgagaggcttttggctgagaggactagaagggggcctgaggtgggaggaataggaataggaatcctgacagagcgtcacgccagttggcaactctgaaccccctacctaagtcccctttaggttctcttctccatcacccccaacccctgcccctca

SEQ ID NO: 31415 - DNA, 1208 bp, Artificial sequence
  DNA replication origin
cgcccccacttctaggcttggttgaaccgtgcaggtaggtccggggctgggggagctgcctttggcactggtgcccctgggggtgggggcacgagtgggccagggtgatggtgaggtagaggaggtgtccctgacccgacgagctcgagggagcggcctggctgggaggcggggggccgcggggcccggggagcgggcgccgccgagggccctggaagcggcggggctgggggagaggggacgcgtgtgtggggcacggggacgcccgcccagcgcccactcgtaggcctgggacgcgggctgccggccgagtggcctgagggcctggctgcccggggggcgggccggggccgcggccgggggcgcggagcggagctcggggcgccaggccgagccgaggtgggacggaccgacgcggagaggaagggaagccgcatcccgcggggcgcccctcctgaagcgagccgggcagcggccgcgggcgcccctgccctgagcccaccccgcgctctgccctccctaacaatgggaatggggcagaaggaggcgccccactgcggggaggtgaggggtgggtttgggactggggtccgcggtggggggaggtgcgatctcgggctctcgcctctccgctccctctggctctggagttgggggcccctgtggggctctgaagtccgcctgagacttgggtcaagagtcaaactgtcgccccccgctcctcccccaaaatccggtgagcggtaaggaaagtgatgccaagtcttcgaagcctcagtgacaaacgcatagcaagaacacatccactccagaggtgtttattttttatttttatttaaaaaggggtacttttcgacatttatttttaagaagtgggtgctgttatttttgtccctacgcgggcaagcctccattttaagcgaagcagtaactggttaagctggaattgtatacaggcccaggacttgaacgaggatcctaccagaggtcatttagtccatcctcctgcctccaggcaaatttaccttcctcccaccctcaaaattaagttgctcggtctgcttttaacgatctctggggaagaagggtcctttatttgtttctagtacttcagtcaagaataggttttacttttcatgtggaattgactctgaaacttaagcataatcttgggacagtcgggatgattagagaagttttactttact

SEQ ID NO: 31416 - DNA, 958 bp, Artificial sequence
  DNA replication origin
tgccccttcccctccgcggcgagctgcgagtccggagagatgaatgccgcccgcgcctgcgagcccttgatcaatatcgcagtctcgggggaggagacggtgcctctggcggcagttcctgttccccgaccgcggctgggagcgcgacgctcgttctccgagcctgggcacccgcgatccccgcgctgcgcggccgaccctgcgacgcggatcgggcgctggagtttaggaaagtagccagaccgcacgtccagcgtctgcccgctgaagttcgtgggcggtgggggcggcccgcgggttgtgtgagccagggaagggccgggaggccggcagtccggcccgccgctcgtgtcaggcgtcacttgcagccccaagcgctttccagagcgttttggttttgcagggtataggcgcgcccgctgcagccggccggagaggcgggtgggcctctgcgctgctgccgggacaccccgcttcgcgccagtctgggcatcgcctcacccggggctcgggactccgcagggtccgctccagccacaaacatagacaccagcttgacccggctcagggcattcagagcgattacattcaagagacttcggtggatttgggggaggggtgcggattggcggaatttcatttttccatcagttattaaaccaactgtacgtataccggcttaccaagtggtttgagttaaaccaccaagatttttaaatgcagcagctgctgcttccttagttgagacgttacaagttactgagatttttctctaatcctgcccctccccaaatatttataaattgattcttaaaatgatcaagggttggtcttactgaacccacatcccctcccccatccgttacctgagggctagggatgaactcagattattttctgggcgttcgaggagacagacaggtgaggaaggtagaagaaaaacatccagagaggtcga

SEQ ID NO: 31417 - DNA, 1014 bp, Artificial sequence
  DNA replication origin
tggtttaagacgataacagatatgaaaatcctctgtaaacaggaaggcttcaccactcttggaactcaagattgctgtaaagaggagggcagtgacctccatcagtatattaaattcattaagaaataaacccggggaatgtgttacagtcctgggagaggatcctgctcactctgcacagatccccttgggccagggatggggaaggccccggaaagtgagttatggagcctaaggagacttttctgtggtttctgctgattctgtggatgccagagcccagcagctgcccggcccctccttgctcacaggagcaggcggcattgcagcaggagggatttaggggtggctgagaaggtggtgactcagttcagaaatgggtggagaagagaaatcccgggagtttggtgtctctgcagctgagaggtccacctggtgttctgactgggtggcagcatgggtagatgcgagtgtgagggcgcacctgtgagccggccacatgtgcttgtgcatgcaggggcggggggtccatgtggagtggggaatcccacgtgatgtggagattcagttcgacacaacacggagcagtgaacacagcatgggattcagggacaagcagagcctcaaactggacggcgttgctctgcagcgaggcctgaccctcagcagatgctcaggaagggggagtggcccttgagatcatgacccgctccatcccagccacccctaggcgatgtcctcacagagcagctcccatccagcagaaggctcacctctgcccctctctcctgctccagaaaaaaagcaaggtgcactaccatgtcgcagtcatcatcaactacctgggccactgtatctccctggtggccctcctggtggcctttgtcctctttctgcggctcaggtgagaagaccccagcactgcctcctcctgtccccaggacctagagcagaagcagggtggagaagtgagaggagcagctctaggttggggtgggggttgctgggagaggg

SEQ ID NO: 31418 - DNA, 1098 bp, Artificial sequence
  DNA replication origin
cacagagcagctcccatccagcagaaggctcacctctgcccctctctcctgctccagaaaaaaagcaaggtgcactaccatgtcgcagtcatcatcaactacctgggccactgtatctccctggtggccctcctggtggcctttgtcctctttctgcggctcaggtgagaagaccccagcactgcctcctcctgtccccaggacctagagcagaagcagggtggagaagtgagaggagcagctctaggttggggtgggggttgctgggagagggtggcaggggctggcttatctgagagtctcaggtctctgggaacctctggcagagccgctctgccctctccccagtagctgctggaatggtggggagggacaaaacttgtcttatgtcacccatacccaggccaggctgcacccattggggtgaccaggcagatggagccctggaggtgggggctccatggagtggtgccccatttcaggttcgaaggtacctgggccccagcactaccgccaaggatgcaggtggcagagccggggatggggatggttgggatcaggagccgagcatcagggctggaggctgggagcagggctgacccctgtgactgtccatcctggaatggcagggagtagaaggcacccccaggggaagcgggcatcgccaggaatccagctgccctggtccatggagcacaggctccatggagtgccaggctctgcctggggcttatgtctgggtgggctgcaggcaggaagggctccatggggcattaggagagcctggctgtcacctccctgtgtgacttggccagtcagccccaccctgtgcctcagtttcctcatctacacatctgggctggggtgatggaggtggcctacccctcatcctctctctcctatcgctcccatcatccacccgccctgctgcaccaggagcatccggtgcctgcgaaacatcatccactggaacctcatctccgccttcatcctgcgcaacgccacctggttcgtggtccagctaaccatgagccccgaggtccaccagagcaacgtggtacgtcctggcaggggagcggggagcaggtcaggccaaac

SEQ ID NO: 31419 - DNA, 842 bp, Artificial sequence
  DNA replication origin
ggtccagctaaccatgagccccgaggtccaccagagcaacgtggtacgtcctggcaggggagcggggagcaggtcaggccaaacccaggtcagaggaggggcccgcctgccctgcagaggaggagcccacagaacaggagtgggatcccagggtatgccctgtcctgccctggggaggcccaggcccagggtttggtgcctcccctgccccccatcatcatctctggttgggggtggggtggcagggctggtgcaggttggtgacagccgcctacaactacttccatgtgaccaacttcttctggatgttcggcgagggctgctacctgcacacagccatcgtgctcacctactccactgaccggctgcgcaaatggatgttcatctgcattggctggggtgagctgggcagccacctccgcagcctgggcagtggcggccgccgggctgccctctcctccagactcaggccagcgggctggggggcctgagggatggaggtcgggttggggcggtaaggtgtgcacgatagccctctgctcctcttgggggtgggcggcagtagaagcaccttgaaggaggtgtgtgagtttgagatccaccctgagtaaccccagaccccctggagcctgggctgcactggggttctccaggcccacatcctccagcccccgctgagggctctgtgacagcccatctctcccccaggtgtgcccttccccatcattgtggcctgggccattgggaagctgtactacgacaatgagaagtaagtcatctcctttcccttcctgaccccaaggtttaggctcccagcccagcttggtgacactccccacggg

SEQ ID NO: 31420 - DNA, 1080 bp, Artificial sequence
  DNA replication origin
aggggtccttgactgatccctgctgcccagcctcattgcccattgggccaaggcaggtggagcagaagaaggggtggtggcctcttaggtgcctaaggagcccaggttgggggcacggcaggcatcagctagggtgagggggcatgggggcagcagctggtgggcctgcctggctcatcctcatcacaggggaagggggagggagtggatggcaatccactctagaacatgcagcggggaagctgctgggcagggcagcaagggcaggtgaggggccaggtgaactaggccccttccccacccttcctgagacctgctgcctggggcctgctggccctgctgccctgtgtgttgaagataaatgttccaggtgcacctaggtcctcaagtagaaggcagagacactaccccagcctgctctgggcagccaccccgagagcccaggccatagctgagggggcagtagggtggggggagggagggggagttgtggggagcaaagtcacagatacagggggtgccctccaggaaaggagttgaatctggagtgggggtggggagggtggcgggactgaagtcttggagcgggatttcagcctggcagtgggccatggccccaaggggcatcagccactcatgtgagggcactgaccagtgctctgagtggccaccagaggaatgattccagggctgatggatgggggtgggcacagggatgggggacctggggaagcaatgatcaaacatacccacgaaagccttctgtgagtggggtcccaggcagagtctcggagggaatgagccttctgcgaattatctgggccctgggcaaccagtccacgggtagatctgggagaaggggcaggagcaagctctgcttgaggtgtctgtgcagacccccaaattggggcatgtgctggtgtgatggagtccagaagaactaaaatgagacctgtcctgaggagagagcagctggaggggactggagttgctccatttcgtctgggcgctgtggctcacacctgtaatcccagcactttgggaggccaaggtgggtgaatcacttgaggccaggagttc

SEQ ID NO: 31421 - DNA, 951 bp, Artificial sequence
  DNA replication origin
cccgcggaggccgcgctgcccgccccctcccctggggaggctcgcgttcccgctgctcgcgcctgcgccgcccgccggcctcaggaacgcgccctcttcgccggcgcgcgccctcgcagtcaccgccacccaccagctccggcaccaacagcagcgccgctgccaccgcccaccttctgccgccgccaccacagccaccttctcctcctccgctgtcctctcccgtcctcgcctctgtcgactatcaggtaagcgccgcggctccgaaatctgcctcgccgtccgcctctgtgcacccctgcgccgccgcccctcgccctccctctccgcagactggggcttcgtgcgccgggcatcggtcggggccaccgcagggcccctccctgcctcccctgctcgggggctggggccagggcggcctggaaagggacctgagcaagggatgcacgcacgcgtgagtgcgcgcgtgtgtgtgtgctggagggtcttcaccaccagattcgcgcagaccccaggtggaggctgtgccggcagggtggggcgcggcggcggtgacttgggggagggggctgcccttcactctcgactgcagccttttgccgcaatgggcgtgtgtgtgtgtgtgtgtgtgtgtgtgtgtgtgtgtgtgtgtggaggggtccgataacgacccccgaaaccgaatctgaaatccgctgtccctgccgctgttcgccatcagctctaagaaagacgtggatcgggttctagaaaagatgactccctgcacgcccctccctgcacctcccgagcagtgattccgacagggccttcactgcccctgattttaggcgggggccggccccctccccttttcctccttcagaaacccgtaggggacatttgggggctgggagaaatcgaggagatggggaggggtccacgcgctgtcactttagttgcccttccccc

SEQ ID NO: 31422 - DNA, 871 bp, Artificial sequence
  DNA replication origin
ggccggccccctccccttttcctccttcagaaacccgtaggggacatttgggggctgggagaaatcgaggagatggggaggggtccacgcgctgtcactttagttgcccttccccctgcgcacgcctggcacagagacgcgagcagcgccgtgcctgagaacagtgcgcggatcccactgtgcacgctcgcaaaggcagggttcacctggcctggcgatgtggacggactcggcggccgctggtccccgttcgcgggcacgcacagccgcagccacgcacggatgggcgcggggctgcaggtgcatctcggggcggatttctttctcagcgctcggagcgcagggcgcccggcgtgtgcgctccctgccggaggcgcggggctggcgcgcagggctcgcccctcactgcggcagtgggtgtggaccctggtgggcgaggaagggggaggataggctgtgcctcctcccactcccgcccccagcccccctttttttccccctcggaacgcgaggtgccatcttttttcggcgtgtcacgtctttacggtgccatgccaaaccgggtggccgggcttcataggacagggcggggcctggcattaaagggagggggacaatcagcgctgaaatcttggcgttttgctgctgcgggcgtgagcactgggggcgttcgcccagcaccttcttcgggggctctttgctttgtctgtagaggttacgtgatctgcgctcccagccctggtttctggcttttattctgagggtgttcagtcaacctcccccctacgcccatgcgcctctctttcctttttcgctcctcatttccgagcccattgttggatctcgaggcttgctgggttcgatgaactcg

SEQ ID NO: 31423 - DNA, 894 bp, Artificial sequence
  DNA replication origin
gcagcctgaacctcccaggctcaagcaatcctcccacctcagcctcctgagtagctgggactataggcacgcataccaccgtgcccagctattttttttaatcaagatggagtttttctatgttgcccaggctggtctcaagctcctggactcaagcaatcctcctgcctcagcctcccaaagggctgagattaaaacgtgagtcaccctgcccagccaattgctttttaaaaaagattaaatgcatgtatacgctcaggcatcagcacacttggaaaggatgaaaatatccggaagaagggttcttttaaaaggctcctcaagtgatgctggcaggcatgacgaatgtccctggtcacaaaagctctgatctggcctaaccctgtcatgttagagactggagtgcgtgtgtgtgcgcgcaaagtgtggggggatgggggtgagtgtgtgtggtgtgtaagcatgagtgtgtatgtgtgtggtgtgggggtgtgtgctgtgtgagcgtgtgtgagtctgtgtgtgtagtgtgtgtgtgaagtatgtggtgtgtatgtgtgacgtgaggtgtgtgtggtgtgtgagttgtgtatggtgtgtgcatgagcatgtgtgtgggcatgtgatgtgtgtgtggtgtgtaagcatgtgtgagtgtgtatgtttgagcatgtgtggtgtgttgtgatatgtgtgtggtgtgtgagcatgtgtgtgtgatgtgtctgtgtgtggtgtgtgtgagcatgtgtgttgtgtgtgtggtgcatgtgtgtggcgtgtgagcgtgtgtgtgcattgtgtctgtgagcatgtgtgagtgtgtgtgtgttcagcatatataaggcatgtaactgaacacagcactttagagggctctcctggagtcagagg

SEQ ID NO: 31424 - DNA, 1060 bp, Artificial sequence
  DNA replication origin
ggagctcggccgccattttcccagtgccgccgccaccgccgccaccgctcgccgagccggcgggagaaccgagcaccgtagcgaagccgactcgtctcgccgcggcggcgcggggggcggctgaagcgcgctccccggctggaaagaggcggccgggggtggcggcctgggtgcgggttcgggctgcagacggcggtgcttgtttgtgcggggcgggggggcggtttcactctctgcccccgcccgcccgccctcccggccgggctgcggtctccagccgtgctcgggccccgtcggtgcggagcaaggccgggaaagggcccgaaagagaagaaaaagcagccgctccccgccgccgccttcccctccccctctgcctcgcccccccgcccggaaagtcagggcggctccgggcgtcggggggaggagagcggcgggcccgggccggagccgccgtcgcgcgcccccgcccgccgctggccctcggcgcccaggccggggggctgtttgcaaactgcgcccattttgtggggctgaatccgcccgggctacgctcctccatcacgtggtaggtgctgctgctgctcctctcctcctcctcctgctgccctttctccttctcctcgctctccctgtggctcccatttctctctctctttgttagttgtaactagaaaggcagggcagggtagaaaaatcccccggaactttaaatggcctctccgggcttccctgctgcgggtccgggctgggagtcgccccaagggcgggggtgtgcgggggcccttccccaggagctgccgcctcgttcgccagcttttcctttggcgttctatttaaaaaggcggcctgaagaacatgatttattcccgtaaaagaaccccccaaacaaactctggctctcgccttgaacttctcttgactgcaaaaggcctttctctgctcgaaacacacatcttggcgcgttgcacggtttgtatcacaactctgattgtttcatttattatttttgttgcctgtaaattcaggtcacttacgttttcagatgtagtctccctca

SEQ ID NO: 31425 - DNA, 742 bp, Artificial sequence
  DNA replication origin
gctacggtgctcggttctcccgccggctcggcgagcggtggcggcggtggcggcggcactgggaaaatggcggccgagctccttttccctccccccctttaatctgaagcggagggagaatggagcgagcgagcaagcgggcgagcgccggggacacggggaggagggacagcagcgcctccgccggctgcggctgcggcggcgaagggccgctccaccccggcgcgccgccagggggcgcccgccgcgccgcccccgcgggccgccaggaggcgcggccgccgccgcctcagtcatggctcctcgccgtggccgatgtttttgtacctccatctgcggaggccgcggcgcccggccccagctgccccggacgtgcggcgacggcacgcagcactgcggcagggggaagccagccctcgctgcggccgaggtgagtctaacctgaggcactgacgccgtcacatgccctccgtgctggggccggcggtgcggctcgccagttgaggggcagggcgggccggcgccgcggagcgagaggacgtgagcgaggaactgtttgcactgtgtagtaaagagggtaaggccgtcggcaccacactattccaaggctaaccctgcagaaagctccctgaccagtgaagcggcttccgccgcccgccctttgtccctagcagccagcctccgtatactgcagcacggctgggcactagccccagcaccgcgctccgcagccaccagagtt

SEQ ID NO: 31426 - DNA, 992 bp, Artificial sequence
  DNA replication origin
tgcggaggccgcggcgcccggccccagctgccccggacgtgcggcgacggcacgcagcactgcggcagggggaagccagccctcgctgcggccgaggtgagtctaacctgaggcactgacgccgtcacatgccctccgtgctggggccggcggtgcggctcgccagttgaggggcagggcgggccggcgccgcggagcgagaggacgtgagcgaggaactgtttgcactgtgtagtaaagagggtaaggccgtcggcaccacactattccaaggctaaccctgcagaaagctccctgaccagtgaagcggcttccgccgcccgccctttgtccctagcagccagcctccgtatactgcagcacggctgggcactagccccagcaccgcgctccgcagccaccagagttgggcggggtggggagggtgcacgtagtcactgcgcaggccccagccagggcccgcgccgggccagcccgggaagggacagccgggagccagaggggaagtgatggccccgccggcgccgggcccgctgggaactgtagttttcgtgaagaaacacgcgtcttgttttgggtgtcatggcttggcagatccgccaaaacaggcaaatggcattacacaatgagtatttatgcttcctgccgccaccaaaaggaagttcactgccatgctaaaagtttaacaaagaactccataaagaaacacaagtctcacaacaaaaagccaacttcccacctcgttaccagagttggtttaaagtggtggcaccttatcatttctcatgaccagtttatcagtacagaactttatattgtccccaaaataggacctttaaaataatggaacctttcctagacttaaagaattcataaacataatgtaatacaaagtgtcacacaaagtgtaattctaccaccctttaaagttgccaaaagatgagtggagtatcttgagatttaaaagactaatctaggattcatcaaaactg

SEQ ID NO: 31427 - DNA, 1145 bp, Artificial sequence
  DNA replication origin
ccggggctgggggagctgcctttggcactggtgcccctgggggtgggggcacgagtgggccagggtgatggtgaggtagaggaggtgtccctgacccgacgagctcgagggagcggcccggctgggaggcggggggccgcggggcccggggagcgggcgccgccgagggccctggaagcggcggggctgggggagaggggacgcgtgtgtggggcacggggacccccgcccagcgcccactcgtaggcctgggacgccggctgccggccgactggcctgagggcctggctgcccggggggcgggccggggccgcggccgggggcgcggagcggacctcggggcgccaggccgagccgaggtgggacggaccgacgcggagaggaagggaagccgcatcccgcggggcgcccctcctgaagcgagccgggcaacggccgcgggcgcccctgccctgagcccaccccgcgctctgccctccctaacaatgggaatggggcagaaggaggcgccccactgcggggaggtgaggggtgggtttgggactggggtccgcggtggggggaggtgcgatctcgggctctcgcctctccgctccctctggctctggagttgggggcccctgtggggctctgaagtccgcctgagacttgggtcaagagtcaaactgtcgccccccgctcctcccccaaaatccggtgagcggtaaggaaagtgatgccaagtcttcgaagcctcagtgacaaacgcatagcaagaacacatccactccagaggtgtttattttttatttttatttaaaaaggggtacttttcgacatttatttttaagaagtgggtgctgttatttttgtccctacgcaggcaagcctccattttaagcgaagcagtaactggttaagctggaattgtatacaggcccaggacttgaacgaggatcctaccagaggtcatttagtccatcctcctgcctccaggcaaatttaccttcctcccaccctcaaaattaagttgctcggtctgcttttaacgatctctggggaagaagggtcttttatttgtttctagtacttcagtcaagaataggttttacttttcatgtggaattgactctgaaacttaagcataatcttgggacagtcgggat

SEQ ID NO: 31428 - DNA, 878 bp, Artificial sequence
  DNA replication origin
ctccttctgccccattcccattgttagggagggcagagcgcggggtgggctcagggcaggggcgcccgcggccgttgcccggctcgcttcaggaggggcgccccgcgggatgcggcttcccttcctctccgcgtcggtccgtcccacctcggctcggcctggcgccccgaggtccgctccgcgcccccggccgcggccccggcccgccccccgggcagccaggccctcaggccagtcggccggcagccggcgtcccaggcctacgagtgggcgctgggcgggggtccccgtgccccacacacgcgtcccctctcccccagccccgccgcttccagggccctcggcggcgcccgctccccgggccccgcggccccccgcctcccagccgggccgctccctcgagctcgtcgggtcagggacacctcctctacctcaccatcaccctggcccactcgtgcccccacccccaggggcaccagtgccaaaggcagctcccccagccccggacctacctgcacggttcaaccaagcctagaagtgggggcggggaatcttccgccctcctctggcgcccattggcccttcaggggcacatcgtgagcgccattggctgagcaatggtgtccgtcagagcgatggggcgggacagaagggggagagggatgctggtgccttggcgtctctgtctctgtgtatctcgttgtctctgtctctgtctcggcccttggaaacgagaggcttttggctgagaggactagaagggggcctgaggtgggaggaataggaataggaatcctgacagagcgtcacgccagttggccactctgaacgccctacctaagtcccctttaggttctcttctccatcacccccaaccc

SEQ ID NO: 31429 - DNA, 1562 bp, Artificial sequence
  DNA replication origin
gaagggaaagggagggagaggaagaaaagaaagaagaaggaaggaaagaaagaaagaagaaaaggagggaggaaggaacgaagaaagggaaagaaggagggagggagggaaatgaaggaaagaaagaaaaaagaaagaaagaaaaaagaaaagaaaaggagggaggaaggaaggagggagggaaggatggaagaaagggaaagaaggagggaggaagggacatgaagagaataaagaaagaaagaagaaaagaaaagaaaaaagaaaagaaaagggagggctctgcgggcggcggcggcgcggggagccggttgcaggccgagatgctgcagatggacctgatcgacgcgacgggggacactcccggggccgaggaggacgacgacgaggagcgcgcggcccggcggccgggagcggggccgcccaaggccgagtccggccaggagccggcgtcccgcggccagggccagagccaaggccagagccagggcccgggcagcggggacacgtaccggcccaagcggcccaccacgctcaacctctttccgcaggtgcagttgtctcaggacacactgaataataattctctgggcaaaaagtacagttggcaggatcgggtgtctcgatcatcctcacccctgaagacaggggagcagacaccaccgcatgaacccatttgcctgagcgatgagctgcccccccagagcagccccgcccccaccacagatcgaggcacctccaccaacagcccacgctgctggagctggtgagcctgcggccgtgcttcagagactacagtgacgagagtgactcggccatcgtctacgacaactgtgcctccgtctcctcgccctatgagtcagccatcggagaggaatatgaggaggcctcccggccccagcctcctgcctgcctctccaaggactccacgcctgacgaacccgacgtccatttctccaagaagttcctgaacatcttcatgagtggccgctcccgctcctccagtgccgagtccttcgggctgttctcctgcatcatcaaccgggaggagcaggagcagacccaccggaccatattcaggtttgtgcctcgacacgaagacgaacctgagctggaagtggatgaccctctgctagtggagctccaggctgaagactactggtacgaggcctacaacatgcgcactggtgcccggggcatctttactgcctattacgccatcgaggtcaccaaggagcccgagcacatggcagccctggctaaaaacagtgactgggtggaccagttccgggtgaagttcctgggctcagtccaggttccctatcacaagggcgatgtcgtcctctctgccgctatgcaaaagattgccaccacccgccggctaaccgtgcactttaacccgccctccagctgtgtcctggagatcagcgtgcggggtgtgaagataggtatcaaggccgatgactcccaggaggccaaggggaataaatgtagccactttttccagttaaaaaacatctctttccgcggatatcatccaaagaacaacaagtactttgggt

SEQ ID NO: 31430 - DNA, 921 bp, Artificial sequence
  DNA replication origin
gccaccccgtctgggaagtgaggagcgtctctgcctggctgcccagtctggaaagggaggagcgtctctgcccggccgccatcccatctaggaagtgaggagcgtctctgcccggccgcccatcgtctgagatgtggggagcgcctctgccccgccgccccgtctgggatgtgaggagcgcctctgcccggccgtgaccccatctgggaggtgaggagcgtctctgcccggccgccccatctgagaagtgaggagaccctccgcccggcaaccgccctgtctgagaagtgaggagcccctccgcccggcaaccgccctgtctgagaagtgaggagcccctccgcccggcagtcgccccgtctgggaattgaggagcgtctccgcccggcagccaccccgtccgggagggaggtgggggggtcagccccccgcccggccagccgccccgtccgggaggtgtacccaacagctcattgagaacgggccatgatgacaatggcggttttgtggagtagaaaggggggaaaggtggggaaaggactgagaagtcggatggttgccgtgtctgtgtagaggcgggtagacatgggagacttttcattttgttctatactaagaaaaattcttctgccttgggatcctgttgatctgtgaccttacccccaaccctgtgctctctgaaacatgtgctgtgtccactcagggttaaatggattaagggcggtgcaagatgtgctttgttaaacagatgcttgaaggcagcatgctccttaagagtcatcaccactccctaatctcaagtacccagggacacaaagactgcggaaggcgcagggtcctctgcctaggaaaaccagagacctttgttcacttgtttatctgccgaccttccctccactattgtcctatgaccctgccaaa

SEQ ID NO: 31431 - DNA, 1189 bp, Artificial sequence
  DNA replication origin
gtccctgggtacttgagattagggagtggtgatgactcttaaggagcatgctgccttcaagcatctgtttaacaaagcacatcttgcaccgcccttaatccatttaaccctgagtggacacagcacatgtttcagagagcacagggttgggggtaaggtcacagatcaacaggatcccaaggcagaagaatttttcttagtatagaacaaaatgaaaagtctcccatgtctacccgcctctacacagacacggcaaccatccgacttctcagtcctttccccacctttcccccctttctactccacaaaaccgccattgtcatcatggcccgttctcaatgagctgttgggtacacctcccggacggggcggctggccgggcggggggctgacccccccacctccctcccggacggggtggctgccgggcggagacgctcctcaattcccagacggggcgactgccgggcggaggggctcctcacttctcagacagggcggttgccgggcggaggggctcctcacttctcagacagggcggttgccgggcggagggtctcctcacttctcagatggggcggccgggcagagacgctcctcacctcccagatggggtcacggccgggcagaggcgctcctcacatcccagacggggcggcggggcagaggcgctccccacatctcagacgatgggcggccgggcagagacgctcctcacttcctagatgggatggcggccgggcagagacgctcctccctttccagactgggcagccaggcagagacgctcctcacttcccagacggggtggcggccgggcagaggctgcaatctcggcactttgggaggccaaggcaggcggctgggaggtggaggttgtagccagccgagatcacgccactgcactccagcctgggcaccactgagcactgagtgaacgagactccgtctgcaatcccggcacctcgggaggccgaggctggcggatcactcgcggttaggagctggagaccagcccggccaacgcagcgaaaccccgtctccaccaaaaaaatacgaaaaccagtcaggcgtggcggcgcgtgcctgcaatcgcaggcacttggtaggctgaggcaggagaatcaggcagggaggttgcagtgagccgagatggcggcagtacagtccagcatcagagggagaccgt

SEQ ID NO: 31432 - DNA, 1535 bp, Artificial sequence
  DNA replication origin
cgtgggtcagggagacaggcatcgcctggtgcaggtgaacgggcagaggaagtatggcgggccacccccaggctgggtgggcagcccgccgccggctgggtcagaggtgttcatcgggcggctgcctcaggaagtgtatgagcaccagctatcctgctgttccagcgcgtgggccgcctctacgagttccgcctgatgatgaccttcagcggcctgaaccgcggcttcgcatatgcccgctgcagctcgcggcgcggcgcgcaggccgccatcgcccgctgcacaaccacccgctgcggccgtcctgcccgctgctcgtgtgccgcagcaccgggaagtgtgagctgagcgttgactgcctgccgccgaatctgacccgcaccgcgctgctgcccgcgctgctgcccgcgctgcagccgctgggtcccggcctgcaggaggcgcggctgctgcccagccccggacctgcgcccgggcagatcgctctgctcaaattcagctcgcactggaccgctgccatggccaaaaaggccctggaggaagggcagccacacctctgtggagagcaggtggctgtggagtggctcaagccagaactgaagcagcgacttcgccagcagcttgtgggtccctccttgcggtccccacagccagagggcagccagttggccttggcaagggacaagttagggtcccaaggggctcgggctaccctgcagttgctgtgccaacgaatgaagctgggcagccctgtgttcctcaccaagtgtttgggcataggacctgctggctggcaccgcttctggtaccaggtggtgattcctgggcatccggtgcccttcagcggcctcatctgggttgtgctgaccctagatggccgggatgggcatgaggtggccaaggatgctgtgtctgtagggctgctgcaggcactcagtgagtctggggccaacctcctgtggtctgctggggctgaggcaggtagcatggttaaacagtgactccattctctctccacaggcagcccgaatgggcatgcagagcctgtatcaggccccaacccagcaaacctgggtggccactatctgacccccaaaggtggggaggggcatgggcccaggcccatcagcctccctgctgggacagggacctatggcacctgggggcagcttaggtttggcttaagttgtggtgaggggccttgccctccccctcccagcccagggtccaacctgacccagttatcttccatggccattccttatcccacccccacccgatcataccttcccccctctgccacagcttagcatgaatcttctttattgtcctgatttgtcctctttgttggtttttatttgtggggaagggcagctgagccaaaggggtcagaaattctgccctttgcctccaccacatggcattctggttttggtttctgtatagttttgggtctttctatgctggttgtatttatgttaaacccctggttagtaaaaaaaaaaaaaaaaaaaaaaaaaaaaaaaaaataggcc

SEQ ID NO: 31433 - DNA, 1370 bp, Artificial sequence
  DNA replication origin
gcacagcaactgcagggtagcccgagccccttgggaccctaacttgtcccttgccaaggccaactggctgccctctggctgtggggaccgcaaggagggacccacaagctgctggcgaagtcgctgcttcagttctggcttgagccactccacagccacctgctctccacagaggtgtggctgcccttcctccagggcctttttggccatggcagcggtccagtgcgagctgaatttgagcagagcgatctgcccgggcgcaggtccggggctgggcagcagccgcgcctcctgcaggccgggacccagcggctgcagcgcgggcagcagcgcgggcagcagcgcggtgcgggtcagattcggcggcaggcagtcaacgctcagctcacacttcccggtgctgcggcacacgagcagcgggcaggacggccgcagcgggtggttgtgcagcgggcgatggcggcctgcgcgccgcgccgcgagctgcagcgggcatatgcgaagccgcggttcaggccgctgaaggtcatcatcaggcggaactcgtagaggcggcccacgcgctggaacagcaggatagctggtgctcatacacttcctgaggcagccgcccgatgaacacctctgacccagccggcggcgggctgcccacccagcctgggggtggcccgccatacttcctctgcccgttcacctgcaccaggcgatgcctgtctccctgacccacgcctccagcgccgccttcaccctctcacaccacagctcacaatcccgcttggactgcatggctctctattctcttttttttttttttttttttgagacgtagtttcactcttgttctccaggctggagtgcaatggcgggatcttggctcaccgcaacctccgcctcccgggttcaagcgattctcctgcctcagcctcccaagtagctgggattacaggcatgcgccaccatgcctggctaattttgtatttttagtagagacggggtttctccctgttggtcaggctggtctcaaactcccgacctcaggtgatccacccacctcggcctcgcatagtgctgggattacaggcatgagccaccgtgccccgtctatggagactattattctcagcgaagtaactcaggaatggaaaaccaaacatcgtacgttctcactcataaatgggagctaagctaggaggatgcaaaggcataagaatgacacagtggactttggggaatcagggggaaaggatgggaagggggtgagggataaaagactattaattgggtgcagtctatattgcttgggtgatgggtgcacacaaatttcacaaatcaccactaaagaacttacttacgtaaccaaacaccagctg

SEQ ID NO: 31434 - DNA, 1612 bp, Artificial sequence
  DNA replication origin
gccctgggatctcgcgtgcaggattctccgggactcggaaaggctcgcggggcggcggcgcggcggccgggctcaccgatttcgcgcttgcagaacgcctctcgcccgtccatgcccgcccggcaagcgcaagcgcagagctcggcgccgggctccgcgtccctgcgcggctgactgaggccgaatctgaagctgaggcgcggcggcggcgcgggcggcgagccgggggccggcacaacggcgcgcggccggttggggtgggcagggccggcggggccctcggcggcgcgcgcgcgcggccgggcggcggggaagcgtagggcccgtgagcgcgcgcgtctcggggcttcctccgtcgcgggcccgcggcgcggcgacgcgcggttctcggcttgcgccaggcgcgggcctgtgggagcgtgtgcggcctcacggaaggtggcccggttgtcggccggcggctgaggcctgggcgccccctccccagatccccgctccgctcccagggctccgcactacaccgatcttactttttctctccaccggagcttcgggggatgatccgacgattaaacagaggagccagaaagctctagctgtcatttttgcagacagggttcccaggctctaaaagtgagcctgggcttttgcttgctttctctcctctaaccccttctccacacccgcgtccccgttcatgctaatgaggggcagcctttggggaaacgggaatcactcgctgagcagaccattggaacaaaaccgagccgcagggatttctccctcttccttcctaagggggacgagcacatggcctcgcaaagttgtccccgagaatgtctgtcctgtgatctgcgggcgaggatagcatcacagcctaaactttaaactcgtgtgcgtttgcgcgctgcggtgggggcagcagagggtggggtgacaagtgcggagaataagggtgtttcgggactgagggactgagtgggggagaaagagtgatggccgcttttttctagattaggtcaacaacaaataggaaaatagtgcttaagacagcgtgggtttgtggaagggaggagattccagatgacagagaatgtatcctggaatgtgtatgttaggcaatttctagagacaccaagtcactgcttcctaagtttagtaaaactgtttcattatatatgacagctcactgtaacctctgcctcccgggttcaagcgattctcgtgcctcagcctcccaagtagctgggattacaggcatacgccaccatgccaggctaatttttgtatatttagcagagacggggtttcaccgtgttggccaggctggtctcaaacgcccgacctcaagccatccacccgccttggccttccaaagtgctggaattacaggcatcagccacgacggccggcacagaggtctaattattaatcagaaggttgcctgttgaggccgggcatggtggctcgtgcttgtaatcccaggactttgggagcctgagacaggaggatctcttgagctcaggagttcaagaccagcctgagcaacatggagagaccctgtctctacaaaaaatacaaaaattagccgggcatggtagctcacgccttg

SEQ ID NO: 31435 - DNA, 2167 bp, Artificial sequence
  DNA replication origin
gcccaggcctcagccgccggccgacaaccgggccaccttccgtgaggccgcacacgctcccacaggcccgcgcctggcgcaagccgagaaccgcgcgtcgccgcgccgcgggcccgcgacggaggaagccccgagacgcgcgcgctcacgggccctacgcttccccgccgcccggccgcgcgcgcgcgccgccgagggccccgccggccctgcccaccccaaccggccgcgcgccgttgtgccggcccccggctcgccgcccgcgccgccgccgcgcctcagcttcagattcggcctcagtcagccgcgcagggacgcggagcccggcgccgagctctgcgcttgcgcttgccgggcgggcatggacgggcgagaggcgttctgcaagcgcgaaatcggtgagcccggccgccgcgccgccgccccgcgagcctttccgagtcccggagaatcctgcacgcgagatcccagggcgcccgacccatgcgggccgtttcgctgttgctaaaaaccaacgcccagggactgggagaggaactggggttcccaaactgttttttggaagcagcgatgaacgggatagtgcatgacgtggacgtgctgggcgcgggcatctggctggtgaccctgctggtggatcgggacgggctgtacaagatgaaccgcctgtacctcactcacccccgacgtcttcttcttccgagtccacatgttagtcctggactcctccagctgcaataaaccgtgtccagagtttaaacctggtattgaaactgagctgaatgacgctgcatatgtactttataccaccgtttgtaacgtgggtgccacagcccgggctgtgggtcgtccagtctttttttgggacggatgggggacagtattgtaacatgattaggatttagacgacaggtattatttccgccactgtgatttaagcaccgtcagccccacccccacgggtgagaacggcagctgttggcacaaagcgggctgtcaataaatagatgttgacaaatggagtgagcgaccaccaaacaccattgccagaagggactgtacagaactgagtttagaaaagctgcttttttgggggagtgtgtggagggttggtagcggggaatacccactcccacatcttttttttttttttttttttttttttagacagagtctcgctctgttgcccaggctggagtgcaatggcgccatctcagctcactgcaacctccgtcccccaggttcaagccattctcctgccctcagcctcccaagtagctgggattacaggctgagccactgcgcccagccccactcccacatctttctaggcatgtgctctgggaaatcctgatacaatgtgataaggacctttgttctgtaatgtgggctggttacgtattgctttcccttccccacaccccgtgctactttttgtatttttagtacagatggggtttcaccatgttggctaggctggtctcaaactcctgacctcaagtaatctgcccgcctcggcctcccaaagtgctaggattaaaggcgtgagccactgcactggcctggttgggttggttatcttctaaaggtcgctagactgtttccaccttgcctgtagactaaatatcagtttcaacttgtgcagcaagatagtagattgcagcttaggtatttcttaaaggccttatattttctgtttcatggcatttaaaagacgctatgaattaatgttctggttattttgtccaggcagcaggtatattgtgatgggccacatctaccataagagagggcagcttcctacagctctgctccaggtcctgagaggccatctctgtccaggggatggactgctgaggagcagcagcagctatgtgaaaaggtttaacccaaaaagggaagggcaaattcaaggtgcaattcatacccaatgcatttgaaacaaccatcctggcatttctggatcacaagagacatcggcaacaagacatgaaaggtctatcttcatgtaatgggtcctcctttagaagagagcccaaagctactctatgaatgacctgcatagttacaactgtaatctcgaaggtgtcactttgttatttacaagatgcttcttaaatgggctgctcctgagctcagtgtcaaggtgattcaactgttgtgccag

SEQ ID NO: 31436 - DNA, 736 bp, Artificial sequence
  DNA replication origin
gtgtggaagcacagaccaaaatggacattcgagggcgaacagcagctggcaaagggataagtgatccgaagcattaaagcccttgagacaaattccggcgcgaaccgccagtgggggatgagactcgcaggcgcagccctccaggccccggcggactgacacgcacgttggaaacggagtcacccaccacagccccgcagctccagccaaaatggcgccgccgctctgcccaccccgcgcaccccaggcggccgccgagcccgcgcgcgcgccctgtggagcgaggacgccggggacgcggccagggacgcgcgcgtcctcacggcggttgcacgcctgcgcgagggcgggcggcgggggcgcgcgcgcggcgggggcgggctttgccgagcgcagagctgcagccgccgagccggacgtgtccgcgaagatggcgggccgggtgagtgccggtctgggagcccaggcttgaggcaggggcgccgggctcgcgggcactctggggtccaggcggccccagaggagtgggagtgaatccgagcaatggggcgcgaggccagagcgggacttgagggtagcaggggagcggtggcaggggattagccctcctcaacaactccacccccctcgaggggagatgacccctcgttacacgcgtctgctgcgcctcccgtcatcctcccttcccatcccttggggcttgttccctcgtcctccacacagccgcagggtcgcg

SEQ ID NO: 31437 - DNA, 1288 bp, Artificial sequence
  DNA replication origin
gaagcacagaccaaaatggacattcgagggcgaacagcagctggcaaagggataagtgatccgaagcattaaagcccttgagacaaattccggcgcgaaccgccagtgggggatgagactcgcaggcgcagccctccaggccccggcggactgacacgcacgttggaaacggagtcacccaccacagccccgcagctccagccaaaatggcgccgccgctctgcccaccccgcgcaccccaggcggccgccgagcccgcgcgcgcgccctgtggagcgaggacgccggggacgcggccagggacgcgcgcgtcctcacggcggttgcacgcctgcgcgagggcgggcggcgggggcgcgcgcgcggcgggggcgggctttgccgagcgcagagctgcagccgccgagccggacgtgtccgcgaagatggcgggccgggtgagtgccggtctgggagcccaggcttgaggcaggggcgccgggctcgcgggcactctggggtccaggcggccccagaggagtgggagtgaatccgagcaatggggcgcgaggccagagcgggacttgagggtagcaggggagcggtggcaggggattagccctcctcaacaactccacccccctcgaggggagatgacccctcgttacacgcgtctgctgcgcctcccgtcatcctcccttcccatcccttggggcttgttccctcgtcctccacacagccgcagggtcgcggtcgccgaagccccctctgacgggctctgggggtctttccgcacccccttgcgagggcttattagggggcgccggagtaactgccgggagcacctctgctgcattcggggcaaggggtgtaggaaggatcttcaggaacccatgtctggctcttcacaaattaaaggtcgttgggaaagaggagggggtgccaatgacttttagtgttaaagcccggccatctgggggacctgtcaactgtcgggtcaggcaggaattggctttagcttggagtgaggatggatttggggtgtcacgttttgtttttatggatgacactcgcttcgaatgcagcaggatatgctgtagtttcagggttttaaatttacttcctcctttagcctttaggatcgttgggtaggatgggtttggcgaggagagagagctggttgagtgctgtattgcagtctgccttgagctaaaagctctcaagggatgagtcctgcccggagattacactggtcataaacctgaggacattaactgcgtcattgggggtgaaagatgtgattgactga

SEQ ID NO: 31438 - DNA, 1545 bp, Artificial sequence
  DNA replication origin
cggacggggaaggcacagcggggctgtcagcgccgctcccaggctaatccccgccccgcccccgccgcccccgcgttcccggggctgggaacccagcgcggcccggggcccgggcgccgctgccgccgcgagaggccgcaggccggccggaaacgaggggcgcccgccctgtgaacccgccctcggcccctcttccccgaggcgcccccagggctggggcgtctaggattggggcgagtgagcggcgcggctgggaccccgaggccgggagcacaactggacgcgggacgtcgggcccccttgccgccgtcctcggtcggccctggcagcgcaggcgcggggcgcgggcgggaccagctctgcactcttcgccctcccgtcgttggaagtgggacgggcccctctgtaggtggcgcaggagggcgtgggggccgcggagagcggccgcgggagccaagaggggtcccgggcttccttcttgcagcactcggcccacagcccaggaggggaggcgggcgcctggcttctaaataaatttggtcacatttatgaccaattttgccgactaggccggcccggcgtttcacagcctgtgtcaggtggcgagtcacctccggctcccgggtcctgccatgaggagagagatggttgggctgcaggtcttgcaggccttggcctccctaatcgtcaatgtccacatctataaaatgagtaaaactttccatgtgaatgaagcacatgcagagacgatgaccgttgtgaggaggctggagcacacccttgagagtctctcctttccctgcgctggaccctgggacagaaccaggggaactgcccggtgtccctacccttctgggagggagttggccgtgcctgggcgtgagggcaggagaatggggatggggagactgaggcacgggccactgccctcctggtgaggggctctaggagcggagggaagccgtgtccattttacaaaaagggcgactgagaccgagaaaaggagaggggccgtccctatgcatccacgtgcggaaggggtgggcctgggcaggtttaggctgtagattcccaggcctccctccttacagacctggatctcactcaggcgtgggagggctcaggcctgtgcagggtggtctctggactttgggaaggtggagggcagggggtgtgggaccaggacagaagtggctgccttatctctgcagcaacctgccagaggtttggtgtcggcgcctgtttctaacaggcactgctttgccctgtggcatttgaggtcctgagctaatcagcagcccagggcctcagtttgctcatcggtgaagtgggaatacccaactgggtctaaaccagccaaagagggtggggaagctgcctccctcttgcctcagggctggtgagctcttcaactcttcctggcctcgttcccctcacgtcctggcctgggaggtggaggcagggcaggcgctcccaggccgggtcctgagtgctgcctccccacgacctccccgcagccacccgcgagtcggccttcgttcacgc

SEQ ID NO: 31439 - DNA, 1773 bp, Artificial sequence
  DNA replication origin
ctcacagcccctgctctgcggctccatcccaggcctggtccccaagcaactgcgcttctgccgcaattacatcgagatcatgcccagcgtggccgagggcgtgaagctgggcatccaggagtgccagcaccagttccggggccgccgctggaactgcaccaccatagatgacagcctggccatctttgggcccgtcctcgacaaaggtactgccttggggctgagggggggggaggggctgggtggggggagggatcaggactgtatgcccttccaccccagtcagggtgcctcttctctgaagccagggtccctctgggagggtgataaatttggttgcatgactgccacaccttcccaggcgctgctgggggctgggccgccttgagatgctccaggatcctgaggtttgagggccgacaccaagaaggccacagacttccttcctggcttttgcacagtgggcgcctcaggctcctgctgtggacatttgtgacatttccccaatgctgtgttaagtgctatgcaaataccgctttggggtgggggtgagagcattgccacccctaggtccctcccatctagaaagtcctcagtaggtgaggaagctgcctggtgctgtggtagcattgcgttgcccccaagagcccctctaggtttctgttcatcctcatgccctgtcagctggatatgcccaggaatcatggtggggctagagggtgcactggcctctgggtaactttccggccgtcttgcagcctgggagtctaactggctgtgcctcaagtggacagggaaccacatgatttgactttgaacctgcaggccctgggagggaggctaagtgggacaactcctcccaagaaggggacttgggggctcatggactgggtggaagatgggcagctctttgtggaacggcagtgtccaggaatttaacgatcctggccgggctggccacagccagagttgctctgccacccaaaccgctgagcctggccctccctcctattagaagctagggaatgaatgagagctgcctatacagccagaaagaaaagggatctgacgttcaggtgaaggggtggggtgctgggtggggttgggggggaagctgacaacccccattttagagtgcagttcccctttaccggtgcctcaggtgctcagggtctgtcccacctacaggcaaagtgctggctattgtcatgggacaggagggtaattagcaaatcaatggatgatgattctgtttacgcttctattgccaaaactaattattccttgttgacataaaagatttggcctcttaattggggccaagtggcggcggtttgcatttcaaactcgttcttgtcggtgtgttggtctcagcgctttccggtgcccctcctcgggccaggtagcgctgaatcaaacaaccctgcgtctagacgcgctccccaaaagcgagtcacctctgatcgctcttcccgtctccggccaagagccaggggaaagcggctctgggagcgctacccattcactccgcgttgaacgttttaagtcaccaccgtaggttctggcacacgccccggtccctagatggcccgaggacaggtttgggttgcggggggaggggcgatgtgtgcccgagagtttgggaatttgctggcggcggcgaggagagcatcccggaagacgccgcgagcgcatacgcgccccggtcggtgcccagagcccggaccttgaacccaggttcgcgcccagctccggccccacgtttgcaccccg

SEQ ID NO: 31440 - DNA, 1311 bp, Artificial sequence
  DNA replication origin
ggccagtcgcatttcctgctctcggagtcgggtcactttctcctccttgaggggttcaggcccgacctctggcccgggtcggaggcgtgacccacagcctcagtgggattctcggttggaccatcagggaccggtgaaacgcgcagctctggccgagggcggcccaggtccttggaagaccttgctgccctccggagcgcccctcactgcccgaccgtcccgcctgaggccccggttctactgatagggagctccagcctggggtttggcgataaaggcccttgccctgtgcggacaccaaatgcctccagttacccacccctccccacaggaaaggagtccttccaggcccccttcgggcttgcttcctctcctctccctctccagagcgaggaattaggtctcagccctgggtggtattgacatcatggtcaggttttggggactcacgcccggtcacctgggtgcctttccctaggccccctcccaggccacctgaggcaccaggactctgcgcagccccggtctggggtgaaggaagcactgccggtggggagcagggaccgctgtgtagggaactgtggcagaaagggcagagaatgagccgacccgagtcccacagaggcctggaacggcgggcgttccacgaggtgagggccatggctgaaggaagtcttacgccagggggccagacattcctggcctttgatctgagccccccgtacccacagctccaacctgctgccccttctggtcggcgagccctctccgcacgcggctgctgccggcacagggagcgcggggaaatggcctcgggggcaccaagggtcgggagagccgcctgggcttgtcatggctcctgctgcgttcccagcccattgctggactggagggggtgggaggggaggttgaaagagaggaaggaaggggaggaaaaggagaatccgagaggaggagagagagagaggggctcagagatgagagagacgctgagacagaaaccaagaaaactgtcggggggaggctgagccaccggtgtgaggaagaaaggggcaggggggaggcggagagcaccaaggagctgcaaggcgaagaaaaatcgtgaacctgaccaggagtggtgaacctggtgggggctgcagagatggggatccctagagatgctcctcatggctgggctgattctggggtgccctgtttctgattcacctggaaagagggttaccattgccatgaatgcagagcctcaggaccaaggctctggcagtggagagctttccacatacctccctcttggatggaggcctgcta

SEQ ID NO: 31441 - DNA, 999 bp, Artificial sequence
  DNA replication origin
atggggttgttttttcttgtaaatttgtttaagttctttgtagattctggatattagccctttgcaggctgtaaattctaagcagcaggaagtaggtgtgagtagaagtggaggcagaaagcagccggttctgtttccaactgcattctcctttcctgtgcccctgtgtcatcaccatggaacgcctttcccgatgctacttccaacaggaggcagagggtgggagaattcaggttggaaggcttatccctaggaaagagggtgccgacagacaaggctccttggaagcctgacaaatcaaatttaccatttattgagcacctactatgtgacaggaacatgacacgcatgatttcatttaatcttcacaaccagcccaaagagcagctttctccctatttacagtcggagaaacggaggctctgagagattgtaagggacttgcccacggtcacccagctaggaaggaaagccagaaggccagcctaggtatcctggcggtcctggatcagagacactgctgtgaggcttcccggtgggaagaaggaaagtcatgcatcgatattcatcaccgagtgagagtgagagttcagccctgtcccaggcacctctgggcgggagggtggagaatccgaaagaaagaggcccgtccctggtcctcaaggtcgtgccaacaggccaactaagccatgtcccaaattgagagcgggttaaggtgggggcgtggggacgccctgacgcaacagggcttcggagaagggagcgctgggggctgcaatgccagaggattccttgaggagaaggggctggtggggcgggtaggggctggccgggagcaggaccgggaggaactggaccctctggactggggagtgcggggtagatgaaggcagaggagatggaggttctgcagtgtgaggcaggcggacagggaagcctgcatccagctgagagaccttgagcaaccacgtcctcctctgagctccgcgtttgccgtgt

SEQ ID NO: 31442 - DNA, 1613 bp, Artificial sequence
  DNA replication origin
cctcggcggggccaaggacagcgggagggaaaaattggcccagctgtagcgcaggagggagagacaggcaggccggggagcgggcggggggcgcggcgggcactgacccgaagtaggaggcggcggcggcgggcagcgccagcaggcagagcccggccagggccagcgcgggcggggggcgcatggtgctggcggcgctgcgccctctagcatctcctcgcgccgctcaagctcgcagctccgccaccacccgcccgcgggactttaaacccgggtggggcggggcaggcggcgctgggaaaggaggagattgggaggctccccagccccgggcggcgagccccccgccccattggccccaccgccctcgccccgccccgtcgcgggtggggcagccgcccctggaccgcccccgcccctcccccattgccccgccctccggccccaggtgagcgctcacctggcgccgcgcccgcccggggtcgcggtggctgaacgtgaagccccccgggcctggagaggcggggaggagggtacgaggcggggacggaggagattctgcctctccgggatggggcggaggcaagcgcaatggcttctccgaggtagagaaggtggaggggtaggaggagggacgcatctggagtcggtggaaaacccgggtcattgtccgccctcctgccgggcaagtgcggtctcttcgccgcagcccgcagactcagggcagggccgggtcctggtgcagaaccgctctctggaagcgggggaaatgcatgtccaatggctcaggggaccctgttgccaggcaaagagtcttgggcagaggggagagaggaaagggcgctctgtttttaaacgggagagtgactgttaccggcgaggcgcgcagcgtgggcctccgtgggcttttgacaaaatgctgctgatgttccccagcgcagaaatccaaagtggacagtggggcagacagagccctgcgggaggagggacccactttccaaggtgtgtagatgccagaatctctggtagatagggtgggaacttcaagtgttgggccccaaagttctgttttgcttattattttttaaagtttaaccccaatttctgctgcgaaggtgcagagatcaaagcggcgcgtggtacctgtctagaaaggagacatacaaccaatgacccaagtgagatttaaaatgtttttgagagtctcgaacacggggtcaaatcaagcaaaacaaaatataacttgcaatgaatgtcaagatctgcatgtaaagtttccaaaaaatcagccatgcatagggaacatcaagtgactgcgaccttggcttttcagtggacaccagcatggtagggggctgagagaggtgttgagggaggtgttgggaagatggtggctaccgtgttaggtggcattaacagaggaagcccccacctctttgagcctctttgagctcagtttctctgtcaaatgagcgcagtgattacatgatctgatgattcctaacagctctgccagccctatcaaatcccatggttctacttattgaggccacatggcccaatgtaatgtgcagagacctggagtcaaatcatgtaagttatgagccccatat

SEQ ID NO: 31443 - DNA, 794 bp, Artificial sequence
  DNA replication origin
gctctctccccagtgtcacctaccccactgtcccccaggtgtcaccccccactgtgatcctccttttccaaccatgtacacacacacacacacacacacacacacacacacacacacacacacacacactgggccctctcactctttccagtgttctcctgagaaatcaccccatgccaggtctgagatgtggtcgcatttccccagcgcacggttccttcctgcgtctccagctggcgctctcaccgtccgaggtttcccccattctccctggacgcgcacgatcctctgccccgagaccgggaacagcccgtcccacccatccacccagccctctcggtctccgctccgcagggcgaaggcggagggtggggaaggagtccgaggcaaggacggctcgccggaggccaggatggcggcagacagggcaccggcgtgaggatcccgagagggcatcagagagcgggactgacgcctgaacgggcggggccggggcggacggggccagggtccgaggcgtgcgcagagtccgagacccggcgggatgaggagagcggcggctggggggcgaccagagactcggacactgaacagggcgatggattcggagccggggaagctggagaccgaactcagggcgcgaactccgactgcgaagtgggttgggtcgcgccgggctagggtctgagttcgagacctcggcggggccaaggacagcgggagggaaaaattggcccagctgtagcgcaggagggagagacaggcaggccggggagcgggcggggggcgcggcg

SEQ ID NO: 31444 - DNA, 1190 bp, Artificial sequence
  DNA replication origin
ctctccctcctgcgctacagctgggccaatttttccctcccgctgtccttggccccgccgaggtctcgaactcagaccctagcccggcgcgacccaacccacttcgcagtcggagttcgcgccctgagttcggtctccagcttccccggctccgaatccatcgccctgttcagtgtccgagtctctggtcgccccccagccgccgctctcctcatcccgccgggtctcggactctgcgcacgcctcggaccctggccccgtccgccccggccccgcccgttcaggcgtcagtcccgctctctgatgccctctcgggatcctcacgccggtgccctgtctgccgccatcctggcctccggcgagccgtccttgcctcggactccttccccaccctccgccttcgccctgcggagcggagaccgagagggctgggtggatgggtgggacgggctgttcccggtctcggggcagaggatcgtgcgcgtccagggagaatgggggaaacctcggacggtgagagcgccagctggagacgcaggaaggaaccgtgcgctggggaaatgcgaccacatctcagacctggcatggggtgatttctcaggagaacactggaaagagtgagagggcccagtgtgtgtgtgtgtgtgtgtgtgtgtgtgtgtgtgtgtgtgtgtgtgtgtgtacatggttggaaaaggaggatcacagtggggggtgacacctgggggacagtggggtaggtgacactggggagagagccggacaggaactatgtggggaatgtttggagcaaaagttatagggcaattgtttccagtcccttcttctctgaccctgaattgcagggatttggtgagggatgggggcgggtatcatgggtaagaaggcaccttcccaccatccacccaaagccaactccaatatgtacagcctgttactttaagccttgcctccttttaaaatcttcaccccaaatcaataggaggcttacagtctgagtatatacagcaaaggcaagaaaacaccaagcaagtgacctgctagaggctgctttgaagaagtagccagggagaggtatgtaaaggtctgagaagttctgcacaggttggagtaagggctgtgggctaatttccaggtcatgacccctggtggaaacatgtctgggctgtggaggagggtatcatcccaga

SEQ ID NO: 31445 - DNA, 1524 bp, Artificial sequence
  DNA replication origin
tgtctgcagtccccagatgtgtggtagccccttggcaccatgagctgaactggcaggcacttggagggagggtcaagcagaaaaacagaaaaaatctgaattttcaatgatgcctttgggcccctgaattgaccaatccagaggttccctacctctggccttcttatgtgaaataaattttccttcttatttcaggtagggcttccaggtacttgtatcctgattgatgctgtcactctcactggaaaacaattggaaggtaagaaccatggcttccacctctctggattccagtaccctacaccaaatctggcttattataggtgctcaacaggtgggcggatgtatgggtgggtggcttaatggatgtatgggtggcttggggagtagatggatggatgaatgggtgggtgagtggatggatgggtggggtggttggatgggtgggtggatggatggatgggtggggtggatagatgggtgggtgggtagatgagtggatgatggataggtgggtggatgtagggatgagtgggtgggtagatggatgaatgggtggctgtatgaatgtatgaatgggtggtcgggtagataggtgggtagatggatgaaagggttggatgtgtgtgtgggtggatggtggctggctggctaggtggatgagtggctggataaatgtatgggtgggtggatgggggttagatagatgagttggtggatgggtgagtgactgggtagatgaatgtatgggtggctagatggctggatggatggctgggtaggtggatgtgtagggtggctgggtggctgggcagatgaattagtgggtagatgggtggatgggtggctggttagctggatatatgggtgggtgggaaggtgggtagatggatgtatgggtgactggatgggtaggtgggtggatggatgggtggatgaatgggtgggtgggtaaatgagtgagtggatggataggtagatgggtggatggatggggtggatgggtggatggatgtggttggtgaatgggtgggtggctgactggctggctggataaatggatggatgggttggtgggtgcgtgggtggctgggtggctggctgactggatggatggatggatggatggatggatggatggatggatggatgggtggatgggtggctggacggatgatggatggatggatggatggatggatggatgaacgggtagctggctggctggttggatggataggtgatgggaagatgtgcaggtgagtgggtgggtagatggatgaatgaatgtgtggatggagctcaccatctctcatggcaaccttatcacagcatctgctcttctagttctcattgtattctcaattcaggttagagtggactgaagaggcataaagtttcaaactcaggagacttgcatgaagccttcacatgaacacaggcctgttctccacttggagatgacaggaaactttcccaacaaaggcctcagaaacagtgtccttgcctggggtttcctgcaga

SEQ ID NO: 31446 - DNA, 864 bp, Artificial sequence
  DNA replication origin
ggcttggaggaggtggacggcgtgggcggcggcgccggggccgccctgggaaaccgcacccacgggctgggcacgtggctgggctgctgtccagggggcgcaccgctggccgccagcgacggggtccccgcggggctggcgcccgacgagcgcagcctgtgggtgtcgcgggtggcgcagatcgccgtgctctgcgtgctgtcgcttaccgtggtcttcggcgtcttcttcctgggctgcaacctgctcatcaagtccgagagcatgatcaactttctggtgcaggagcgccggccctccaaggacgtgggcgcagccatcctggggctgtactgagcgccatctgggtccgccctcgccagcgctgctgcaagaaggaccccggagacccggaccctcgccccgctctctgcgctctgccgccgcctccgggcgggcagctacgtgcctggggcgcccgggcggggacgcggcgagactgtcggcgggggcgcgggaagggacttggacgcccggctctgtcctgtgtgcgctgcagcgttgcggggtgggagaatgtggggtgagggttcttaccagttttttttgtttgtttgttttttaagacgttcggggcagggtgggagtgggtatggagatgcaatttgggactgcggtcgctcgcgtgggagttttgtgtgtacgttggtgcgggtgggttcggaacacggtgcgagtgggtgaagatgtgaagcgtcagagtcgctgagcttgttggcctgatcttgcgtttggaaagaaatcttgtaataaaactgcagccgtagggcttcaggcagcttcccacccgcgcctgtgaggtgtgtgtgtgtgttgcggggcgga

SEQ ID NO: 31447 - DNA, 1161 bp, Artificial sequence
  DNA replication origin
cccggaactccagctggcctgcaagcaccgcacgcagtcccggttcccgctcgcgcctctccctccacacctcccttcaagctgagggagtgggctccagccttggccagcccagaaaggggctcccacagtgcagtggtgggctgaagggctcctcacgtgccgccaaagagggagcccaggcagaggaggtgccgagagcaagcgagggctctgaggactgccagcatgctgtcacctctcactaccccaccatatttctaaaaactcccaaagtaagattctactttgcctagtttgtcctcaattgagcagttttgtctaagcccagagtttctgctgggccagactatggataagctgtctctcccaggctggtgcccatgcctgcctgtagccggggggggggaggggcacccggggtcatgtggaacaaaacatgactgcctagggctgcctctgtctccatctcactgatcgcaaatcacagttcagacagccagctcttaagtgagacctgagtgccagagagaggtggatacgaggccaacagttactaaatgaatgaaaattgtgattccaacgaagcctgccagagaaataaagcattttttaaaagatggaaataagccgatatctgattagggcaaacatgatgcagacaagaaatgcactggttcagaggagggaaggtcaggccgcctggggagagtccatgaaaaagatggaacgtgccagatgctgtgcctggtgctgggaaagagttgactaggccagcatccctttcctcaaagggctcctagactggggggagggctggatatctgaatacatcctgaggagacagtgtgggacagcatggtggcagtggagccagccgtggttctgctcttggtcggctggaaaggagacgtaagggatggcttagaagaagggaagtggaagaaaagttttctgagctgacaagaggaaggaaagggcttctagaaggacactacaaaggcatagaagccctaagcagagtgaccaccagactccacaggttaagggctcagtcacatcggaccacccccacgtcagaccccaggtgcaaggccaagcatcacctatgcatctgaccaactggctataaattggaggtccccaaaactccctcctcag

SEQ ID NO: 31448 - DNA, 1134 bp, Artificial sequence
  DNA replication origin
gcaccagcttccctctcccctttctgtcccgccccatcgctctgacggacaccatcagtcagccaatggcgctcacgatgtgcccctgaagggccaatgagcgccagaggagggcggaagattccccgcccccacttctaggcttggttgagccgcgcaggaaggtccgaggctgggggagcagccgttggctctggtgcccctgggggtgggagcacgagtgggcaaggatgatggtgaggcagaggaggcggccccgagggagcgcccggctgagaggcggggggccgaggggcccggggagcgggcgtcaccgagggccctggaagcggcagggctgggggagaggagacgcgtgtgtggagcatggggaccccagcccagctcccacttgcagacctgggccgcgggctgccggccgagtggccggggggcctggctgcccaggaggcgggccggggccgcggccgggggcgcggagcggagttagggtcgccaggccgagccgaggtgggacggaccgacgcagagaggaagggaagccacctggcctgaagatcctgtctctaagatcccattctgaggtactgaatgttaggagtactacatatctcctttttttttctttttctttttttttttgagacggggtcttcctctgtcatccaggctggagtgcggtggcacttggatcactgcaacctccagccccctcatccccgggctcaagcaatcctcccacctcagcttctcgagtagctgggactacaggtgcgcactaccacacctggctatttttgtgtatttttagtagagacggggtcttgccatgttgcccgggctgatcttgaactcctgagctcaagtgatcctgtggccttggcctcccaaagtgctgggattacaggcatgcgccactgtgcccagccccctggagtactacctatctcttttagggaacaaaagtcagcccagaacaggtgtatgtcatttatcatgggtactagaccctcaacacctacacataggaaatgaaaattgatagcatgaattaaagtagattatttctttagcgtctcatgtattcttaacaagatttttgttttatctttgaaactttttttttgagacgga

SEQ ID NO: 31449 - DNA, 864 bp, Artificial sequence
  DNA replication origin
gtctcaaaaaaaaaaagaaaaagaaaaaaaaaggagatatgtagtactcctaacattcagtacctcagaatgggatcttagagacaggatcttcaggccaggtggcttcccttcctctctgcgtcggtccgtcccacctcggctcggcctggcgaccctaactccgctccgcgcccccggccgcggccccggcccgcctcctgggcagccaggccccccggccactcggccggcagcccgcggcccaggtctgcaagtgggagctgggctggggtccccatgctccacacacgcgtctcctctcccccagccctgccgcttccagggccctcggtgacgcccgctccccgggcccctcggccccccgcctctcagccgggcgctccctcggggccgcctcctctgcctcaccatcatccttgcccactcgtgctcccacccccaggggcaccagagccaacggctgctcccccagcctcggaccttcctgcgcggctcaaccaagcctagaagtgggggcggggaatcttccgccctcctctggcgctcattggcccttcaggggcacatcgtgagcgccattggctgactgatggtgtccgtcagagcgatggggcgggacagaaaggggagagggaagctggtgccttggcatttctgtgtctgtgtatctgtctgtctctgtctctatctcggcccttggaaacgagaggcttttggccgagaggactagaagggggcctgaggtgggaggaataggaataggaatcccggcaaagcgtcacgccagtcggctactctgaaccccctacctaagtcccctttaggttctcttctccatcacccccaacccctgcccctcac

SEQ ID NO: 31450 - DNA, 900 bp, Artificial sequence
  DNA replication origin
gtcagaccatggcgggacagcgcaccggagaatgaacagcgattagggaagagtggcgagcgggtggcaaggacggagggcggaatcccggccggggctgcgggaggaaagcgcacggacaggagccccaccgctcgaatgcagcgcccggcggctggcctcgtgaggtcacaggcccttacgaggtggggcaggcaggcgcggccgcagtgccttccagtcagcgcggaggcggtattgagttcagccgctccccacagccccggagcccctgggcggtggcggtggccgcggcagcaccggctcgacagccgatagggtcctgggcccgctccgctcggggtggtcggtgggcggagcgtcgggctcggtcaggtgaccgcgggggcggggccgcgcggcgcgggatcctgggaaggctgcagagctagagcagcgccgcccgaggggcggcaggggctgaccacagagagcgcgggggcctccagccgagaggaagggagggcagctcgggccggtagtgggacccttgggggacagaggtggggaggggaggcgagacccgctgaggagttgggaggggagccttcgaggtggagggtggagaatgcagtagggtgcgagggaggaaggagaacagtggtggggctgggtgaaggaaggttccagaaaggaacagtgaggggactgagtgggacaaaggggcagattgaagggtgactgagactgatcaggtggttcctcagaaatggtggttgttgtagaaggctggcggtcccgggggtggtgtcacttccctgctccttcagcgggaggcggagacctctattagcacactcatttccatcttgcgggtcgttcactcgctagcttacaggtcctctttcttcctgtagaagt

SEQ ID NO: 31451 - DNA, 905 bp, Artificial sequence
  DNA replication origin
ggcagctcgggccggtagtgggacccttgggggacagaggtggggaggggaggcgagacccgctgaggagttgggaggggagccttcgaggtggagggtggagaatgcagtagggtgcgagggaggaaggagaacagtggtggggctgggtgaaggaaggttccagaaaggaacagtgaggggactgagtgggacaaaggggcagattgaagggtgactgagactgatcaggtggttcctcagaaatggtggttgttgtagaaggctggcggtcccgggggtggtgtcacttccctgctccttcagcgggaggcggagacctctattagcacactcatttccatcttgcgggtcgttcactcgctagcttacaggtcctctttcttcctgtagaagtcgttggcttcgtaagagcagggtctatgggaagcctcctcagcgtgggttcttggaagaggtggaggttcgttcactcgacgtttgttacacaaatatgaaaacagggtgacgaaagtttgaacgttcatgaatggcagtagctgcaatggagttgtgtatgcagttggtattaatgacgttttcagtccctctggcgagagaaaagcgagcgagtcgggcggcttgtgagggaaatgtggcatgagaggaaagaggaaggtattttgtgaaaggatgtcatacagagtcatgcttcagtgaagacgcctttgtttttctcatcttaaagcctcacagccccattttcctctcagctactgccttatttctcttaacaacgtaactccttgaaagagcctaccctactggctgggttcaatttctttaccccgttctctcttgtactcactctgacgacattgtctccttaccaccccacccagatggctcctttcaagtttgtcagt

SEQ ID NO: 31452 - DNA, 1265 bp, Artificial sequence
  DNA replication origin
gggtacacctcccagacggggtggtggccgggcagaggggctcctcacttcccagtaggggcggccgggcagaggcgcccctcacctcccgggcggggtggctggccgggcggggggctgacccccccacctccctcccggacggggcggctggccgggcagaggggctcctcacttcccagtaggggcggctgggcagaggcgcccctcacctcccagacggggtggctggccaggggggggctgacccccccacctccctcccggacggggcggctggccgggcggcgggctgaccccccaacctccctcccggacggagcggctggccgggcaggggctgatccccccacctccctcccggacggggcggctggccgggcggggggctgacccccccacctccctcccggacggggcggctggcctagcgggggctgacccccacctccctcccggatggggtggctgctgggtggagacgctcctcacttcccagacggggtgactgccgggtggaggggctcttcacttctcagacggggcagctgccgggcggaggggctcctcacttctcagacgggcggttgccaggcggagggtctcctcacttctcagacggggcggccgggcagagacgctcctcacctcccagatggggtcgcggccgggtagaggcgctcctcacatcccaggcggggcggcggggtagaggctctccccacatctcagacgatgggcggccgggcagagacgctcctcacttcctagataggatggcggccgggaagaggcgctcctcacttcctagatgggatggcggccgggcagagatgctcctcactttccagactgagcagccaggcagaggggctcctcacgtcccagacgatgggcggccaggcagagacgctcctcacttcccagacggggtggcggccgggcagaggctgcaatctcggcactttgggaggccaaggcaggcggctgggaggtggaggttgtagcgagccgagatcatgccactgcactccagcctgggcaccattgagcactgagtgaaccagactccgtctgcaatcccggcaccccgggaggccgaggctggcggatcactcgcggctaggagctggagaccagcccggccaacacagcgaaaccccgtctccaccaaaaaaatacgaaaaccagtcaggcgtggcggcgcgcgcctgcaattgcaggcacttggcaggctgaggcaggagaatcaggcaaggaggttg

SEQ ID NO: 31453 - DNA, 903 bp, Artificial sequence
  DNA replication origin
gaagtgaggagcgtctccacccagcagccaccccatccgggagggaggtgggggtcagcccccgctaggccagccgccccgtccgggagggaggtgggggggtcagccccccgcccggccagccgccccgtccgggagggaggtggggggatcagcccctgcccggccagccgctccgtccgggagggaggttggggggtcagcccgccgcccggccagccgccccgtccgggagggaggtgggggggtcagcccccccctggccagccaccccgtctgggaggtgaggggcgcctctgcccagccgcccctactgggaagtgaggagcccctctgcccggccagccgccccgtccgggagggaggtgggggggtcagccccccgcccggccagccaccccgcccgggaggtgaggggcgcctctgcccggccgcccctactgggaagtgaggagcccctctgcccggccaccaccccgtctgggaggtgtacccaacagctcattgagaacgggccatgatgacaatggcggttttgtggaatagaaaggggggaaaggtggggaaaagattgagaaatcggatggttgccgtgtctgtgtagaaagaggtagacatgggagacttttcattttgttctgtactaagaaaaattcttatcctgttgatctgtgaccttacccccaaccctgtgctctctgaatcatgtgctgtgtccactcagggttaaatggattaagggcggtgcaagatgtgctttgttaaacagatgcttgaaggcagcatgctccttaagagtcatcaccactccctaatctcaagtacccagggacacaaacactgcggaaggccgcagtgtcctctgcctaggaaaaccagagacctttgttcacttgtttatct

SEQ ID NO: 31454 - DNA, 1271 bp, Artificial sequence
  DNA replication origin
cacagacacggcaaccatccgatttctcaatcttttccccacctttcccccctttctattccacaaaaccgccattgtcatcatggcccgttctcaatgagctgttgggtacacctcccagacggggtggtggccgggcagaggggctcctcacttcccagtaggcgcggccgggcagaggcgcccctcacctcccgggcggggtggctggccgggcggggggctgacccccccacctccctcccggacggggggctgaccccctcacctccctcccggacggggcggctggctgggcagaggggctcctcacttcccagtaggggcggctgggcagaggcgcccctcacctcccagacggggcggctggccgggcggggggctgacccccccacctccctcccggacggggtggctggcctggtgggggctgacccccacctccctcccggatggggtggctgccaggcggagacgctcctcacttcccagacggggtggctgccgggcggaggggctcctcacttctcagatggggcggctgccgggcggagggtctcctcacttctcagacggggcggccgggcagagacgctcctcacctcccacacggggtcgcggccgggtagaggcgctcctcacatcccagatggggcggcggggcagaggcgctccccacatctcagacgatgggcggccgggcagagacgctcctcacttcctagatgggatggcggccgggaagaggcgctcctcacttcctagatgggatggcggccgggcagagatgctcctcactttccagactgggcagccaggcagaggggctcctcacgtcccagatgatgggcggccaggcagagacgctcctcacttcccagatggggtggcggctgggcagaggctgcaatctcggcactttgggaggccaaggcaggcggctgggaggtggaggttgtagcgagccgagatcacgccactgcactccagcctgggcaccattgagcactgagtgaaccagactccgtctgcaaccccggcaccttgggaggccgaggctggcggatcactcacgttaggagctggagaccagcccggccaacacagcgaaaccccgtctccaccaaaaaaatacgaaaaccagtcaggtgtggcggcgtgcgcctgcaattgcaggcacttggcaggctgaggcaggagaatcaggcagggaggttgcagtgagccgagatggcagcagtacagtccagcttccgctcggcatcagaggg

SEQ ID NO: 31455 - DNA, 976 bp, Artificial sequence
  DNA replication origin
gcctctacccggccgcgaccccgtgtgggaggtgaggagcgtctctgcccggccgccccgtctgagaagtgaggagaccctccgcccggcagccgccccatctgagaagtgaggagcccctccgcccggcagccaccccgtctgggaagtgaggagcgtctccgcctggcagccaccccatccgggagggaggtgggggtcagcccccaccaggccagccaccccgtccgggagggaggtgggggggtcagccccccgcccggccagccgccccgtctgggaggtgaggggcgcctctgcccagccgcccctactgggaagtgaggagcccctctgcccagccagccgccccgtccgggagggaggtgagggggtcagccccccgtccgggagggaggtgggggggtcagccccccgcccggccagccaccccgcccgggaggtgaggggcgcctctgcccggccgcgcctactgggaagtgaggagcccctctgcccggccaccaccccgtctgggaggtgtacccaacagctcattgagaacgggccatgatgacaatggcggttttgtggaatagaaaggggggaaaggtggggaaaagattgagaaatcggatggttgccgtgtctgtgtagaaagaggtagacatgggagacttttcattttgctctgtactaagaaaaattcttatcctgttgatctgtgaccttacccccaaccctgtgctctctgaaacatgtgtactcagggttaaatggattaagggcggtgcaagatgtgctttgttaaacagatgcttgaaggcagcatgctccttaagagtcatcaccactccctaatctcaagtacccagggacacaaacactgcggaaggccgcagtgtcctctgcctaggaaaaccagagacctttgttcacttgtttatctgctgaccttccctccactattgtcctatgaccgtgccaaatccccctc

SEQ ID NO: 31456 - DNA, 949 bp, Artificial sequence
  DNA replication origin
catcgcggcgaggcccaggctgtggaggcggcggcgagaggagcggctgaagacgagaaggaggaggggaggaggcggagggccgaggaagagcaggcggcgagcgagggagggggcggcagctgccagccacatccaccgagcgcgggcgaccgccggaggagagcgaccgggggagcctggggggcgggggagagacccagccggagcgctaggggctgggaaggaggcggtgcgggcggactggcgggcgggctgcctacggggaagggggcggaggggagggaaggggaggagggcccgcaaggagggagggagagggggaagtggtggcggcggctgcgtgcgcggccccgccggccgggcgcgcccccgtggagtgcgcgcgcacgcctgggcagagggcggagcggcgaggacgagggcgcggccggcggggcgggagggcgtcgggttgctcgcgcgagcgcagggctggaggcgggcgctgcacctgtcggcgccgctcaggactgggggcggccttccaactggaaggagccgggaagggcttgatcagaggaaggaaaggcataaggggccctcgggaaattgaagcctacgcagttggtcagttcagccagggtcgcatgcataaaataccagttacaagcaaaaccccaaactggattctgcctccaggtcagcgaaaagccctgacttgaggctctctggccttagttcctgttaagtagcaaattcaaaggatgatttgaaagttttgttataaaacctttaatagccgggcgcagtgtctcacgcctgtaatcccagcacttcgggaggccgaggcgggcggatcacgaggtcaaggagatcgagaccatcctggctaacatggtgaaaccccgtctctactaaaagtacaaaaaattagccgggcgtggtggcgggcgcctgtagtcccagc

SEQ ID NO: 31457 - DNA, 1067 bp, Artificial sequence
  DNA replication origin
cgtcttcagccgctcctctcgccgccgcctccacagcctgggcctcgccgcgatgccggagaagaggcccttcgagcggctgcctgccgatgtctcccccatcaactacagcctttgcctcaagcccgacttgctggacttcaccttcgagggcaagctggaggccgccgcccaggtacagcgaccctcgggccccggggcaagctgcggggcgagcagttaggccgcgcccgcgggctggactcagggcccggccgggagggcgggcgggcctcgggtcggggctgggcggccgcagggcgccgggttcggcgtgctctgccttgctctgttggggctggggctggggctggggctggggccggggcagggaccgtggccggagctgaggctggggctcgggctggggccgcgctgcgggagctctggggagccggcggcccggccattgcgcccctccccggcgagcacacctgtgtggggctttcccccccgccccggacccttctgggcttgatagtgttccgggggaggctggagggtgttgggggaggacggagaggtcatgggagtccccgctctgcctcaaccacctgactcagttctttctttggtttctctctacacctctcgggtgatagattggagggggtggtcatttgggactctggccgccgcgttggagcgacgaggggagcttctagaaggggggggagagggtgagaacgagaatgttaatcccaggcagcctcgctgacttctccccgcctgctccagcccaggggctgggtttccaagatgatccgccccctccccctttccctcaagtgacagtgcagcagtgactttgttctctcttaacctccagagaagctgcgggaggaccccatctccgcttttccacctatcttcctagctttgcggccttcgaagctggtggatttattgctaccgtgatggttgcttagcagtaccttcctctcccaagaagctggctgggcgcggtggctcatgcctgtaatcccagcactttgggaggctgaggcgggcgcacttgaggtcaggag

SEQ ID NO: 31458 - DNA, 978 bp, Artificial sequence
  DNA replication origin
ctccgcggaggcgccgcgctccacgacgattggccgttgtcctggccacgcggaatccctaactggccaggcgctcagcgtcgaagggccgtctcgcgcccattcgcctgctggtttcaaggcccgggttggctgggcgggcagcggaatggagcgcgcggattggccgaggggagggagattgggatggggtaggagagagcccgccgttgattgggtgggcttggtaaaggccttgagctcagaccggctgagcgctgggaggagggtggaccggaggcacgactcggatcctgcgcgattggctgggatagtaggcgttgataggatagggtgcccgggagaactaaggagaggagttcggggtcggggcgcgggaaggcgggaggtgcccggcaaccctaggagcccggcgcggggcacgatgggacgcccccgggaagaggcggagctgggttcgagcgctggggctgcggttgggtaagcgccgtcgctccgaggggcgtgttgcgcgaggttttcgcgggcctgagcgggggaggggggactgttgaagtcctgcgccgcgcccacaggaagctgctttaatggctaggtcggcttggtaccctgctttcggctgggagggatccgtaaggccatgtggctccactgccaatgtgtagatgtggaaactgaagcccagagagggtatggaacttgtccaaggtcacacagctggttaatggcttggtaaggaatgggttcaggagcccagagagggtctggaacttgtccaaggtcacacagctggttagtggcttgataagctcaagctctcctgacggcccttgtccctacaagcagcttcctctccaaggagtcccctaagcctgcttatatggggcttgagacctgtgctgtgataaatctgacttgcttaggggtgagctaagggattcctcctcttagaccccccatccatagctaccaggtact

SEQ ID NO: 31459 - DNA, 992 bp, Artificial sequence
  DNA replication origin
ggggacgcggcgggatgggcgcggcggggtagcacgcaccaggttctccacggccgcacgctccaggaacttctgcgccgcttccagctccagccgatctagggggaggaaagtgggagacggagcggggtcagaggggccgggcctcccctcccccaccccaatcacctcagccctacccccggctcctgcgtcctaccgggagacacggtcttctcgagaatggtgatcagctccatggcggaggtggcggcggcggcgactcctcctaagacgacggcccggcctttcgggcggcggctcgaactggggatgggggttgggggtcgggtgggaagggagggtggggtggggggcgggggtcaccacaaacccattcaccggctctgtctgggtagtcggtccggctccccttcctctcctcttcccttacttcctccctccaaatgggctgctggcggcgggggagggaccctgggggcagctcagagcgcgctggtgctcgggaggcggagggagaaagaaggaagggaggctgtgagtgagaggcggcgcgcagggagggagcgagggagggaggaaggcggagggatattcggaccggacctctccgcggaggcgccgcgctccacgacgattggccgttgtcctggccacgcggaatccctaactggccaggcgctcagcgtcgaagggccgtctcgcgcccattcgcctgctggtttcaaggcccgggttggctgggcgggcagcggaatggagcgcgcggattggccgaggggagggagattgggatggggtaggagagagcccgccgttgattgggtgggcttggtaaaggccttgagctcagaccggctgagcgctgggaggagggtggaccggaggcacgactcggatcctgcgcgattggctgggatagtaggcgttgataggatagggtgcccgggagaactaaggagaggagttcggggtcggggcgcgggaaggcg

SEQ ID NO: 31460 - DNA, 1447 bp, Artificial sequence
  DNA replication origin
cccaccccgcgacccctggggcccagcccgggcgccgctcccctcccccagccctagccccagccggggactcacagctgctgccggttcctgcttgtaatcgcagcttaccccctccgcctgctccctccccaaacgggcaccagtgcccccacccccctggtaccgcgctctgctcctcgccctgtcgccgccgccgggtctctccccaccccccacccctccccccaaccccctccctcccgtccgccccgctcctcctccgccgccgccgcctcctccgcctcctcctccccggctgctccgggtttctccagctgggaaggcgccccggaccccgccgctgccaccaccacgtggcgagaggcggcggcccctacggtgcggcccttcctggcagcgcgcccggagcccaccggctccctgcggcgccagcggcccgcgctggcgccccctccccgacgcctcccggcgcagtgtggcgtggtggcgtgtgttgggggcgtctgcggtcagtgcaggggcccggctgatgctttggttgttttggttgtttagttatgggctgtatatttggggaggaagtggggctatttatctggctttttttttttttttttggtctttgcgcttttgagaaggaaatcattagacctgctcttcgttgctcttggtaaaaggggcattgctgcgataaatacattgaacatagggtacagagagattaaagctgtaacttctttggaagtgagagtaaactaaggaggtcaaagattcattcatgaagaaggacagccatctccctccccacacaccactccccggccaccctcaagtacccacaggtcagggaaatgaagaaacaacagatgtcaccctgtgcacaaagattatttgagcacctgccaaactgctgggcaagagaaacaagttttttgctactttcctgctgtgtgaccttgggcaagttaccttaacctttctaagctggagatcatgccccacctaagcactctcatggaggaagaatggggatcagaactaaatacagcagcctgcgaatgctcaggaagtgttaacgatgtcattttgagtattgcctggtggattaaataatgtggacagaggcatggtcagcctagctgcaggtagagaatgatcaggggaaccctggagcactctggctgaagagcatcctctgtggacagggaggcaaagcccggaagcaggggataagctgggcgggggcttttggcagattcagccttagctgcgaagactgctgggaacctgagcctacctttttggctcctgaggtgggatgggggtgggaatctccgagggggaggatggaaggaaaaggtttcttgctctctctgagctttgaaaagcagcagctgccatctttcctcactgctgggagaaaattggactgagaggtgagctt

SEQ ID NO: 31461 - DNA, 748 bp, Artificial sequence
  DNA replication origin
ggccccaggggtcgcggggtgggcaggaggaggcggcaggagggcggctggcagccgcacgggatggctgggagggaaggggtccggtgtcggccgccctcatcccctcgcgtccccctccgccgccgttcctcaggccgcgccactcccggagccccttccccggccccgagagggtgtccgggggcccagggctcggccggttgtgggggagggggctgcgtggtctcggcccccgagaggggaggggcgacaatttctgtcggccgagcgaaaggggtttaaagggcggctcttaaaggggccgcaggaggggcccgggccgacagaggcactcaccccttccccagccgccttccattgcgctcacccgggcgctgggcccagagaggaatgcggaggaaggaggcatttgtggtgcggcctcggggacagagccccgccagcggggtgggcgcagaggggcgggcgggggtctgggggggtgtggtaagcgctggcgcgcggagctggggggaggggatggcgtgggaaggagagggttaaaggtggggccggccctacaaacgcgcgcacacactccttactcagacccagtcactcgcgtttccctggcacttagatgggcctgtgggtggcggaggggggggggtggattgaattggagcctgcgccggagccctttgcaccccaagctcctgcagcccgacctgggggccccgctgtctgaactcacagctccctgccg

SEQ ID NO: 31462 - DNA, 749 bp, Artificial sequence
  DNA replication origin
cgccttggggaaaaggggctggaaccaggtgaagaccccgctgccagggtgttgacaagtagggacaagtaagccaggccggcagcaggggcaggctcctgccagaacccagggagacctgtggatgggagagggctgccttcccagccgggcccggcccattcctccgcgcttctccaccccaggccttacttccccaaatacctcgccgccaagctcctcagcctgggcctctggcaccccagctcctccccaaggaaggcccagagctgcgcgagggtcggcccctccacagtcggcacgccctcggctgcacccccgcccaacttccccacttcctcccgcaggatcccagagttcaggaaaaggaagcgcctcccccgggcgcaccggggctgtggcagcggtccaggaccccttggcccctgacctgggacccacaggaagtccttggctgagtgttacggggcgcaaactggggaaggggacccaggtggaaggggacgcgaacgaattcccaaggctgtctcagggtgcccgcgcaccgggaaatggggaaccctacgagggggcaggaatgactcaggctcccgaaagcaggagtaggcagtgagggggtgcgtgtgtacttctctcgggcctggttatgaatgtgtgtctggggttggcgtatggggggagtgtgcgtctgtgaatgagtgtaggtgtgtcagtcaatgagtgccttcggggtcgcaggggcgtcggga

SEQ ID NO: 31463 - DNA, 1041 bp, Artificial sequence
  DNA replication origin
taggattggagagtgtgagagagagagagagagagtgtgtgtgtgtgtgtgtgtgtgtctgtgtgtgtctgtgtgttccaggtctgggcacatgggctatgatgggccccaagctccagccacaagctagggtggaccctctccacaaaggcctagctgaggggtcccacccaccagtcccacaaactgggttctcaccacctccccagctatcacagctccacccaagccctcactcttaggtagggaggtaggcgaggggtatccccagttggccagaagctgggaggcagataaggaagaagcctgctgggcaggagacctccggagccccggagctgggtatgctatgcggtggagggttagttcctgcccctctctgggcctcagtcttctcctccaattagagtagggagtctgtgccacacagctcatcttaggggagaggacttaggcggaaagaggtttgagctctatttctcagaaagtgggagagggtgagttcagtgcggatgtgaaaggcaccaggttccactgttgccgggtggctgctcacccctcccttgctgtccagtgcccccctggaggccccagcactgggccccccaccaacacagctcccttgccgctctctgctgcccctttcttggtaggattcaagggagtaccctagcagagcagattctaactccccaccccacggctgtgtgaacccatggaaacctctcctgtctctaagcctcaggcttctctctcctgagatcagcagacaaggcccaacaaatcccaagaaacaccacctccctcttcctcactagggaggggagggtgaacccaactggccgggccttgtcactggaatagaaaatggggccctacggaggcccaaaagctcagcaggggacattacactggacacagcgacaaagcagccgagtaagtgtcacttagccctggcatctccagaagagatgggtttgggccccagaggaaagcaaagggaatgtcccagatcccaaacactcaagaaccccacctccc

SEQ ID NO: 31464 - DNA, 1107 bp, Artificial sequence
  DNA replication origin
gaagcgcagccggatgccctcgaaggcgcgccgcgggctgaggggcctgccagggccgtagagctcgctgccgtaggcccggggcttggggagagtggccgcttcggcctgcagccagggcggggaggcgcccgcgtaggccgcgccctccgccagctcagagtagctgcggcggccctggaagccggccttcacgtggtggctgggcggcttggcgtaggcgcgctcggccagcgtcctctcgcccggcgggggcggcggcggtggccggggctgcggggccgggcagctggggggcaccggggaacggcgctgcgggctgggggactggcacgacggcggcaccggcgagcggcgctgcgggacgggcgacgggcaggagggtgaggccggagagcggcgctgctgcggcgaggggcacgggggcacgggagagcggcgctgggggacgggggactggcacggggggcacgggggagccgctcgggcaggcggggagggggaggggcactggggggccggggagtggcgttgtgacagcggcgagtgcctctggcctggaagagaaaccgggacggggtggggggacaaaggtgcagagagaagacctcagaactggagcgccaggggcttgcccggacccatgcccaccaactccaggccacaggaaaggaaataaagggtggtccccatgaccaagatggttgccatggctacccgctccttcccgggtcccgcggctgcctccccctgccctgccccatctcaccgccactccgggcctgttcctgcaacagagtcctcaagattctcccctgtagggaactcaactcccgaagccggcccagctcctccgtcagctcggtgtaggccagcgccaaattcaccctgaagtcagagggcagtgggaaagacgagaagggcagtgggtctaccgtcccagctgtggaggaagaactggctctaccccagcatctggccccaccatgctccctcccacccgcagggccctcctaccccaattgcagaaatcctccctacctttaaggtccagctcaaaagccacctcttccagggagactccctctgcatcctgagacccattcc

SEQ ID NO: 31465 - DNA, 1122 bp, Artificial sequence
  DNA replication origin
tctttatacacaggaaaactcccaatgatgctattttcaattggggggggggaaacggatagttttcatcataaaaggagtctaatacattagttaacataaaaggaaaatggagaaagaaaagcctccatcgtcctatctccgaggcagcccttcagagcatgtggtgggtttccttcctgtcagccggctctgaatctgttcaaagcagcttttccatccaggtataataatagattggaaagtgctgcacacgtacaccctctcatgtaaggcttgcagcccccctgaaaagtagatctgtttatttcccccagtctatggatgaggcacgtgaggttgactttcaggcaaggaaaatgacttgcctgggtcacatatacctggcaggcagagccagacctgggactctcagcactggcagcccaatgctacttccagtgcccatgactgccatgcagggtaggggagcttttgtgggccctgccaggcccagctcagggccctgcaaacccctggctgctgctgatgcagtgcgctttaaggaacatttcctgttgtccatcaggttccaggtctgcccccagggctagagctacaagatgcagccaactcagcacatgtggacctctggtggggagaaagagggcaacccgaaaggtcacttagcacagagtctgggcacacagtaggtatcaataaagatcgattgaatgttcatggtcaaagttgcttctagtgtgcccgtgctccgagcctctgagtgccaggagaatgcccagcgagtcccacttgggccatctcggaaggcttcctgtaggagagggcctttgagctgagacttcaaagctgggctgaatttccccgagggtccagaagagagccacgggctggtgtgtcaggcagcggagctgacactcccagaaagcaagatcttcgaactacagggtgcgcgcaggctctcgcttctctccaccatggggggccctgcagtactcgccaagagcgtagaatttgcctagtattagccacgagagggcggggtggggcgaggcggagcagggccgaggtggcggagtgggggggagccggagagcttcataaagccacagcaaagcgctg

SEQ ID NO: 31466 - DNA, 1397 bp, Artificial sequence
  DNA replication origin
cgggtcccccgccccctgctccctgcccatcccagcccacgcgaccctctcgcgcgcggaggggcgggtcctcgacggctacgggaaggtgccagcccgccccggatgggcatcgtggagccgggttgcggagacatgctgacgggcaccgagccgatgccggggagcgacgagggccgggcgcctggcgccgacccgcagcaccgctacttctacccggagccgggcgcgcaggacgcggacgagcgtcgcgggggcggcagcctggggtctccctacccggggggcgccttggtgcccgccccgccgagccgcttccttggagcctacgcctacccgccgcgaccccaggcggccggcttccccggcgcgggcgagtccttcccgccgcccgcggacgccgagggctaccagccgggcgagggctacgccgccccggacccgcgcgccgggctctacccggggccgcgtgaggactacgcgctacccgcgggactggaggtgtcggggaaactgagggtcgcgctcaacaaccacctgttgtggtccaagtttaatcagcaccagacagagatgatcatcaccaagcagggacggtgagtgcggcgcgccggcccttggggcctctgtgcccgcgccggaacaagaacgtctcgtctgtttttctggctcgacaatgcttctgactccgtgtccctcactgctttggcttcagcgtagggagacaggggaatggggttgttaggaggacagggaaagctccggaggggcgtctgtgcccaggctgttgcaccaacagccagaggactcacaagggagacgggtgagtgcgggacagtgagaagtcaccttgatttaggggaagggtgactgtggcttcacctagaattggtgtgcgcccctgccccactctctactgtagaggagtcgcagcgggcagtgaaagcctgtgctctgggcggacaggacgcctgggcctcctgtgtgggaaactggaggggaagggagccccttatctccgggccccctgcgcccacctcccccggctcctttgctgctggtgtgctcaggtcagctttagtggtggtagtggtggtggtagcggtggtggtggtgtgtgtgtacggggggagattgggatttggtgacatggagaagcagtcgccaagtttcctttccggtcttactttgagatcatatgtctggtgtgtgtgtgtgtgtgtgtgtgtgtgtgtgtgtgtgtgtgtgtgtgtgtgtgtgtatgtgtgtgtgggtgtgtgtgtatgggggctagtgcagtaaagcttgtagggggcacagatcccttccaggcacaaatgcccacgggctgggcagatgaagctcacccaggggtccagcctggtagccagccccac

SEQ ID NO: 31467 - DNA, 902 bp, Artificial sequence
  DNA replication origin
tatgtctggtgtgtgtgtgtgtgtgtgtgtgtgtgtgtgtgtgtgtgtgtgtgtgtgtgtgtgtatgtgtgtgtgggtgtgtgtgtatgggggctagtgcagtaaagcttgtagggggcacagatcccttccaggcacaaatgcccacgggctgggcagatgaagctcacccaggggtccagcctggtagccagccccacactgcaccctttgaggctggtccagtgaaaaccttccccacactcctgtccagaaattcaccggttcagcctggagaagtggggaaggggtgtcccatggcttcatggctcagggttcctgagccccgtgcgtgatggggagagtttggggctgagggtgctgcttccggatagagcctcctgcgcaaggaaagaaacagaaacctgtgacttgtgtggtatttgtttagtaagcaacccccggagtggactgtgtctgatgtgggctgtgcgcacccacccttcccagtgcggcccatgtgagcaggggaccagcgaggaccagtgtggaagggctgttgtcattggtggacctgggatgctgggtcccaggtccgagaggtgtggataccaaacgtggggcttggggtggaggggagagggagaaggccatgttggaccccagaggttggtattcgatctgggcattgctggaacattcttccctccagatgatttttgtggggtagcctgggactggggaacctgttgccagccacaactggcttcaagttactgagctgttccactttccctgggatgaacccaggaaagttggcgtgttctttgatggctcagccttcatctcttaagccttctgataatttctctctgctccccccaaccctagtcaccctttgggtgtacccagacacagcccaa

SEQ ID NO: 31468 - DNA, 885 bp, Artificial sequence
  DNA replication origin
tacaaaaattagccgggtatggtggcacatgcctgtagtcccagctcttgggaggctgaggcaggagaatcacttgaacctggaaggtggaggttagagtgagctgagatcacgccactgcactccagcctgcatgacagagcgaaactccatttcaaaaagaaactgagatttggcttgagaattaacttatccagggtcatagggtagtaatctatttttctcaactcaggaaagtcaggggaagacaggcgtgtgacagcacccttctaggacaccttcccaaggttgttaggtaagttgtcctggggacctctggggattagaagtccctcaaaaacagttcctaggcccctggaaccctccctcctccaggtttcctgactcagataggtccctttttcctcatccttcagggcttctcatgagaggagggggaagtgtgtggaaatgaaaaataattctgatgaggattagcttctgccattctgaaaactctgctcttcctgcttgtgttagaagagaaaggctaagccattggagctggtgatggaattggtgctggtggaggtggtggttgtagtgacggtactactggtggtggttgtgatggtgaaggtggtggctgtagatggtggtgcccgtgctggtgctggtggagatcgtggttatcgtgatggtggagggggcagttgtagtgacggtggttgtgatggtggtgatgggtggttacagtgctactggtggtgatggtgctggttgtagtggtggtggtgacggggctagtgaaggtgttagtggtggagatggtgatggtagaagagtgcttcttttctgaatctgttactctggcacaacagcggaatcatacagcatcccaccccc

SEQ ID NO: 31469 - DNA, 1387 bp, Artificial sequence
  DNA replication origin
gccaccaagatgacggctgccagggacctgctctctctgcgggtcccgccgcgcccctcgtcactgttggtgagcggaaccccgctgtgtgcggacggaccacgaatagactctgctgcctccctggcccccggcccgggtcccagccggtcttccccgccattgggggactgagtccgagcgctgctgcgaaccctgcgccttctccgcgtgctccgagcccggcagcccccaggaagccgagaaaggcagcggactggtccgcgccgctcagggcgcaggccatcgaggccaaggcgcgccgggtccctcccgctcgggcgtctctggtcctccggctctgccccgtggccacccggcctgctgcaccgagagccccgggctctgccccgcgctgctccttcctgcaaggctgctgtccacacccgccggcctgcaggcgcctcggggtccacatgtccccgccacatcccacccctgggccacccgggtcggtcccagagtgtgcgctgaaggtgatgcctgggggcaagtgcccatttctgtcctctcaacctgcatctttgccagctcttctagaactttctggcctcttttaaccacattgtcttctgtatctgaggtgggtggggcaagactccccacagcccaagcctctgtagctggagaggaggattagtcagatggcagacacgggatggtgctctgtcccaggaactgatggcgaagtaaccctgtcttttaagagagtgatggtggaccttagactccactaagggtctgctctgctcctgccgcaactaaactggtaggtaattttaggaactatggttcccatctacagttggcagggcccttatccccgctcccttccaaactctgattccatcatccatgagagccaatctgccattgctggggctggatggtgtcatatccttccttacagatgaggaacctgaacctcagcggggcgatgacagtgcatgacagagcaggcctagaacccaggcctcctgaagaattcagtgctctttcctctgcccctcactccctctacgcatgtgagagctgggaaaggagggtgaggggtcaggagtgactccgctacgtctggatccctgcgggctgcatccccacagagcccagcttcagggaggtggcctgggcctgcattgtagggagggagggttgcgtgacctctcttctgatcttccaccttctctcccgcttcctaggtacacgccagagcagtggcgtcccttgtcactcatgagttctctgctgaattgggcagtgggcctaatcaccaccctgttctcaccccaatcctcaccctctctgcaggacacagggatgtctcccatctccccacctcactcccatc

SEQ ID NO: 31470 - DNA, 1258 bp, Artificial sequence
  DNA replication origin
ggataaaggtcgaggcagtttgtgtgtttgtttgtttgtttggatttgaagtgtttttggaaacatggtgaagattgacacagtacactcgtgcgtacaacagaaaataagcctccctcccatcccaacactccgaagggactactgctaccagcttttgggattcctcccagaaatgttttacgcatatgtgaacaacgaagtgtgtgtctagaagagaaagatttactattttttaaggtggaagaaacagacaatctttatattcagagagaaagagaaataaagagggaaagactgaaggtgcagaaggaggaggagtgggcagcctggggggcatcagtgggagcaggctgactgccgccagacagaaggaatcgcccccctgacccacttctgttctgccacagactgtgggaggcgaatgaggttcgaagggcctggcttgtgcctgggtcctcagaggaggattggtgagggatgtcaaggccccagatacaggacattgtagatttagcagtttcttagtgtgggtcgtgtctgtgttttggcaacagagtcagagccagggatgcacagaggaggccggtgctggcatttctggcaagtgggggaggtggctgaaggtattagctgagagtgctgtgaagggcaggatggggctggcagaccatgggagggcagtgcagtcggggacctggtcatcttggctggagctgtgggcgacagggaacggagagagaggcaaggcaggcaggctgtgggatgttggaattgaaggctccagatgtggagccattccaagtgggaacaaggccaagtgtttccaagggtgtggggtggaggttgcagggcgatgatcagctttggggtggggtggggggagatggtggggaagagggtcatcagcaagggctgggtttcaggcagggcatggggtggaggccccacccatcactgttgcggggaacttttcaggcttgagcaggggttctggaggacgccatagacagggccagccaggggagcttctgaggaagagcgagtgagaagggagaacataggggcctcatgggaagaagggaggatgatgggtttaggaggtggccaagggtgatagggacaggaaacctggaaccaactggtcttgtggtacttaggggaactaggggtgggaataagggactttggggtagcctaatggtgctcggggacagcctcaagataacttctttgctcaccaaggtctcccaccacc

SEQ ID NO: 31471 - DNA, 1798 bp, Artificial sequence
  DNA replication origin
tggattccagcctggacggggcggcgcgtcccaaaggctcccggcggtcggtgccccgcagctcaggccagaccgtctgtcgctgccccaactgtctggaggcggagcgactgggggctccatgtgggcccgatgggggcaagaagaagcatttgcacaactgccacatcccgggctgcgggaaagcctacgccaagacgtcgcacctgaaggcgcacctgcgctggcacagcggcgaccgtcccttcgtgtgcaactggctcttctgcggcaagcgcttcacgcgctcggacgagctgcagcgccacctccagacccacaccggcaccaagaagttcccctgtgcagtctgcagccgcgtcttcatgcgcagcgaccacctggccaagcacatgaaaacccacgagggcgccaaggaggaggcggctggggcggcctcgggagagggcaaggccggcggcgcagtggagccccccgggggcaaaggcaaacgcgaggccgagggcagcgtggctccctccaactgagctcctcagtgccgcctccctgcgggtatcccggggggcactggatgcgagcccccaggtctgacgtccttgggggtggcttgaggaagaggggaaggtgcgtatttattcagggaggaggaaaagtggtgcagggacagggagatggggcgctaggggttcttagtctctggggctactaggcaggatgaatttgactgggtcggtaggagctgcgcaatgcccctctgttctcccctgcctcacagtttccctcgcccctgggctggggggttggggtgggacacccgtaccgcggctggctggcggggacaggctagaggagacagcaagtcccagtccccggagcagagagaagtggggccggcccggggcgctggtggtggctgtctggacacgtccttagcgcctgggaaccaggacataaaagcgcctccggagccgccctgcggcggggtccctttcatcccacttaaagtgcttctgcccctagggtttccggagggagagccgagatgggatgggggagcctgggggtcccccttggcaggggtgtctctttctggtttggagggttgttgctgtaaaaataactcctttgatgagcttccttattaaccctttcagacccagtctgttggagccatgaaggaagagggaaagagggctgccattcctgacagcctcccagccagggctggcgataaaggaccgagatagatggagggggcgagtagggaagtcctcttctaaaatgagagatagggatttggtggggtatggaaggaactaaccccttccctctccacctctgattcagcccttaattcttggtctatgataaataaagttcagtagtctcacattccccatctattaccctaggtgtgttttcaaggcagccagcggtagaatccatgtagttcccaccagttgccttcccctcagggatggaaggaagagggtttcttgggctggttgagggcagattgggggtgtctcatcagagggacctccactggttcccactcagagtggaggcctgcagcctacctgaccatctctttagctgtcaccaagaaaataaaccccactgtctctctagcttggcccttgtctttcccttgcccctgccatagcatgttcattaggggattccttcctccccctcatctcacaggggaagggagaggaaagagttgttctcccactggaaggggttctgccttctgaggtgacatccaggaagctgtccccattcccttctcctt

SEQ ID NO: 31472 - DNA, 3012 bp, Artificial sequence
  DNA replication origin
ggcccctctccctgggagtggaggggaccagggaggagcgagggagcgggcggcgcacgccctagttatctttcctcccccactcccgcccaccccctcctcgcggccctggctgggctccggtccagccgagccctcaagggttaaaggcggccgcaggtgaggtgggcggggccgcgagtccgggggaaaaagcagcgctggggagaggatgaaggcagagagcgcgggtgagtcacgggcggagctggccttgttcgctcgctggctcctgcccgccctccgtcctccgccctctcgccagcgctcacctccgccgcctgccgcctgccgccagccgccgggtctggctcgccctgggctcctgccccttaccgctggagagctcgccggcgcacagggcctatgagcgaccgtcagtagcgcaccagccagccgtgcccggagcccgccgcagcctcgaggtaggagcgcgggtcggggtggccaggggtgagcgctacggagattgtctcgaaaaaacgcactccgaacgcgccccagcctcctatggccttgggagcggggtggtcctaaaggatctgagaggttagaaccccgatggagggaaaactgggcggacgggagagactggagggaccgaggaggctggaaaccggggcaactggagcgactgggacaaccagaggaccgggacattgagaactgggagtactagccggtgatccagagaggcagagccgaatggggcataagggtgcaccgacttgccttcccacttcggggagcgagaagcctgcgatgtacgctgtgctctctcctttcctgaactctttctaggcctggaagtgaaccggacacatacttggcactcaatcctgttcccttctttcctctcagctctggggcaggtgggtcaaggaccatagaggcaacctaagggttgccacctaagggtggctccatatcacccccaagacctgccccctcctctattctcctgggtcttagtcttgcatcttctgctagactgagccagctccagggcagttttccacccagtgggactggtcttagaacctgagaatcaccccgctttgggtttctgaaatcttggtagcaggccattgcatcccaggcctgggctctccagctctctgccaggagaagccactctggagcccagattatcctagccttcccatcctccagcccctggggcagttcccaggcaccaaaagctgttagggtccctggcttcacagctcccgctcagccccttctgtgctgccccaccccggcctggggctcctttcctgcaacttcaccctgttttcctcttgtggtgaggcagccggagcctgagtaggtgcccccgtcctcctctccctccctctcccaggctatcagtgccacctccctggtcccagaggcaggagatggtagggtcagctaagccctgctgtaggaaggaaacaatcctgccctaagtcactggtctcctcccccaccagtagagaagacccaggcacacaaacctgcccagctgaggcaccagggcttccaggccttagggagaggtggtgagaaaagagtgaacttcaagccacagatatgtggttgagaaagcgttgggggtctttagcgttctaagggtctacagaaagattggtttacagaaagtaacagactgagagtccaggagttaggagacctggtttattgaatgaataaatgaacatccttgtccaagtcactgtgccaagtcattcagtctgcttccttctcttcaaaataagaagattggcctggagcagtggttctcaacatttgctgcatataagaatcttctggtggtggtggggagcttctgaaaaatgatccatgcctaggatgcacttgcttatgtcatctttttgggcaattcttgctcttaggttctgtggttatgacttctcttgttgccctcctcttcctgcactctgaccttgtatcacttaaaggggtgcaattgtatcttccagagcttgctgtcaagctcttctctggggaagccattccctcccaactttctatctgggcctcccctagcatggagaggaagatgggtagcagtcagagagttgcctggcactggtatgagtcaagagagggatggaaatttggttttctctggtgggggtatctcccagattccaggggtatctggtggccagaaagctgctccccagggaggtgaagtccctgcttgagggaagggggtgggggcatgtgagtcggtttagtgggcccgatgtgaccaggccaggcggggagcagcgtagacggtgaaatgcttttcattactgaacatgctttgggaatggcatgagaactctttcaaagactcaggacccgtttgaggctttatgaggggcaggtcacctgaagctttgggtttcagaaatagaccatcccctctcccatctgtatcctgagttaaactggggaagctgagatgtgtctagatcctccatttgggctgacagcaggtctgcagggggaaaatgccactgccccttgtgttggcctgggcagctggggtggggatggttctagcactgtgctgtaggtgtatctgacctaccatcctgggagtggcccaactctagggatgagctgggtcatacggcagggatcacccagaggaaggtagacctccatcatcctctgtgcttggatgagaacctcacatcttggacccttcctcgcactcccgaattctctaaactcatctctagtcctcgttcagaggtgcatccttcttttacacctggggccagagaggaggacctgggttaggagggaaagtgagctggttatttcccttacttttctgcttcttcgcctcctttaggtcccgtctgaggtgcccctgaccgtccctgccctcaccccaccccggatcccggcaatgctaaccgctgtctgcggctctctgggcagccagcacacggaagcgccgcacgcctc

SEQ ID NO: 31473 - DNA, 1142 bp, Artificial sequence
  DNA replication origin
gactgtaaagaggaaaacgaaattttaaaaagccgacggcaaagcgcacagaggagacgaatctgaaaaatgaaagaaatagggaaattaatctgcattcccctgtgaaaaaaggggtcacatggagagatcaacactgcggcatgggagtgaagcatggggccacctcagcggccaggcagaagaatgcgtgggtggaggacggaacttccctacccaccggtgctttgcgggtctcggaaatgtcgacccatccagatcttgagggaagtttttgtgagctccgcgagcgcgctgaaattttaccagaatattgcactgggcatgtgaatttttctcaaaggaatccaagacccctccccaaagttaagaaccttgggtttagttattctggtgagaattagaaaggaatggtggcaagggatagctcaattccttccagaagtgtcccttcccagggccattcaggcgcctgcccattcttcagaaccgggtgctcgggggcgagggtgtgcgtaggctgagcatttcccgaaggacaggagggcgaggagaggcgaatttgagaggtggatttcttaggcactggggttgctacctaaggggaggggcagagtgacagctgctgggacctgggaccagagtaggggggaagcagagaccggtggtgggcagaggctgggagaggggaggagaggaggtggtcacccagaaaggtcagagagggataccccggaagggagagggaaaaaaggacggggaagggtggtggtggagagaagcggcgcggggtgcggggggtgaggcagggcaggggacgggggtcgggggtcgggggaatggcgaaggagggcagccaagacaaatttcacacggcctaggcctagaggcgaactggaaacatacttggcgctcaatcttgtttccttctttcctcccagttccggggcagggctgtccgttcagagagggtcaagggccatcgaggcaacctaagggttgctgcctaagggtggctctgtctcacccccaggacctgcccccttatccattccccctgggtcttagtcctgcgtcctctgctagaccgagctagctccagggcagttttccacccggcggggcgggtcttagaacctggg

SEQ ID NO: 31474 - DNA, 1527 bp, Artificial sequence
  DNA replication origin
cccggtattctgctctgcattttgtattatcacaccaaccttttctagcagtgtttttcaaactgccagtcatgatcaacaagaaggagaataagataggataggataagcatagaaactatcagtgcgtcacaagtagtaagcattgttttcggaaactttatgacactctcatacaaatagcagtgtactggtctgtatgcaaaatgtatttctcttgatggactatgtttttttttgtttgttttttttttttttttttttaagccatcgcgctaaggtgtaggtgtgattaacctcgttttactgatgaggacatgaagctcagggagtttcggtaccctgcctaagttagtgggatgtgtaggtttcaaacccagactggtctgaagccagaatggattccctcactaagctaggcagccttcccaagttctcggaagagacttgggagcaaagataaacctacccgcctagtgcctaccaagtgctttacctcatctcaagaaggtaagggtaagtggggcagaggccaagcagtacttctcaaactcaagcgtgcaattctgtccacgcgaggcccttgctaaaatgcagattctaggcacgccccgtgaagtaccgagtcggattaggagaggcggccaggggagcctgcctttagaaagagcttcggatgattcagatgcacacgtttgggaccgtgggctatgggggtcgccgcaataaccatgtgaggattaacgggggcttaaccgattgtgaaaatccccttagaagtgtcgcgtaaacaaccccaactcccactatggtgccggaccccagtgcctcactgtacaaagtcgcccctccccaggcgacaacgagagagggactaaataaaaggttgatggctttccactcaccaggcatggggttgagtggcagccggctactgccgaagagcaggtaaaagctcctgccacacctgggcgagactggacttagggcgcaatgtatatgctatttctggggcatttgtgggcctcaccctaaggacttctgattggcttcagggcagatctatcattcatcctctgggttagaggtgggtggaaggtcaacctcgaccaatacaaaagcactcttcggctaagcccctccccttccagcttcctgttgctgtacatcaaccacccagcgggcgggactttgcctccctccaattggctgatgcacatgtcactcattattcaattggctttcggttggtgcgctctaccgtccatcagtgacattgcacagacctattggtcaaatcaacgtcgctctagacgcctctggttgattggttaatagtgctgtcggtccccaatgttccaagcgcttattggtgaaggctgccgtcgctcgggcggtggcgggctccgggattggcggttgcttggcgggcggtgtcaggctctcggtggcggcggaggcggcggaggccagggaggaagatgtcgtaatgagcggtgggtcccggccgctgccggcggggtcttc

SEQ ID NO: 31475 - DNA, 874 bp, Artificial sequence
  DNA replication origin
ctgcatgtgggtttggggactgtgccttgcctgttttcttctaatgcttttccttttttttttttttttttttttgagacagagtctcactctgttgcccaggctggagtgcagtggtgcaatctgggctcactgcaacctccgcctcccaggttcaagcaattctcctttctcagcttcccgagtagctgggattacaggtgtctgccaccatacctggctaattttttgtatttttagtagagagggggtttcactgtgttggccaggctggtttcgaactcctggcctcaagtgatccaccctccttggcctcccaaagtgctgggattataggcgtgagccaccacacccagctacgtttactttcttaaaccaccttttttctaattatctgactaaattatgtatttcagttttactttagtgattggatttgtgttttggaacctggctctggtgaccaaatgggtgatgagcaagggagggtcaggctggtggcagggataggttgggagaagctgtggtgttgtctaagtggaaggtgggggcaggatcctgatgcatgagtatggcgtagggcatgtggagaggagggatccacccaccagggctggctttaggtgacacaggtggtgctgttcattgaagtggggcttgttggaggaggaggtttgggggaaaggtgaattccttagcaacattttgagtgtgagggttgatgggacacccatgtttggccaggttggataatggagtctggagcttcgtggggaggtcagggctgatgatactggtttaggtagcatgagcctcgaggtggcacttagagccacgagggaggatgagaatgtctgagaagggaagagggcct

SEQ ID NO: 31476 - DNA, 1085 bp, Artificial sequence
  DNA replication origin
ttcttccctccttgcgtcgctttaccatccagagcagtgtgcaggtctcttgtggcacttgtcatgctttgcctcctcattcagtttctctaatagacatggttgagcacctgcaacgtgttgggcgattagggcagggaaggggaaggaagagagtcggtgagacgtcccaaagagaacacctacattgagtctaaacgaagagctgaagatagctgggtgatgtgggaagaggagttttaggtggaggagactacacagacaaagcttaggtggccacaaactgcaagaggggtgcaagcaacaacaggcaggcaggacgggcaacgtaatttgtgaggtccagtgcaaaatggaaatgcacagctgcttgttacaaaatgatgaagaatttcaagatgaagtcggctccgcgggcaggccaacctctataccgtagatggtttgaggcagcgagtggctagaggagaggctgtaagggtggaaaggccatatcaaagggagacttattaaggaacttggacttcatcccttcagacagaggaatcacagaaggggtttgaggcagggaggaacctgtacagataggctgctgggatgatggatgcatgggagataagactggggacaaggaggctggaaggaggttgttatcgagggattatagcctgagctgggacacaagatatgaggaggaaggggaagggctggatctgaggaatatttaggaggaaaatgtataggacttggcaattgattggctgtttgggtggaggagagagacactaaggatgacacctaggtgattaggtgggaaccaccacctgagacagggatgcaggatgctgagcaggtgttggggaggagggggtctagctttgaacctagtctggcaatgctgggagacccccagatggaaagtgtgcagaaggcacttgggtctataattttggagttcgagggagttgtcggggctggagatacagcttggagagtcacaagctggctaatctgtggtccgagtggtggctgaagctaagggagagtctgagattggccaagaagtgggtagagtaaggagggag

SEQ ID NO: 31477 - DNA, 617 bp, Artificial sequence
  DNA replication origin
caatgagtcccaaggctgtgggagctgaaggggtagtgggccgggcggaggagggaggggggaggggggaggggatctgattagaatccgggccgtatggcgaacactgcggagatggaggtaatcactgagcgggcgagacagcgtgctcggcgacagcaggcggccccgccgtcgccatggcaaccgcggcctccggggcgcgcggctaggcgcagctccgcgtctgcggcggaacatctgctttgcacagggctgctgggagccagggggcgcgggcgcggctgctccccccaccccgcgaaaaagaaacaaattaggccaactgtccaatgaggggccgcaaatgtatttattaatgcgagggaaaggttgttccggagcgcagtttgattaatgtttgagtcttcagcttgtcagtctggttttgtctcctgcaaaaggggaaaagggaggggttgggtgaggggctggtaggggactggggaggagagagacaacaaagcgggaggggatgttaatagccaaataggctctttttcatgtttcccccagcctgccatccttgatggatggctcagacagacaccagagcgcatcagggagacgcaagcccc

SEQ ID NO: 31478 - DNA, 1575 bp, Artificial sequence
  DNA replication origin
tgcttgtgtttgctgctggccccaggacagcctatagacactggcgcacaccaaagccacaggccggagagcaggcaggaagcaggacgagggctggtcttggggcaccctgaggatgcagagttcggggatgtaagggactcgggaaggagccaaggaggagagagggagaggagaagtgggggaaggagaggtggggtgagggcgggaggggagatgggggagaacgagcaagaggacggggccccgaggaaagggaggccacgcgcgagagggggccgcggggcggcgcggaggcggggcggcggcggcgggcaggcggcgggcggcgctgtcagtgcgaggcggcgagcggaatgcagcggcccgaggcctggccacgtccgcacccgggggagggggccgcggcggcccaggccgggggcccggcgccgcctgctcgagccggggagccctcggggctgcgggtacggagcgggcgggcgcggggatcccgggcggcgggagctgggcagggacagagcagggttagggggagcagccaactcagaactcgcgcgcccggcggctgggaactttgtgtcacccctgactggccccaggacccgggaggaaaagttcgtcccagcgccgaccggagaggaggcctgtcctgagtccgtcggcgcggggctgaagttctgggtccgtttggagtgggggtggcgggtgagttgcgattccgcggggagggtaaggagtggcctgtccgtcccagactcggctcccatcaccggtgggtgatgggcatgcttctggagtctacccgggccagggcctgggggcgcgctgatagcgcaggtccagcccggccagggatcagctggaagaaggaggctcggcccgctgtcccccccggcccaggttctgtgatacactccgactcgggctctggagcagtcagtgcatgacagaacttgggcccggaaggaccttctgcacccaacgggcacagcgcccactcggggcctgcagtggaacatctgcctgggagtggagtgggcacctgggttggcccatgtggcacagggctgggcagaaccagctgtggaccttgaggactggggttgctggggcctgaggatgtatcctagggccagcagatcccatagacacagggtgtccacctcgagtcaggggccaaacggaactctcctctccggtgtcagttgcaggaaccttccctctacaccatcaaggctgttttcatcctagataatgacgggcgccggctgctggccaaggtaacctctgaccccacccatgagggacacagttcccactcagctgacactcctgtctcaggagaaactccactgtgatctctgtgactcagggcagctcagcttagacccctccagaggtccttctcatcctcctgccttgtcaaggtgctgctccctgaaatgaggggtctcctctatttctactcatgttccctgaaatgtttccttatcatcctgctactggccagttggacctgggcatgggaaggttctgcctaatgggtcagtggagtgttgagcctgggaccca

SEQ ID NO: 31479 - DNA, 1264 bp, Artificial sequence
  DNA replication origin
tgagaccttgtttctacaaaaataaaaaaaataaaaaaataaaaaattacctgggagtggttgcatgcaccagtggtcccagctactcgggagactgagatgggaggattgcctgagcccaggaggttgaggctgcagtgagcccagatcgagtcactgcactccagcctgggcaacagagtgagaccgtgtctcaaacaagcaatattagtaaaaataatatttagagattgaaaaaagtgcaatgaaagaaagaaataggaactgagagaatgtgacaggagagacctatcaagtcagatatggtggctgtcaggaggaccttttggtaattatatttcagcagaggcttgaagataagaagacttgatgcattcagtgaggaaaaccccattctgtaaccatctagggtaagtgactgtggtccacaacataagagggcttgaagagaagaatagggaagaaattttgagtcaaaaatctgggttctatccccagtcaactagctgtatagtcttgaaaaggtcacacaacctctgagtctctctttgcttaaaatgagggtccattatgcctatcttacaggtgtgggctatattagataatggatgtgaaggtgtcaaatgtaaaatacacgcacagtgtttttaccggtaaatgcatacgtagcactaacatatcactgggatgtgaatttcccacttgccagtgtaccctgaaatgagagcttgtcttagttagacttagaccaaagaaaccaaaacatgctgcaaagcccgatgtcattggtggagcatttgtgctgctgggcgtctgtcttgcttctgatggtgccatatctgtgacttaggagagcctggggaggtgtctccgggcccatggttgccttctgcaagtagtgagagaggaatgagaaagcctcttcacagaggggtgtccccagaactgtcctcatttgctcttgcttatagaccctgtccctgagatctaaagggtgacctgacgtatttgtcctcatggtacctaccagaggtcaacagacaaaagtgggctttgcttgtgtttgctgctggccccaggacagcctatagacactggcgcacaccaaagccacaggccggagagcaggcaggaagcaggacgagggctggtcttggggcaccctgaggatgcagagttcggggatgtaagggactcgggaaggagccaaggaggagagagggagaggagaagtgggggaaggagaggtggggtgagggcggga

SEQ ID NO: 31480 - DNA, 990 bp, Artificial sequence
  DNA replication origin
cgagctctaggccggccggcggtggcggcggcgaggccgggactcgggcttagggcctgctgtggaggcagcggcggacgccgagctaagcagtgggtatcgggcacattcctttcccagaagggagggttgcagcgccgcggggccgaggcttatggggcgacgggatggtgctgaggtgcaggaggcgggggccgagcggggttcccgccagagcccggccctgggcctgacagggaggggccccgcgcggggccgagaggaaagctggctccggggtgggatggactgggcagggttgagggcacgagaaggcgtggtgtgaggcctggacttgggagtggggtggggccatcgggacggagggcggggtggggtttgctgtaagggtgggtcaaggccagggaagtagcacttgttcgctggccgcccctggaggctagaagctccggcgccgagagtgggcatggcgacttggtctcagccggactcgggtatccgggcagggtgggaccagcctcaggctatgggccctgcacctacttgatttttaagggactttgtccggttcctcgaacttaattggctcctgggaggttttagtaataaattgcgtgagaacgggagggtagcgtaagcaggaattctgggtcgcaattgtgtttactctgaccagagagagggagtgtgagtgtgtgtgtgtgcgcacgttcgtgtgtgtacgtatagctcgctctccccctgtagaatgaagttggtagatgggtcacaacgcaggagaggagaggcggtatgtcttggtttgtgacattaatggaagctcaaaagtggagaccagaaacagatttacttcctctgcactgggcagtctggctagagaacgtggccatatccttctgctttggctcagaaggtcatatgaatgaaaataaaacctgcctatgcaaattctggacggaatagtcctgcgtagtagggcccccaccatcc

SEQ ID NO: 31481 - DNA, 1402 bp, Artificial sequence
  DNA replication origin
caagtttggggggcgtgggggggaggagcgggaggataggcccaggagggagcttgctttcctctgcagcttgagcacggagcatggggtgggagtcccatctcactgcagcctctgcggtgagctcagggtgggggcagctgggcgcctgagtggaactggggttgtgaggtgggagggggctgctcaaggatggaggaagggggctggctgggccgcccaggcagcagcacgggcggggcaccctcctcaggcccctcggagctagcaaggggccacccttccagcctggtgtgctccctgaaagccaagagctccttgcagccccctgtccggcttcccggcaccggctgccctggggctcatctcgcagaccatgacccgcctggaccgcagctctcacagtggtgggggccatgccaaaggcagccggccccttaactctttgctggctggtcaccgggtggcccagcccgcctctgctcctgggtccagggcttctgttcaggttggtgtatgtggggagactaaagtagtacgtctgggaggtcttagggtcagggggggttaatgggagaagaataccgacttagaggtagggaggagggtctgatctaaggaaattgctttctggaaagtgtatgtctgcattttaacccctggatggaaggcaacactttagggtttcttcaggcttgtagggagggctcgactacaggggggtgccatgtataggaagcccaaatagctctatttattggggttatatgctgttagtgggggtggcagttggtgcagcaactgttcacgagccaccagggtagagcgggagggaagcatttttggtgcccaaggtggcagttgtagctgagcagtgatggggtttatgtccttgagggggttgactgatggggatttggtgagtcctggggtatggtgagggaatgagagcactggtgtaggggacacagtgaggctggcccgagcagggggtggggtgcacccctggggatcatctgactgcctgagcctccctggaatggaggcagcagctaggatcagctgagagggaattctggcggggatgagtcttgaggtgagcctgggcttgaggagttgtgggtgttcagccttactcttgctgccagctggggaatggggaatggctataggaagggctggagacagcatggcgttgtcattggttgcatcaggtggttggaaatgcagggattttcctctctagcccaccccacccctttatgcaaatgaaatggtaccacaggctgatgcaagcctggccactgctaagtaattctgcatgacaattcgctcttgcttgccatggccagcttcctccaaaccaagttttaaggggtccaatccccaaagctagaggtgt

SEQ ID NO: 31482 - DNA, 1143 bp, Artificial sequence
  DNA replication origin
ctgcccctggcccatatgttctaatattctaggttacaacgctctacgctgcaatctctccaccgttacagtttaaaaactataagtccctaccaccctcgcctactgtgcgtgcgcggcgcgcggcgcttcgggccttgtagtcttggacagacccccgaggcccatggtgccgtgcggcgggtcgttgcgcctgcgcggtgcgagcggcgggcagcgcagactgcgaggctcttttgttcggctgaggggagggccgttggccggggcctgcggtacgccgcttcagtgagggacgccactgcggccacccggcttgctgccttcctgggcgccactcccccaggcgacccgacgcgacgcgccagcagcgcagcaccgattcctctcgggctcttgggcgctgctctgaggtgaggagcccgctggaggcgggagagctgggggagggggcgcggcggcggcggcggcgggagccctgcgtgagggaacgcgctttcgaggcggaggttaggagcggggagcgcgcccgggtccagcgtcctgcttctccgcttcccgcgctgagctcttcgcctgtcgctgaggcgtcggtgccagctgcgtgaaggatggagagggcggggcgcgaatcctgagccagagactgagtgcttgggggtgggccgagcacttgggggccgctcttcggggcccgggtggtctggaacaatgttgcttggctgggcggctgcgggatagggcggaaggggacaggcttgaggcttggataggcgtgaggaggcgcatacgaccgcacaacccgaggtttgtaactgtattcggaagacgccgggtccggctgggactgccagaggaacctggctttgcaggactacggaggagtaacgtcgagtgaattggaagagggcccagggccgcacaaggtgtgctgattggaggaggagatgtgtggaataaattgggaaaggggacacggagggggaggggcaggcgtttgctgggcctgactctggaaggggaggagctgttaggataagtagggcggagatcccgagaatatttctataaggtatgtaagaaaaaaggggaaagcaggccgcccttgcatcctgatgggtccttacagtggggaggctgtaa

SEQ ID NO: 31483 - DNA, 1757 bp, Artificial sequence
  DNA replication origin
gtggaggtgcctcaaggcaaaagaagatgtgggactccagggagtgaaaggggccctgaggtgagaggatggaaagctggctctagggagttgagggctctagaagccttaaggttctagaaggaggtgagtgacgaagccgtaaagaaagcctggccgtgggaggcctggtgtcccctttcggccttcggctcagcactggagggggcctgcgccagggcgttaccttccaggagccaacggatctcctcagggagggcggcggcctgcatttggctgggcgggagagaggcgggacggggcgcgggccctggtcgggaggcggacgggctggaaggcgacccggctgcaccgcgaggcacctgtacctcagccgcggtcgccgcccgcccagcccggccgcggggcggggccgtgggtccccgggcgcgtcaggaagtggcgcgggcggcaggcggggaccggaacggggcgcggggcgtgggtgcacgtggcgctcacgccggagccccacggtagaaggattgggggtgccggaagcaccgcaccgtgcgaggccaaaggtgcgcccctccagcacccaccaaaacaaaagacttcacaaggctcaaaggacccacggctttggacactccatcctaagcaccgaacagttgacctcacggtggcagatttgaaagaccacggggtgcctgaagtagggtgcagggaggcagaatccaaggaagagatccccgtcaagcatagcacccctcaattgccggtccagttcacatctccatccccagaaaagagggcaaaacttcgctctttgggaagccacaatgttgaaaggaaatgattaattcccaataagcaatataaggacaccaacatttgggagaatcgcggcagcgtggcagcaagggacacaggaaaccaaactgtgctgttctccctcaggatggaaaggccctgaggaaaggaaggggtaacacagggagaaagctgagggagaggagaacagagccctttccctccaggagctgcggaagggaggaaagtgaaggacaaaatcacacggtctcattcaagggacagttggtgtcagtgtcctggttgtgacatggtactgtaatagtgccagatgttacccttgggggaaactgggtaaaggtagacagagttcctctattatttctgaaactctctgtgaatctataattctcaaaataaagaggttttttaagtacaataggtcaactgccatgaaaaaagtataaagtgctatggttgataaaagaagggagctgaataccagaaaaggagggaagaggccaggcattgtggctcacacctgtaatcacagcactttgggaggctgaagcaggaggatcacttgagcccaggaatctgaggttacagccaactatgatcaccccagtgtaccccagcctgggcaacagagcaagaccctgtctcttaaaaaagaaagaaaataaaaagaagtgccagtgtgcatgtgagtgtttaaaggtgcatgtggtgtttgagatgggctctgaaaaacacaccagactttgaaggggcagaggactttccaggtggaaggaccagagtaaagaaagatggaagagccctcaccagcttgaggaatagttagtagccctcttttactggatgttgtagaaagactatggttgtcaagataaactgcagctctactgtgaagggacttgaaagtcagaataggaatgttgaacttaattgagagggca

SEQ ID NO: 31484 - DNA, 1366 bp, Artificial sequence
  DNA replication origin
ggaatgccgcaggtgcagtttcccagcaggatggagatggtgcctctgttcttgaccgaaattgttttcaggactgtacctgcgtgagatagtgagagggagaggggcgaagggacgaaggcgcgcccggagaggcgcgcgggaatgcgggagccgcgggcgcagaggccgccgctagggtgcagctgtgggctgacgtgggagccaggcctggggtggagccgcgccggagccgggccggcagcgctggcgaggaggttcgggtgttgtgtttccactgtaactataattaggcggattcagtgtttatttaggctgagagctgtaagataaatgacagcttcgaagatgcttttcagcacttcgtaaatcacccatccgcccgggcagtttgctgctgccacgtctcggttctccctccgcgcgctccctgtccccccactcacctcggaagagggcacacccggggacgactccggagctgtcaccacaaagggcaggagggcaaaggggaaatggtgtctgtgcttcccagagccctcagcgccccggaagggtacggggcagcctccaggaaagctgtcaggagacgcttcctcccgaggtggtcccggcggccaagtggggctcggttgacgggcaggcttgccctcctctgggagaatatggtctctaatcggctctaattcaagatctcttccctgtgccctgatgacacatctggagatttacaggagacgtttgagaaatatttatagtatggggaccgttctttaccctcctgtgactgtctgcgcctctcttgggggctcagggtggaagggcccatgccctttcccatgggagagtgcattcttggagagggttgtggacagcaggcctgtctcccagtgggagtttggagctctcatgtcattagaaagggcaaagacctggatggcaacccaccctgcctagccaggcctgggcctgatcagttcccttcgcaggaaaagggagctcggtgtggggaggccagcgttgggctcatcaggctttgactagaagcatctaaacagacccaatgcagaggtgattaacccaacagggacctgaatatggtccctggaccagcgccttccctcacagaagttttgaatcagagtgggtactgcaggggctcatgtcacacgtcagggccagcgccatggacccttctcccagtatggaaactgggagaaggaaattagtcttgtgtaaaaggaaactggatttggggaaattagtcttgtgaaaaataacaagttagcctctttagtagagatggggtttcaccatgttggccaggctggtcttgaactcctgaccttgtgatccacacgcctcg

SEQ ID NO: 31485 - DNA, 1036 bp, Artificial sequence
  DNA replication origin
cggggccagagagcgatcgaggtttgttgcccgccgcggagcttcctgagccccggccccccgcctccgccgaccaaaggtttgccagtgggaccggcccggagacaatagctgcccccgcgggcgcgctgtcggcttgtttggaaagcccagaggcgcttcgaggtaaaaaggtcagcccgggatcccaggttacctcggcctcctccgcccgccgtcaggcccccgaccatcctcggactccccccgcccctgacgtcttcctccctctccagacctcggtctcccctcccccgcccggcacactgccccccactaggccccttcgcggccacctccttcctgccgtccagtgcccggagacccagggctttcaccttgagcccaggcggaaaggccttgcggaggctggccggctgcggccggactcaggcagccactcctgacgtccccgaggagtggctgggtggaagggcgctgggctggggtgggagtgggggtgttaagctgtgtgccaatttggagtttgtcagcgacccctctggagtctaagccaggcctggctctgggcgggagggaggcaggtgagggggaagggaaggggtagagttcacgtcgccttcccccacacttcctcctctttttaacaccctctttttgtcctctccaaacagatgtttctcttctttcccgtcttcctctcaagaccctctgggctgacccggcgcgggggctcacgcctgtaatcccagcactttggaaagcggaggcgggcagatcacttgagcccgggagttggagaccatcctgggcgaaatggcaaaaccctgtctctacaaaaatacaaaaatcagccgggagtggtggtgtgcgcctgtggtcccagctactctggagactgaggtggagaatcgcttgaacctgagaggcagaggttgcagtgaacggagattatgccactgtactccagcctgagcaacagagcgagaccctgtctcaaacaaacaaacaaacaaaaaccaaaacacaaaaccaa

SEQ ID NO: 31486 - DNA, 962 bp, Artificial sequence
  DNA replication origin
ctcaagaagcctagggacgcgaggcctggggcttgagccgggcctctttgggagctgtaggtggctctccaaggagtggagtggggtcggggattttctcgggaagcagggtcccgcacccagggatggtaactggcttcccagtgggcaagaaaagaggccagctgagaaatgtggcgctgccgggacacccatggactcgggctgctggggtttgggagaccatccaagcagcagccgggcgagaagcccagggtggcccggcagcgtcgcgaggcgctggacctgcggggagagaaggaggagcgaggagagcgggagggagacagggaagcaaagacgatgctcaaaatggcgctggggccgggcggcgggccggggggggggcgagggaagaagctgtggccgccatgacagccgctgcaggaggcgccggcccagccgggatctgcccccgcccctgcgtcctcccagctggattttccagaggccagggaagaaggggagcctggggggtcccaccttcgttttagttagtttgatttttttatttttaaagtggagcccaacggacgctgaggacgcgagatggaaggagagtccgggtggatgtgggaagggaaggagagcggcgggtctgcgggcctgggtgtgcctcatccagtctgacttttgattcttcgctgtgggatttgaagccaggccagagctttctctgaatgcagacccaccagtcttgaccaacaacttcatttcacgtatcaacaccatgtcctgtctatcccccaccacaccctgcctggttccttgtaaacctggtaagcgggaagcaaggatcgatctcccccatctgcctcctggtttgttctgggaaggtggaggtttaaaggtccccggaaagccatccatcctccttaggtttctttaatatttctcccgctcagaaacagacactacggggc

SEQ ID NO: 31487 - DNA, 1103 bp, Artificial sequence
  DNA replication origin
caggccctgcccagcccctgcctgggacagtttgttcaaatataccctgttttcacgttaagtcaagagagcaacagaagaaaagtatagaacctcgtgtcaccaactgctttctgtggagagggggatggagctggagctgagatggaggcagcagaatgggcaaaccttcagtcctaacaacctgcctgccctagcctccacacttttccttaaaaaaaaatgtatataatttataatataggcagctctttcaggatctctcaccatccctgagccctctaaaaactgtaattgatgggggtgggatgtatagatatgaatgttctagagcagaaaaaccgggggctagaagtgtacctcaataaacctcaaatgggaacaaatttgaggttttgggaaagttggaagggaacgtgttttgtgccttttgggtttgaaatgtgttttcttattttttaaaggataattgaggaaaaaaaaaaatcaagatttggggggaattacctacaaagatgtaaggtaagtccgttggttggtgatggcctagccatcttgtctggtttttaaaatgtgcttttctgcctcgtcctgtctcgtcttcctctaccccactcccgggcgtggaattccaacttggtagtgctggagccctggggttgatggggtcatctccaatatgatgtggattcctttccgatgggttggcaggcagatggaacaaggggtggaagacttaaaagcaacctctcaggccagggggaagggaaggagctccaggccggttctgaccaggaagcctgggtaccaccttctctggctcctcttttcagacctccaggttgccccccagagctccacagtctctctcttcctccccatcccctaatcctcgttcgccctttcccatcacaggtgtgttaatttgggcgcttcttggattctaccctgaggaggaggcgcgtggtgagaggagaggtctgtgtaggtggggtggggttcgcagggtccgtggtgctggctgggcgccatagggggcgccccgttgtagtccaggttcccggaagggtgatgggaaaggtggttgaggccatagagggagg

SEQ ID NO: 31488 - DNA, 950 bp, Artificial sequence
  DNA replication origin
cgatgggttggcaggcagatggaacaaggggtggaagacttaaaagcaacctctcaggccagggggaagggaaggagctccaggccggttctgaccaggaagcctgggtaccaccttctctggctcctcttttcagacctccaggttgccccccagagctccacagtctctctcttcctccccatcccctaatcctcgttcgccctttcccatcacaggtgtgttaatttgggcgcttcttggattctaccctgaggaggaggcgcgtggtgagaggagaggtctgtgtaggtggggtggggttcgcagggtccgtggtgctggctgggcgccatagggggcgccccgttgtagtccaggttcccggaagggtgatgggaaaggtggttgaggccatagagggaggggccggcagggggcggcagcggatccgcgtagccgcccccgcccacgtacaccggactgccctgcatggtgggcgtcccgtaggcgcccccgttggcttggaggacgtgcggctcatactcgggcgccggggtcggagggtacttctgcggggcgccgcagcctttgagagggggctggtagttggagggcagcgcgtaggcattctggtgggctttaccgaaggcgggtggggacgggctctcgtagctgggggtcatggagtgtaaggcgttcatgaagccggccgtggactgcatgggctgcggggggctgccggctggagatgggccccccgacgacgaggccaatcccttggccttctggtccttcttgtacttcatgcgccggttctggaaccagatcttgatctgccgctcgctgaggttcagcaggttggccatctctacacggcgaggccggcacaggtagcggttaaaatggaactccttctccagctccaccagctgcgcgctcgtgtacgccgtccgcgcccgcttggacgc

SEQ ID NO: 31489 - DNA, 872 bp, Artificial sequence
  DNA replication origin
ctgaaaaacaactcccccggcacaggtaccagttctctgccttccttgtcctcagcttttgtcggagccaggaatgtcactgttattctagcacccagcccctaggcgcccgcgaggctgcctgggaacaatattaggtggccagcgggtacatttttgatacccctaccccctaatgacccctgaccccgccaacaccctcctccctctagctgccctccaccggagcttctgaaagctccagaaggcccagtgcgtggcctcaaagcccttcccaaggccacagagccaagacgaggcgctgccgggaggatgcagagtcgtcaacgattgattattattaagtatgattactgtgggtattaatcacaatcgcttggacggcccggggtcccggcctccagaaacggcagcctcttcgtgccacacttcctgcccacgagtgtccagattaccccgaggattctcctcagtctcccatcctgtcctcaggacggggtgggcggggaggggaaatgtcttccctgacctggaattggggataagggggagaaagcacgcacgcgaaaatccagccctaaataaatggccatgcggctctgtctgcgtgacatgatcaaattttcataagctggggcagcgaaaggagaacaggtctcttaataaatgccactattatagagtgtccgctaatgcgacgggcggtggggtgggggagtgaggaggcggcggggacccgaaggggagggcggcgggggctctgagtccaggcctggatttattaagaaacgatgcattcaatttcggcgtgttcagtaattatcttttatttcattttctccccttcccacccctccccctcggatccagca

SEQ ID NO: 31490 - DNA, 826 bp, Artificial sequence
  DNA replication origin
attagcggacactctataatagtggcatttattaagagacctgttctcctttcgctgccccagcttatgaaaatttgatcatgtcacgcagacagagccgcatggccatttatttagggctggattttcgcgtgcgtgctttctcccccttatccccaattccaggtcagggaagacatttcccctccccgcccaccccgtcctgaggacaggatgggagactgaggagaatcctcggggtaatctggacactcgtgggcaggaagtgtggcacgaagaggctgccgtttctggaggccgggaccccgggccgtccaagcgattgtgattaatacccacagtaatcatacttaataataatcaatcgttgacgactctgcatcctcccggcagcgcctcgtcttggctctgtggccttgggaagggctttgaggccacgcactgggccttctggagctttcagaagctccggtggagggcagctagagggaggagggtgttggcggggtcaggggtcattagggggtaggggtatcaaaaatgtacccgctggccacctaatattgttcccaggcagcctcgcgggcgcctaggggctgggtgctagaataacagtgacattcctggctccgacaaaagctgaggacaaggaaggcagagaactggtacctgtgccgggggagttgtttttcagcttggacgtttgcctcgactctttcatccaggggaatatctgtttggtgagggtggagttggtgccgggaccgcactttgggggaccacttttgctgggcccgcccccattactgctgttgctagtggcact

SEQ ID NO: 31491 - DNA, 1174 bp, Artificial sequence
  DNA replication origin
gacgagtgtggaggaatgtggagctgtttgggtgggcgtgtggacatgatcttgttaggggatgggagagccctcccgctcagaaagggcgttgaggcccaggagggttttccagggcagttgggggctgtgggtactgagggaaatgtgaggggcatctgttaggggcagtggggttggggggcgaccgctgggtcagcttccacaacccagctgccaccattgcccaaccctttagcacctagcgggttatttgaaggcaaaactacaagggattgcactgaggctgagtgttaagcccagaaggtaggaaagggggtgatttatggcttcagagaagctgtgtttactcctgcctgctctggaaaccaaaaaccaaacagagcagaggccagagaagcccctctccttggagtgggaagcgatgccagcctgacgcactgggatttattttcccagatgagggagaatagtgggaactgtccctttgcaggcgcacagtgtggtgggtgtatgcaaagggagcatgtaagcaggcacatgtgtaggtatgtttgtgtattgtgtgagtgcatctgcacatcgggagctgtatgtactccaggtggggctttgcggatgggtttgcagaatcactttgtgagctgggagattgggagtcaggagagagaccccatgttctctggttctggaactctgggatgaggtagctctagacacactgccccttgtcctgtccacgaagtagtgctctttcctgcttttttcttcccgcagccacatgcagcagagcccacttggcctggcctcctggcccctgcccctctaccctttccctgtgtgcctcctgtgccttctgcccacccagcctcatcttcactttgaatttttaactttgtggtgggaagccaaggaattagtgagtatggttggttgaggaggggaggccaaaaggagaaaaggcttggtgtggtagggaagatcggggagatccgtggtttgaggctggaccttggcagccttgtgtcccaccattactgctcgaattcccccaaaatctctgtttgggagtggggagcaagtgaataatacaaagacgagcagagtaagggagccatgcaggaggatggcggtggggagaaaaacattttgacccccagatagtaatttccgc

SEQ ID NO: 31492 - DNA, 932 bp, Artificial sequence
  DNA replication origin
caacttggcccgctctcaaagcccgagttcagctcggtgccagacgagcccggggttcccgcagccctgcgcggcccggacggagtgggagcttctcaggaaactggcgtctgccgcgcccggagtgccagatccgcgcgctcctggggccctggaggccgaacaaagccgggggcgggggcgggggcggggtgggggcgagcgcatccgggcctctcccccagctcggcgggacgctcgggggttgctgggggttgctgcgggttgagcgactaggatgcggctggctgcggcggcggagccccagcctgggccgagggtccggggcctggcagtcggcccccgcgcgcacccagcgcccggccgcccgccgttgcccgcgccctagcggaagaccgcacaggtaagtgtggggtgcggagccggggcgctcggggcctggcgggggtgcagaggtgggtggctgagacccccgcccccaggcctctctcctgggacaggccgggatccgaattgaagacgaagatgagagcaactttgaaaggcagggtgggggcttcaagggggtaaagggacctgggggtggaggacgagtgtggaggaatgtggagctgtttgggtgggcgtgtggacatgatcttgttaggggatgggagagccctcccgctcagaaagggcgttgaggcccaggagggttttccagggcagttgggggctgtgggtactgagggaaatgtgaggggcatctgttaggggcagtggggttggggggcgaccgctgggtcagcttccacaacccagctgccaccattgcccaaccctttagcacctagcgggttatttgaaggcaaaactacaagggattgcactgaggctgagtgttaagcccagaaggtaggaaagggggtgatttatggcttcagagaagctgt

SEQ ID NO: 31493 - DNA, 1057 bp, Artificial sequence
  DNA replication origin
cttccgctagggcgcgggcaacggcgggcggccgggcgctgggtgcgcgcgggggccgactgccaggccccggaccctcggcccaggctggggctccgccgccgcagccagccgcatcctagtcgctcaacccgcagcaacccccagcaacccccgagcgtcccgccgagctgggggagaggcccggatgcgctcgcccccaccccgcccccgcccccgcccccggctttgttcggcctccagggccccaggagcgcgcggatctggcactccgggcgcggcagacgccagtttcctgagaagctcccactccgtccgggccgcgcagggctgcgggaaccccgggctcgtctggcaccgagctgaactcgggctttgagagcgggccaagttgccaggcgagaggagcggcaactgacaggggcacggcgaggcgtagggagcgccgggggcgccatggcggaaggcgggcacaccggcgactcttcaatgtcaccagcgaaatgggttccatatgtccgacccggcagagaagggaggggaagggagagagttctgggcaggacaggagtggggacagggagggcggcaatggagggaacagagcaatggcgagggggcaataggaaggatcagacgggcgagaaagatttgcatctccccttttccctcgagttttctaaagctgcttaggctggtaggaacttgctttctctttttccttttcttgttctttcctgtaagatgggggaggaaggagattagtaggggaagcatccgcttgttaaggctgggagtttgagggaggagatgtggaatggaggtgaaagttcttaggcggctggaagatcaacaacttccccaggtccctagagaaaaaaagagaccaaacccacaagggggaagaaaagccaagaaaggattccagggtccaggtgtgaaagtcccaactccccccacccccatgatgaaattctgtttggggaggtcccaatgattaagttactgatgctggtgattgtggtggaggctgaagtgtcctggacatcttggccat

SEQ ID NO: 31494 - DNA, 971 bp, Artificial sequence
  DNA replication origin
gaggagcccctgctccaagctctctccacccttcaccccagaaatgcccttctccaggtcagcccattctactgctcgccataggtctcctcatccggcaacctcggccccactcgggtgtcaaaaatgaagaagggtgggtggtcaaaagcccttccaggcatcccaatagaagagaccgctgaaaatgcgggaggtgggttccgcgtctttttccaaggagttatttaatagtcaaaagactcctcttgcccaggtctaaggctctggggtagtagggacattggcgaaggggggaggggtaaggaaagcgttttgccctggggtttctgcggccggcgcgtagcagaatgagaccctgggtggtgaggccagtgttattgccggaggggtcgcaaagttggagggtcaaaagtttacaccatgcgtgagtgggagcggcggaggcgactagcggcgggggcggggtggggcggtgggggagggggctgtatgtgtgtgaagacggacgagggagcctgggatgctggaggtaaggaagacttgtgggttgcagaagtgggggagcagaaatgggcagcgaagaggcagatatctggggaagggaaactgaggaaggaaaaatcccttctccaaaaagggcgagactggtggtggtggtggtgagttgtagaaaagacagcgcttaagggtgtggtgaaccctctgagcaattttctcttccaaagataatctttgagtcaccatattaaatttaattaaaaccttcctagccacacacattttagaaattcaattaaattacccccacgtctttgtaggacttctggcagggccaaagaatacttccaatgtgaaggtttgattttcaccaacatcaactcactctgcttgccctaaaggggtcaaactactggctctttcaatcctccacccctgggagaggcaggcctgttttcaagaacccttaa

SEQ ID NO: 31495 - DNA, 1573 bp, Artificial sequence
  DNA replication origin
gtcgggctatgcggacccgctgagacattaccccgcgccctacgggccagggccgggccaggacaagggctttgccacttcctcctattacccgccggcgggcggtggctacggccgagcggcgccctgcgactacgggccggcgccggccttctaccgcgagaaagagtcggcctgcgcactctccggcgccgacgagcagcccccgttccaccccgagccgcggaagtcggactgcgcgcaggacaagagcgtgttcggcgagacagaagagcagaagtgctccactccggtctacccgtggatgcagcggatgaattcgtgcaacagtgagtgagacttcccgtcgccgtcgccccggctcccctgggcgcccaccccgggacacagaactagtgagcgccccctgccccaatctcccacagggtgctgggtgggcatctcagttaggagatagaagaagattgggcgccggccgggggtctctcgctgtgtcccctattaggcaggagttacaaagtttgcaaagtcccagccgcactgggagccatggggagcaagtgtgctctcctggggcgcctggccagagccggggttccaggacagggaagggagcaggagcctgcagtcactggcttggctttactttgagcccccaacccccctctcccagccctggtagggttccccaaccaaagacggctccattaaaaacggagtgcgtcatgcaagggggtagggggtgacgctgaagagaaagagttgagtctgtctgggactgtgtttccctgtgggtggggagctggggcaagatgaggcaccaggaaaggggtggtagtcagaggagggaggaggaataaggggaaggaagagagagggagcaggcggagcgagagagggagaaacaggcgcggggtctcaggttggattatttgttggccttaagtcccaactgatgtccattagccggactcgaaagtgaggagccgttaatgtggactatggatcgatctacgtcattacggattaacggcctggatttatcattgggttggggggatgacggggggtgggaacaagatggatggaaagggagggaaagacaagatgcaactaggaagagacacacctgaccagcccctccccccaggctcaggtgggagttcaaactgctcctcccctcccccatctagagtctagacagacggcacaggcctaggagactaggagggaatctggagggggcgctggaggagtgcgaaacgggggaagggagccggcagaatagagggcatcccggtactggctggagtctgtgttcgagggtcgactaggggagggggtcctgggcccggtgaccgcaggcctcagcatctccactctgcgtaacaggttcctcctttgggcccagcggccggcgaggccgccagacatacacacgttaccagacgctggagctggagaaggagtttcactacaatcgctacctgacgcggcggcggcgcatcgagatcgcgcacgccctgtgcctgacggagaggcagatcaagatatggttccagaaccgacgcat

SEQ ID NO: 31496 - DNA, 883 bp, Artificial sequence
  DNA replication origin
tcgcacgccctgggactgacagagagacaggtcaaaatctggttccagaaccggaggatgaagtggaaaaaagagaacaacaaagacaagttccccagcagcaaatgcgagcaggaggagctggagaaacagaagctggagcgggccccagaggcggcggacgagggcgacgcgcagaagggcgacaagaagtaggcttcagctgggactgccagggccgcggccgcccgcacgtccgcgggtcccggccgcgccgccgccgcgcgcccctgcccgagagagctctggccccgctagcggggccaggagccgggcctcccaccgcagcgtcccccgccgcgccagtccccgctagtggtagtatctcgtaatagcttctgtgtgtgagctaccgtggatctccttcccttctcttgggggccggggggaaagaaaaggatttaagcaaaggctccctcgccctgtgagggcgagcggcaaaggcccggctgagccccccatgcccctcccctccccgtgtaaaaagcctccttgtgcaattgtcttttttttcctttgaacgtgcttctttgtaatgaccaaggtaccgatttctgctaagttctcccaacaacatgaaactgcctattcacgccgtaattctttctgtctcccttctctctctctctctcgctcgctcgctctcgctctcgctctctctcgctgcgtcctcatttcccctcccaatcctctctcccctctgcaaccccccagctcgctggctttctctctggcttctctcttttcctcctccacccaccccctttggtttgacaattttgtcttaagtgtttctcaaaagaggttactttagttagcatgcgcgctgtgggcaattgttaca

SEQ ID NO: 31497 - DNA, 944 bp, Artificial sequence
  DNA replication origin
ggccgcggccctggcagtcccagctgaagcctacttcttgtcgcccttctgcgcgtcgccctcgtccgccgcctctggggcccgctccagcttctgtttctccagctcctcctgctcgcatttgctgctggggaacttgtctttgttgttctcttttttccacttcatcctccggttctggaaccagattttgacctgtctctctgtcagtcccagggcgtgcgatacctcgattcgccgcttacgagtcagatagggattaaataggaactccttctccagctccagggtctggtagcggctgtaggtctgtcggcctcgcctgcgtccggcggctgctgggaatgggggaaagggcgagacagaggggaggggagggtgggggagggggcagggacggagaaggttggaagattcgtgaacgagcctgggagaccattataataagggcaggggaccttctaccccgtgcgggggcggggggggcgcaagaaggccgcggtcggcggaggaggaggggcgagggggattagacacaagtgaatctaagggagccagaaaggggagccccctcccccggtaaccagcaccagagttgtgtaggaggtggttcagatctattagaagtgccataaactttaggaggaaggatgtgaaggaggggggaaaataagaataaaaaagccgggtggggacgaatggacccaccttgaaaagcccccagagcctctgccccagaagaaaagtttcttcagggtaattaaactataaagcaattgagaagtgcaaaagttgagcgcccccactcccaccaccctctcttcactaccccccataaaacagtaaaaggggaaaaaaaggaggagaagaagaagaaaagtaaggcaggatgaggggtttatagattcaggaaatgtttctaagcgacccccttcaagggaaag

SEQ ID NO: 31498 - DNA, 990 bp, Artificial sequence
  DNA replication origin
gggagaggagctggcgggggccggggccagcggccagcgaggccgagagccggcgagggcaagggccggagcgcactgggctgcccggggccgtgcggctggcagagctccccgcgccacgcgcagaccgtaaaagccggccaaggggaagggggagggagctcattaggattttatttgcgatgcaacagcttggcggaggattgttcctagcagatctcgcgctgtagccgcgcagagtccgcaaccggcgacaggaggggcgggggaagcccaggacgcggtgactgagccccctccccggatgcgccggcccctccccgggagccttccctccggtggcccctctcctcctcggcgtcctcgcaggggctaccgcttccttttctgcggtcccccgctgctctctgcggggctcccgagccccagcccgggctgtccgcctcttggggagtcggggaatcgcttccgaatatcggggcatctcgaagggaccccggggagaggaggggtggggggaagagagagttgcagagaggcggagaactttaccctttgtgggtagtttcccgtcacctcccactcctcaaaagcaccccggccagaacgccaagtctggctgattttcaggaggtgctactagatgagaagagagggttctcctattatttatttttaaggttgagaagggctcatcggtgagggaactcagcctcaaacaatgactcgcaggctggtggatcaggtcctcgtttcttactctttttgggaagtagggatgttttagtctctccttgccctgctagatttcccattgacggagtggccccagggccctttagagcatccttgcctgctggagagtaaagagcagccccattccttgcagggtcctgtcacctccaacctgccaggtggaatcctaagagctggcatttagggaacacattcttccccaaccctccccgcacactcccaaacagatccccc

SEQ ID NO: 31499 - DNA, 875 bp, Artificial sequence
  DNA replication origin
ccgggtgccacctctccctgcttgggcgccgccgcgcgagcgcttcccttccccctgcaagcgcccggataatgtctgagaatgtccatttctgggacgcttagcagctattatgtcgactcgatcataagtcacgagagtgaggacgcgcctccagccaagtttccttctggccagtacgcgagctcgcggcagccgggccacgcggagcacctggagttcccctcgtgcagcttccagcccaaagcgccggtgttcggcgcctcctgggcgccgctgagcccgcacgcgtccgggagcctgccgtccgtctaccacccttacatccagccccagggcgtcccgccggccgagagcaggtacctccgcacctggctggagccggcgccgcgcggcgaagcggccccggggcagggccaggcggcggtgaaggcggagccgctgctgggcgcgcctggggagctgctcaaacagggcacgcccgagtacagtttggaaacttcggcgggcagggaggccgtgctgtctaatcaaagacccggctacggggacaataaaatttgcgaaggaagcgaggacaaagagaggccggatcaaagtaagttataaaaagtgaggaaatacccaggccgaaggccaggaggggggcggggaggggaaaggcaataaactgcggacaatgtgaagggaaactgcggcggtggccggagagcgggccgggaggaggaggggagaggaaggaaagacggagggaaggggaaagctgcgtgctctagaaggggagactgaggccgccagaggagcgctgcccccacttctccaagtcctgcggggaacaggggctcggggatcgacttgcagctctctcggccctc

SEQ ID NO: 31500 - DNA, 664 bp, Artificial sequence
  DNA replication origin
gaggtggcacccggaccggtgtgagggctttcggacgcgacccccccagccccccaccctcccacccccaccccctgctcaacttctcagccaacaaagtacagtggagcagcccgtctcagctctccttgcaaaatgattggtcaaagtttttccgactgcctgataaagcgtcagctccgacataaatcaatcgggcgagggggctgcgctctcgctgtcatccgtccgcaccgcactccatatcgaggatggattgttttatgctgatgcaatgtgctatcacgtcagggctccggcggccacgtaacctcagccccagctaccggccgcccggtccccccctcccgctgcaggaaggggggcagttctcaacatggggcggcgggggcggaggagaggcggagggaagcggcgggctgccttgggagggacgcaggctgtagagccctctccccaggcgggtcggggagggagggagagcaagggcggagggagggagagagccccagcccggggagaagccatagaggcccgagaggatactggaagaggaggtgctcctgtccccccacacacacctccaccccgcaggccctcatttcctcttctctttccccttgacaaaagatgtttattaaacaacaacagcagcagcaatcca

SEQ ID NO: 31501 - DNA, 921 bp, Artificial sequence
  DNA replication origin
ggctgggtcagcgccgactcctccgagagaagagcgcgcctggcggccggttcggcggaggccaagtcccgggggctggggctgcttctctccacgcggacaaagtgtgcgggcaaagaaaggggccgaggcgggtgcttctgccgctcgtaaatttgtttccccttccttttaatccgcccccggacgtctttcttttcaggacaggaggggatgtaaaccgtttgaagttcatcaacacggtgaagttttattgtatttccggtccccaagatttatacccgggagggggagcgggcggccaggtggactccctcgctacctcggacttccctgccggacacgtggccactcggaccctcgcttctgggcgagggcgggagggagcctggactgggccgcggccgctggctccgcaccttccgacggccgcgcactgccggcaccgccgccgcccaggtaagtccgccgccgccctcggcctgcacagctgcgtttttgcgatgggtgcgggtgtgagcgtgagcacctgtgagcaggcgggtgtctggagaggcagaggtgaggagcgggcacgttagggggccaaggacccagaccgaaggtcaggaaggaggaagcaaatttgttctctgtgtcccaatcccagtccttagcctctcagtccttattctgcgaagattcggaatgaattgtcttacctggggcagctcggcctctgcagagccagggccctgggacattttgggcagggtgccttcacagcaactgttcagatcaaccggctttcccctccaaatcccattcttcctctgtttgttccctagaattcccgaaactttctgacactctgcttttccacctttctctctgtcactttctttctcagcactcttttgtctcactctcctgtctgagccc

SEQ ID NO: 31502 - DNA, 1655 bp, Artificial sequence
  DNA replication origin
tccctccctctctccctctctgcctctctccctctctctctcttctctctctctctctcttctctctctcttctctctctctctgctctctccggccatctgggcgctgctcctccgcgcctctggcctccccgcggcgcgccaggcccatctcctcaccagccgctctgggatccgacggcgccgtgggtgggggcaggtgagacggccgagccccgcccgggcggaggcaggaagcgctctcgcctatccccctcccggaccctgtcctcgcccgccactcaccggcgccaggggaacgcaggagcgtgagccccttcgcgcccccagcgccgtcggcgtcgctgccccagacacagacactgcctcgagaggcctcacagaggcgggggcagaaggcggcgacccagagccgccacatcccccgccttgggcgccgtcacagtccccagacgccctggactcctgcagtctacgaagacgcgcgggggacggcgtggttccgagaggtaggtgaggaggcgggcgcagcccttcctctcgcagctggggactgcggcgtgaaaggcccctctccaagctgggcagccccgtggcccgagctttcaggaccaaccgcccgtggcaggcgtgggcttcccggggccaccggcttaaccttgatctccagaccgaggcagcttcccgggtagggcctcggggcgcacccgaaaacgccttggcctccctgtccgctggcacccgaccctacctctccaacaggtgtgtgtgtggggaaagggggtcgcctcccctcgttctaccggaaaccctggctccccagagccgagtgctcagtgccccgcccagcctgaggccctgcgtcctgggcctcctgctcacaaccccggattccaggcggatgccgtgagagaggcaagggccagacgccctgagcagccttgggggtgaggaatcgcttgggatggaagaagggccacttttcctaacggaaattaggaattggcctggaactcttggtctagacagaagcccccagctccccaaggtgcagaatcagctctcccgcgcgctgtctctctagctgcctcctggcgtggagggggcagaatacttgggggagtctcttgctttggcttttgggggcctcataggttttcttcccctctggactgtgagcagcctcctgcctgagagagcgtgtatctgaatctaaggaatgccaggagacgccatcttatttgaaacccacactcacaaaaacggggcatgtgcatttttgtggagggacctgttgtttatgggagtgggcagagggcatccaaaggatttcaaactgtatggactgactcatgggtcaatacaaaaattattcgcctttgaaaaggcatgtaaagaaaagcaagcataaaggggtgtgcatcgtgcatcgtgggtattgtggagtctgagaggaattagtaactcgccggagtcggctaggaatcttatatgacagcaactgtgcctctcggagtagtcaagcaccgtttaaagattgaggatttatacagacatgcgaaagagatgtgaaattatgtgctcccaactgtgctcaataataaaggcagtagaagggaaattcatattttcatctatatgcctcccccctcgca

SEQ ID NO: 31503 - DNA, 1414 bp, Artificial sequence
  DNA replication origin
cgtagactgcaggagtccagggcgtctggggactgtgacggcgcccaaggcgggggatgtggcggctctgggtcgccgccttctgcccccgcctctgtgaggcctctcgaggcagtgtctgtgtctggggcagcgacgccgacggcgctgggggcgcgaaggggctcacgctcctgcgttcccctggcgccggtgagtggcgggcgaggacagggtccgggagggggataggcgagagcgcttcctgcctccgcccgggcggggctcggccgtctcacctgcccccacccacggcgccgtcggatcccagagcggctggtgaggagatgggcctggcgcgccgcggggaggccagaggcgcggaggagcagcgcccagatggccggagagagcagagagagagagaagagagagagaagagagagagagagagaagagagagagagggagagaggcagagagggagagagggagggagagagggagggagggagggagggagagagagagagagagagagagagagagagagaatatgagaatatgagaatataaaaggcaagagagaagcagatccaagggcgcgcccagagaaacatcaaatgcacaaatagacaaaagaggtagaggagaaagctgagtcccaggggctgaaagaagccatgggcgtctgaagcgagcgacaagttatccttgggagttggaaatgtgagagggaggggcgaggccgaaggaggctgagaaggggagggggcgctcacaccctgggcgggaggcgactgatccacacttagggctccgaatccggagaaagagagcgccggaccctcctccgcccacctcccgccccagccgcagcccagcgacttcccgccatcctcggccaccgagcggctcctgcctggggttgttcgaccgggatggctgcaccaggctgaaggttgtccctctacctgcctcctttcttctgttccctgtgccttacatgggttcctccctattctatgaacccagagggaacgaccttggccaaggttagagaaggagcttgaaagtttcactttccatcttagccctcaggacgcctttgcgttttggcccttcgttagcgtgctatcctggaattgcaggctcttctctttatttctgagacccaaatagaggtttaacctccttaaaatcagtgaaactacgacaaacagtggcattcctggctgtctggtctctaaggagtgccccccctccctgacctcagccctgagaccctgcttcctcctcaacctgcatgggactggggacaccccctcacaatccagtcccttcctgcaggtggttgtccagggggcatgtagaggtgtgcctgagctctgtgtcctaagcctggctctgccactgacttcagcccccacccctt

SEQ ID NO: 31504 - DNA, 807 bp, Artificial sequence
  DNA replication origin
gagtgtgtttaaagaattcaggatcctggagcaagggaagatcaaacactcgatctccgggtctctccctggctcggtaacatccagtcgaaggtgaacagggcgcgccggcgcgcggggaggcgcaggggccactccgtctggcgtggggcgcttcgagcgcagggcttcctttccagccgggagtcccccgcggctcagcgacaccggctaataagataccaaatcgggcgagacaacgaaaagctcctggcctccgtatttggggccagagacaccgcagggagtcaggtccccgccgacaaatcggaagaggcctgcgggagttagccagataatgctctccctgtcctacccgtccccaccaatttgccttttacctgccgcagagcttgcttgaaccaaaggggtttgcggtcttctcctcctcaacttgcgatccccaggccttcgcggcccgggaaagaatccagccaacccttctgcctttgtctgaccttcggggaaaagaggcgtgggcgcctgggtcaagttcacggacctggtctgtgtcttttaggacaagcgggggcaccgttcccattctgacgaggagggttctaagcatttgggacagtgtgggggcgaaaatgaagctgcgagaaaggactttcaatcttaatctgttgccctagtctcacatcccctccccctcccgcagccctgtagaggagaaataattagatccgaagggaagcctttgatttggaaaaatgcgaaggtctcatggaatgagcttcccagaaatggtctttggcacttgggtag

SEQ ID NO: 31505 - DNA, 1109 bp, Artificial sequence
  DNA replication origin
aggggcccgggcacgcgcgctgattggctgcggcctgggggagagaagctaataaaatcctaaaggcagaaactgcgaaaatactttaccccagcttattctctctctctctctctctctttctctctctctctctctctctctctctctctgtctctgtctctctctctcgctctctcgctctttctctcctctctctcttctccctctctctcttcttttccctctccactcctctctctctcattccacttaaaaacaacaagagagaaaaggaaggaggtgtcctttcgctgctttccagtttgcagagtctcatttacacgtccggggggaggggaggcgtggtgggcggaggaagaggggacgaggagccgggccccacctccttctcctcctctccctccctagctttctgtctcctgcgctttgacaggtttaacgagagaataaaaagctctctctataaagtgtccatctcctgggggggaaggggagtcgggggtggggctgggaggccgctcccggcctcagaggagaacccgggaatgcgcctgtgtaagaggaggctgggaaatgggggttaataggtatttctggcagcccctggctttgggtcctgggtactagcaccccagttcattcccggtacccttcctgtcccagatgtcctggaatgagctgctccgggccccagggaggtgccctggacgccccttacccagggactcgctactgcccagaatgctctggaggccctgattcgggtgaggctgagggaagaggcgggagacacgaacgtagacgtagaagacatgcgatctggatggaacccaggacactccacttccggacctgaaggggaaatggagcctctagagtggcctgtggaagggtctggatttccctttaagtaaagacatacggagggacggagacccacaggacttgagggagggacggggagagggagagatgagactcagggacagcaacacaaagagggaaagagagaagctgacagagcggatgggacaaaatcttgtaaaatcctgaagtgtcagtcagaaaagagaaagaagagaggcactttcccccttttttgggat

SEQ ID NO: 31506 - DNA, 1599 bp, Artificial sequence
  DNA replication origin
tgcttctgggtggacgcctttggaggaaccgagggggccctgggaatggagcatgggcctagatggcattcaccataccccgatgggaatagatactcctggagggcaatgcctccctctgcgcccctctgcgccccgcttccgcccgggtagtcgatgggtgaccgagcagccggaggaaggaagtggggagaccctctctctccagacccacacccccgaccgctgggccccgcttcgggccatctcgccggattggactgcctcgcgtgcattactcaaaacacagtcagccctctgtgcctgcgtcggtttttggggatttggtgaggaagcccgcgggccgagaactctcagctctctccacggagctggaggcccaggagaaacacggggcgggagcggggaggcggctggaggcccctgtgggtccgctgcttcccgctggacggcggcgcgggctctcggcggcgcgggctcttgatgtccctggagcgacctgagacagactccaacccacgcaggagaaacacgggtcttgggtctgggcccctacccacaaatttgcccgaattcctttcctccccggacaatagcctcagctctcttctgagtcctccacagtaaaaatatagagaaacggagacatggaagtataaagagatatgcctgaaccgggtcaagaagggaatcttggggatgtttttgtagtcagcaggagccttggcgaccctggaggatcaatcgtgatggggaacaggcagataaggatggcccaaggtgggggtgcggggcatctatgccaggagaggagttgcaggatggacagagagatccctctcccccggagtccccagaaggagccccgggaagggggactctgacttgagaaccagtaagcgaacttcccaggcttctggtgtctcctcaaaacgcagcctctcagaagccaaaatgatgcaaacatcgtggaattataaagcgactgatttactcccccccggaaccagcaaaccctccgctttccttctttctccatttcactgatggcagcatttcacctcctccactcccttcctggggattctgctgtccctcatcagtccctccaaagaaactactaaaagaaggaaagaccactgtcagccaagcacggcccttggaatcttgtttctcaatcccccattccactctctttcccctggcggggggccctctgactgatgtggctaaatggaggggtggggggttggggcggagattagaatctgagtatttgcccaaatgcttcagccttctttgttgtgaatatagctgtggctctgtcacatcaaacaagtagagataaccaagaataagactaatgatgaaaatgaaaataaaaataaaaacttccctatacaggctaccaaacacacgcacaccacacacacacacacacacacacacacacacacacaaacgtgtaggctgtctggggctttaaaaatgtgggtgggtctctagtcctgattctgggcctataacttgatgaaagagatgagattagagctgataaaacttctggatcactctagattgttttgtttacaagcaaca

SEQ ID NO: 31507 - DNA, 1176 bp, Artificial sequence
  DNA replication origin
tgtataagtaaaatggggatgataataatattcattttatggagctgttttaaagattaaatgagttaatatttctaatacccttaaagcagtgcttggttcaaaataaaggctatattgtaaaatgaaaatataaaccaggcgtggtgactcatgcctgtaattccagcactttgggaagcccaagtgggaggatcacttgagctcaggagttcgagaccagcctgggcaaaaaagtgagcccccccacccccacctccatctcttaaaacaaacaaaaaagaaaatataataataagattggcataaatattaaatttttttggagtgcctcgcacatactggtgctttcaaaacgttagctcccttcccacttcatcccccaatgtgatatttttcctagagttcaaatcccaaaggagaactttctgcaaagccagaagagtattttttcaggaggggtgagaaataacaactggaaatgaaagaacaccaggctggaaggcggtaggggcatcagcagaggactatgccggccatgaaaaatgggaagtgtcttgctggaaggtttctccagacaaaggaagaacagtgatgaagaaaatgacccaatgatggggatgaaggggatgaagagagttgtgtgagtcccagggatcgctggtgtctaagcgacagctccttggtggactgtggtttaggaaatcgggggagggcgggaaatgaacgttaataagagggactgagaaggggggagtcccggagccgagggaccgtgagggtgagtgcctggcgccatggaacgccaccagggagggcagcgggctaccctggggacctgggtcccgtgtgggtttaaggagacgtgtctagccaggttttcaggggacaggcaccaggaggctgcggtctggagccagcaccgggctttggggcgctcttacccgcaattcctactcccccgtctcgccccgctgggctgctagtccagcttgcaaccacacctgccggccccctcctcgaaggatgaaggagtaacgctcccattggctgccagacagccccaaccccaacccgcgctcgccctaactttgggtccgcccggccctcatatttgcatacggggccttctaggccttcgattggcccctgcagtagctgccatgccccctccct

SEQ ID NO: 31508 - DNA, 1743 bp, Artificial sequence
  DNA replication origin
caattcctactcccccgtctcgccccgctgggctgctagtccagcttgcaaccacacctgccggccccctcctcgaaggatgaaggagtaacgctcccattggctgccagacagccccaaccccaacccgcgctcgccctaactttgggtccgcccggccctcatatttgcatacggggccttctaggccttcgattggcccctgcagtagctgccatgccccctccctcccgaatccaattaaccgcccaggcgctaggggaggggcgcgcccacggttgtcccgggagacgcggaggacgcgcgcaccgcgcacccgggcgccaggggctggaccgccgctcgctcccgcagccctacccttgcccagcgagccaagccgcagtcccagcccatccgcgccggtgccgtcgggcgccgtgcgcgggcgcggccagaacgtctggctccagaggtccagctgcgcggggctgcggtgagggaggggggcaccttgaatttaggccttcgggagagggcaaacctgaagcaggaggcactgtgggaaaacactggttggagacttaaatcagcatctcaggcatattagtgcctgtgtcaccttgggcaggccacgttacctctgtgaggcttagcttcttcaacaggaaaatgggtgttgcaaacctgtgatgaccgctcaggcgtattgaaccctgacctcacctccagagtgtgggggtcatggcctccagtgaactgatcagtaagagagggccgcctagaccgactgaagagtcagtgagacttaaggggttaggggtctgggcttctcagagcaaccatttggtctcaggtggagaatctgtagtagtgactggattcaaatcattgaagatggtcgggcgcggtggctcacgcctgtaatcccagcactttgggaggcctaggtgggtggatcgcttgagctcagaagttcaacaccagctggacaacatggcgaaacctcctctctactaaaaatacaaaaattaaccgagcgcggtgcgcgtacctgtggtcccagctatcgggaggctgaggcgggaggatcgcttgaacacaggaggcagaggttgcattaagctgagatcgcgccactgcactccagcctgggcaacagagggaaactctgtctcaaataaataaataaacattgttcatttgggcctgagttggtaacctaagttcctcccaacccagatccccttcacctgctgatgtgcacaggcagaacaccagaggcaagggtgtagcttagcctcaagccgaccctggaagcctactacgtggtgcttacagtcaccccggagtgaacagaaggcccaaagtggaaccagtggcccatctgctgctctttcagaaacctctctgccatccagtcagcactcttcccttttccccccgcaggtggccccgtgctgtggtgcccctccccgacaggccctaaggggccaagtgaccatcattaactggtcacccagcagatgcttccctaagaccaactgtcccagcctggtcccctcccccatcccactgttgtctttccccagcgtcctaccaatctgctctgcctagctcctgtttggtctccggtccctcaggagtgatattgtgatggaaatgagggagaggatacaggagagagcagcaaagatttacggctttcagagagtttccactaaaatccctgacaactggttatttatgagatgttgcaacggg

SEQ ID NO: 31509 - DNA, 1238 bp, Artificial sequence
  DNA replication origin
atcccgacgcccggagctggcaagatttgggccgtggaggtgggccgccgcgagggcagcgcagtgggtggggggtgagttgtagtgggagagggtggggggcggggaaggtcgagccccggagctcggggctgggggaggaaaaaccccggctcaccgcttgatccggagtagacactgcggcgcggtgcgctcgccgtcccagtcggagctgagcgtggggtcccagtggctaagcagcgcggccccgtgggcagcggctgagggcgggagcccgggcagcggagccaggccgctccccgggcccccggccccgcccgctgccgccgccgccgcccacacatccggcaggaaaggcggcccgaacccgccgccgctgccgctaacgccaacaacaccagcaacgctgctcgccccggggcccgccgccccggcgcccgccgttgccgcctcctcagtcggactctccgccatcgctgcttcgcttccgggactactcggcagcacgtccgccgaccagagcggccgctgctcccgcccgctcccgcaccaccgagaaccgggccagagtgtccccaccccctccgcttccacagcccagacggtgctggctccgcccacccccgccccaaccagcgagaggcgctctgcaagagcgtccacctacggtcctccaggacgggaggggtgggaactagcaggccgtgatggttctgggctcgtgtgggtcctgcgctgtgcggaagtagcggagagcccaattcaagtgttgaaaggggagaagagaggagggagtgggggaggaagggccatatcattcccgttaatggcggcgaccctcagacgtctgcatggttaggattggggatccagcatcctcatgggaagctcagtagagaagttgactcgctttgggccccttctctcggaaaggctctgcgattgatccctcctgcacacttgtgcacctagggcagggtaccattgcccttgcctgcaacaggaccaagagagaactcaacttggaatgaaaagctacctcttttagagtttattcaacatatatttatgaagggcctactaaatgccagtcactgttgctagttgttgccatggggataatgaaacagaactagagaagcttggtgaaaggaagaaacatcaggcctcctgactccaagcttagtactttttcttcccacaaatcttggaatatacaggaatcgaggtactgtgag

SEQ ID NO: 31510 - DNA, 1164 bp, Artificial sequence
  DNA replication origin
atgtcagaattggatgactgaaatggctggaggaggaaaagagttgagtgctgagtttcagttagaggtggcaatccctccacagttgacctcctgtgtcaggcactgtgccaggtactttacacacattatattaatttttattacaaccttgaaaagtagacacagagacatctgaaaggacgtggaacatggggaataagaactaaacgaagatgcttgtgatgggggcatggggagaagtcaaacaggtttcaggattaatagctaaagagcactgcccttttcttatgcgataggtactattctatgtgcttctggaaaacatcatctactaaatgataggatctaagatcagtcacccaagaaataagcacagaaaggacttaggcctttgttcctatatttgatgagtatatttgcttcatagaagtaaaacagacgacccggggagggtggggggtggggggagggaaattacaagaaagaagctcctgagtgggatattacaatccagagtggcactggggaattggggggaggtagcctgtgtttctggaagaggcgtaagagtggacagctttgggacactggaaaaggggttcaaggaaagattggggcgagggaagcgatctagacctgggaaaagactgtgtggagggaatctgagaaaaacggaggataaaaagaaaggttggctcgagtcagaggcatggcaaaggaagctgagttcgtctgtgttaggaacggggctccagaggagaagagaggggaccgatgggtggggcctgcgggcagcatctagcaaggttggggtggggaaggggaaataggggcggcgccgaaggcgggagggggcgttactgaagcgctaaagggtcgggtttccacccggaggtgggaggtgtgggggagggtggccggaatggagacggagggctcacgggaggttgtcgaggggcggggtcggatctgggcacacgaggcgggggttggtgcttgcgggtctgagggtggggggagaagggagttggatcccgacgcccggagctggcaagatttgggccgtggaggtgggccgccgcgagggcagcgcagtgggtggggggtgagttgtagtgggagagggtggggggcggggaaggtcgagccccggagctcggg

SEQ ID NO: 31511 - DNA, 1573 bp, Artificial sequence
  DNA replication origin
gccctaggttcgggtctcggaactttgtttggggtgcaggattccgatcctggcgggaaggcgggagagggacggagggcggggggctaagcgggaagccccgcccacgtccccaggtcagacccgcggggggagggggtaatttccgctccgcgcacggggaagcgaggggcgggagcttaggggagggggcggcggccactcccctcctcctcccgccgttcctggggagggggaagcggatccgcctgggtcccttccctcggctttgaccaactcattccggatcctccggctcccggagcccgagggaaggacccgactgggcaaggggcgacacgtgggcggtcgcaccccgtctgggcggtgggggagggggctgctcgccgcgcgtttcggagtcccggatacgcggcggagagcgggacgcgcggtccacgggcaagccccggctccacggcggagcggcgagcgaggccaacgagtttctagcggcggaggctgggatggcgccaggggtggccgagagcgcggcccggagaccctggaaccccctcgcccagggaacggggaaaaaggaggggtcgacccccagaaattctggaatccccttgaacagggcgaaaactggggtgttactccggactctgtgggagggaggataattctagcgggggcacgcgtgctgggagggcaggtgaggaagggggtcactccccttccccagtccccgaccccattgtctcagtcgcctgcggcccgggccgactccgcaacacgtgttgactacaccgatatgaatgccttgaattttttttattgttattatttttcgtttgcagagtctgagctgactccgactttggctcaccgctctgcggccggacgattgtatgccattcaaaaagtcgggagttgaaagacagcacgcagcacctttgtccccctccccgttttcccggcgcgctgaaaagaaatggggctgggacttaggggcgggggagggcttccaactcggtttctctatatcctccaccaccttagagcccaccctccccaatgagcgttttgttctacccagccacgtgtttgtcggatttttgtttttgtgatttttttttcccatggaacaacaagaattaaagtactaggagctatttgttgttgagtagaaagagaatattttctgtccaagaaggtgggagacatctgtgtctcacccccacacacacacctccgaccctccccccttatctgactcttaatacttagctgttggtcacaagcattatttttaaacaaaccaatgagtaggaaacaggcatgccacatagtaggcactcaataaacatttttttaaatgaaaaacaagctaatacaaacagcacagcaaagagaattgatgaaaattagagtccaggggggaaaaaattatcttggccagaacgtgtggctctgttgcccgggaacttttcttggtgatgtgtgtagacttttgaaagggctaaaagatggtctcaaaaaggctgttgtatttcttggccttttcctaaagaggagccccaatctcctt

SEQ ID NO: 31512 - DNA, 1700 bp, Artificial sequence
  DNA replication origin
agggtgggtacggaggccaaaccccgcaggcccgggaagagaggagttggcgggagaggaaccggaaggtgcgggtctccgttgttcggggctctcgttgtggcttttccgggaggtggctgtgttcttaccggagaaagtttcgatggccttcatcgcccagtgctcgtccgggcagtccacgaaggcgtagccggatttgaccaagaactggccgctgtaggagatcttgtgctccgcaaacactttctccaagtccgcgggggtcacgctctcgttgaggttgccgatgtaaagcttgttcatggtggcggtctcggggcaggacgcggtcccgggcaaggccgaacgagcgggcgcgggcggcgagcctcctaggccaagaggcggagaggccggcggcaggagccgcaaactttctttgcaccccaccccagaagttgtcccgagcccagggcggggaaggcggcctgagggcgcgcagaggtcgcgggagagttcggggagagcccaggagaagtgcccgcggcgcgcagggagacggacgacacggcgcagcttcttcccttcggtccgaaacccctccgagagggctggtgtgtcacgtttctccgcggccgccctggcgccgcctctaaataaaatcgacttgaaaaaaaatggagcggaaaaaaaaaaaaaaaaaaaaaggagaagccacgtggtgacagcccccacccaccctgcagggaaagacccccgacgccacagggcccctcggccctccggccaaacccgataatctcccgcctgagggtggggaactcaactcacccccggggtaaactggggcggtgcggcagcgtccctgaagctctacaggccccttccccctttgcaagaacctggcccctagggaagcgccccgcccccacccatccccctaccccagcccaaactgggggaggatggtccagcccagatctcacatgtcttaaagggtaaaatgtacggttatttttcattcgttttggggggcggggttgctcacccctccccggttaactgctagcgactgacaggcgggggacggccgagacagacaaagagaagccgaagactctggggtcttcaggagagggtcgcacgagctggtgatttaaaaagaaaggaaccttttccctagatgtttaaatggggggggtctccgccttccccacgccagccccacgaaactcccccgcctccggggatgcaggaccgggggaccctgcgagcgcgggactggaaagctgggaacggggtatcccagtggagaacgaggaagccgcaggaaataatgttttgagatccccacgggagaaagggtggttcgcacccggggtccggctgttaaatgataacgtttcggggtcctgaggggaacacgcggaactggccggagatgactccaggagacaggaacggtgggagacaaggaagaggagtgatagctagggctaaccggagcgaactgaagggggaggtcttagggagggagtgaccgggtggagatttgaatggtccccttttccctcccagagtcggggacagacaggtggagtttccagagcctgcaccacccgggacactgctggcagctctctaggccctaggttcgggtctcggaactttgtttggggtgcaggattccgatcctggcgggaaggcgggagagggac

SEQ ID NO: 31513 - DNA, 917 bp, Artificial sequence
  DNA replication origin
tcactgccaccgcgcgcgcctctcggcccagcctcggcgtctcgggaagcagcatggcgacccggcgccgccgccgccgcgccaccccgctcacgccccactttcaaatcaaaatggctcaagccccaggccctgggcgggaggcaagacccccttccttgcaagtcctgctggagggctgcattccccacgcgaagcggacagatcgcaggcggtccgggtaccccttccacgcctggaaaggcctaagactgaggaacgggagccggggttttccagctgggggggcgtccaccggcggatagggaggggctgggcgtggaaataacgcccagccaggggtcatccccgtgtccctaaattcaaccccccactactgccagtgggggctcccgccccgtcggtggggaggaaggatgggggaagccagagctccttatctcaggctgggagaaagggatgaggaaatcccgaatgtttctgcgcgggggtgggaggcgcagagcgagggagggggcatcgaagggggtaggtcgagggtgggtacggaggccaaaccccgcaggcccgggaagagaggagttggcgggagaggaaccggaaggtgcgggtctccgttgttcggggctctcgttgtggcttttccgggaggtggctgtgttcttaccggagaaagtttcgatggccttcatcgcccagtgctcgtccgggcagtccacgaaggcgtagccggatttgaccaagaactggccgctgtaggagatcttgtgctccgcaaacactttctccaagtccgcgggggtcacgctctcgttgaggttgccgatgtaaagcttgttcatggtggcggtctcggggcaggacgcggtcccgggcaaggccgaacgagcgggcgcgggcggcgagcctcctaggcc

SEQ ID NO: 31514 - DNA, 1043 bp, Artificial sequence
  DNA replication origin
cgggcaattgagaactgagacggcgcagctgaggggcgggctgtccccgcctgtgcccacggtcgccccctccccagcccctctcacctaacccgggaagctgagcactcgccctcccaccccggcctctgggtgggctgaggccgcagcgcgcaaggaaggggacagagcagccccccagcccctccgctacagggctccgcacggtctcgaatgttctaccgccaaagcccccttgggcgccccgactcgctccaaacctgtccggcggggacccgcggcccttggctacccgccctgggccccgagggggaggggacccgcgccaggggctgcggggtgggggtggggcccaggactttgccctttgtctctctgcagagccaccggccggtcgaaacccgaccccatggcgaagccaggcagccggcgaggggcagtctcccgctctggggtcctttagtaaatccagacccgacctccctgtggtcagggctgtgactgaggtggtcctgtgggggaagggggcttcccgcctgcaccaggcctgcaagcatttaagtggcaaccggttgggggtagggaaccgggaagccagggagaggctggaagtggggccgcggaggctggaggggagaaaatggcccgggaggcggcattccttagagaccttggctgggccgcgggaggaggcgggacggggcgggaggcctcccactgtgaggccaggaactaaggcctgggagcagggtgggggcacggaactaggagccttcggaacccgcagagaaagaaggctctcctcccgggctagtccccaaggccttctgggaagctccatagcaaagtcacaatagaagtcatactcgcccccatgcagagtaggacatttgtttgggggtgagaatgacctttcagcccttttggggtgtcatcaattaatgatcttgttaataactcacctttgcatagtgctttagagttcacaaagtacttctttttgcccacactatgaacctggaaccaccacaagaggctgagtt

SEQ ID NO: 31515 - DNA, 951 bp, Artificial sequence
  DNA replication origin
gggggcgaccgtgggcacaggcggggacagcccgcccctcagctgcgccgtctcagttctcaattgcccgttcacgagggcgcccctcccccgcctcagctgccgccgcccttcccaggcaccgcactatccccgttagtggttctccccgcggtccccgtccccctcagtctccgcctcagtctccccctcagtccccgtccccatctgtctccccctcagtctcagccccccagtcgccgtccccctctgtctccccctcagtctcagccccccagtcgccgtccccctcagtggcccgctctgctgcgctttcccctgctccaccgcgaggggccgtgttcaccgcctaggttctcttggccgtcccctcctcctggccaaggataggcgagaaccatcttggaaggcactcagtcctcccagacaggatccttggtggtagaacattctagaccgtgcggagccctggggaggaagacctccacagagagggcacttgagggggggaggagggccacgttggggcccttgtcaggggagagactggctgaggaagcgcccgccaggaagaagccagctgcagcgcctgtttcccaccgcaggtcatggttggcagctagggggagacgcggatccctgagggctactgcgcagcggccgccacttatggacacgcagacgcttgcggggctggtgcccagatgtttgcccatcgtcatcagggggcactaaggaccccgaggagcacggggatgtctgccgggtccttctcatggtgcggtgggaagctgccgaagacagattgctttggaggctggtctggtttcctctcctggctcctgagagggccacctcggctgttccctctggaggacagagcccgactctgtctgttttcaaggtacctctcatgacgccttccactgggcaccagctccatcctcggcc

SEQ ID NO: 31516 - DNA, 897 bp, Artificial sequence
  DNA replication origin
acggcaaccatccgatttctcaatcttttccccacctttcccccctttctattccacaaaaccgccattgtcatcatggcccactctcaatgagctgctgggcacacctcccagacggggtggcggccgggcagaggggctcctcacttcccagtaggggcggtcgggcagaggcacccctcacctcccagacggtgcggctggtcgggcagggggccgacccccccacctccctcccggacggggtggctggccgggcagaggggctcctcacttcccagtaggggcggccgggcagaggtgcccctcacctcccggacggggcggccggacgggcggggggctgacccccccacctccctccgggacggggcggccggcccggcgggggccgacccccacctccctcccagacggggcggccacagggcggagacgctcctcaccccccagacggggccgcggccgggcagaggcgctccccacatcccagacgacgggcagccgggcagagatgctcctcacctcccagaccggatggcggcgacacacggagttaaatgctgggataagtcagaccttatctgcacttctgtctaggtcctaggctctacacctagtgcataattaaaatcccaagcttggccaggaacagtggctcatgtctgtaatcccagcactttgggaggccaagtcgggaggatcacctgaggtcaggagttcgagatcagcctggccaacatggtgaaaccccgtctctattaaaaatacaaaaattagccaggaatggtggcgctcgcctgtaatcccagctactcgggaggctgaggcaggagaatcgcttgaacccaggaagtggaggttgcagtgagtcaagattgcaccattgcactccag

SEQ ID NO: 31517 - DNA, 945 bp, Artificial sequence
  DNA replication origin
gacagaagtgcagataaggtctgacttatcccagcatttaactccgtgtgtcgccgccatccggtctgggaggtgaggagcatctctgcccggctgcccgtcgtctgggatgtggggagcgcctctgcccggccgcggccccgtctggggggtgaggagcgtctccgccctgtggccgccccgtctgggagggaggtgggggtcggcccccgccgggccggccgccccgtcccggagggaggtgggggggtcagccccccgcccgtccggccgccccgtccgggaggtgaggggcacctctgcccggccgcccctactgggaagtgaggagcccctctgcccggccagccaccccgtccgggagggaggtgggggggtcggccccctgcccgaccagccgcaccgtctgggaggtgaggggtgcctctgcccgaccgcccctactgggaagtgaggagcccctctgcccggccgccaccccgtctgggaggtgtgcccagcagctcattgagagtgggccatgatgacaatggcggttttgtggaatagaaaggggggaaaggtggggaaaagattgagaaatcggatggttgccgtgtctgtgtagaaagaagtagacatgggaaacttttcattttgttctgtactaagaaaaattcttcggccttgggatcctgttgatctatgaccttacccccaaccctgtgctctctgaaacatgtgctgtgtccactcagggttaaatggattaagggcggtgcaagatgtgctttgttaaacagatgcttgacggcagcatgctcgttaagagtcaccaccactccctaatctcaagtacccagggacacaaacactgcggaaggctgcagggtgctctgcctaggaaaaccagagacctttgttcacttgtttatctgctgaccttccctccactattgtcctatg

SEQ ID NO: 31518 - DNA, 1085 bp, Artificial sequence
  DNA replication origin
gtcactctctgtcacctagactggagtgcagtgccatgatcccggctcactgcaacctctgccacctgggttcaagagattctcgtgttctcgtgccttagcctcccaagtagctgggattacaggtgtgtgcaatcaccccgggctaatttttgtatttttagtagagatggggtttcactatgttgcccaggctggtctcaaactcctggcctcaagtgatccacttgcctcagtttcccaaagtgctgggattacacacatgagacaccgcacccggccccattttgcatgcattttgcacgccatatttaaagattcttgccggtcgtggtggctcacacccgtaatcctagcactttgggaggccgagacaggacgattgcttgagcttaggagttcaaggccagcctgggcaacagagtgagacctcctctctacaaattattattattattttttaattagccaggtgcggtcgtgggtgcctgtagtcctagctactcggatggctgaggtgggagaatcatttgagcgctggaggtcgaggctatgagctatgattacactattgcactccaggctgggtgacagtttcaaaaaataaattcttgtatttgtggcagctgggtcattagaatacaatataatcatgcgtgagaggagccatgggaaacactgagcctggcttatgaaaaaggtcctgcaaatctaatttcatctgaagttcaacagactctttcttccaggcacacaggcgttatgtggccgcacgggtccctgcccgttagaaggattcagccacaccccagctttccagttcctggggtcttttgccaggacagtaggtgtggagtgcgtggtgaagtggagggtggaggtgggaccaaggccgaatttagggacccccagcatgagctgcgggtgggtcaaggccgcgaggttggagggcacggggacacagcatagcgaggaaggaacggtagggaccgtggtgatagactaggggtggacgcggggattgtgtttttctttaagcgggagagagaagcccgatcaccggcagcggaggagaaaagtccagg

SEQ ID NO: 31519 - DNA, 1259 bp, Artificial sequence
  DNA replication origin
agtgactgtgtggatcaaagactgagacaaagaaaggctagaaagtcattccttggctctgtggcctatataaattggctgaagtcccttttcacctgacagtttctatggctctccttttgtctcctgtaagatgtcaagtttgaaggacatctggtatgtataatattcgtttcctcctttgtccttggaggaaggaagggggagagagagggaggaagaaaatgagagagggaaagagtagcaaggagagagagaggtggggggaaagagagaggaagggtgggaagaagagagggagagagaaagagagagtggggagggagagagaaaggtgaggggagagaaggagggtgggaagaagagagggagagagaaggagagagtggggagtgagagagacagtggggggaagagggagggtgggaagaagagagggagagaaagagagagtggggagtgagagagaggtgggaggagagagagaggtgggggagagagggagggtgggaagaagagagaaagagagagtggagaggaagaaaggtaggggagagagggaaggtgggaagaagagagggagaaggagagagaaagagagagtggggagggagagagagtcaaggagaaagagggagagagggaaagaggagagagagaccaagaccctagctctggtagaatcatggagatgacagatttctctacatgtcaggaatctttgagatgtcagagacctcaagtcgcttataaggaccccaatcgatttccacatcggaaatgaggaaagatgggagcagtgtacagtggctcacgcctgtaatcccagcactttgggaagcctaggtgaaaggatctcttgagcccaggagttcgagaccaacctggccaacacagtgagaccccatctctacaaaaaaatttaaaaaattagcctggcattatggtgcatgcctgtagtcccagctactagggaggcagaggtgagagaatcacttgagcctttaaggttgaggctgccatgatcactgtgattgcaccactgcactccagcctaggtgacagagcaagactccatctcaaaaaaaatgaaaaataaaaaaatagaaatgagaggctgggtgtgatggctcacatctgtaaactttgggaggccaagataggcggatcacctaaggacaagagtttgagaccaacctgcccaacacggtgaaccctgcctctactaaaaatacaaaaaatagccgggtgtggtggtg

SEQ ID NO: 31520 - DNA, 1448 bp, Artificial sequence
  DNA replication origin
ctcttagcagagaggaggccctggagaggatagttcctctcctcagccaagtcattcagatgtctcggtaggtctctgaagctctcagcagagagaagtaccctctctgctggtccctcatctctgcagttctcagcagagagggtattcctctctgcagctggttgccctgtcccatagatggtactcctctccagagctggagtagatggtactcctcctctctgcagctgttcgtcctgtcctgtcctgtctccctgccctctttgtcctctggccatcctctgcctgctctggctgagcccagggcttttatggacctcaaagaggaggaagtgcatgccgattggtccatgagcagccatgggcaggccggaagaggtaccacgagtctgcactccagtctgtgggactggcagcccagcccccagcccccagccctcaggccctccttggcctgacggtggggccttactagggaccccacccacttctgcccaggactgtctgcctcctgctactattcatggctctggggcttggccttaaccctgctctgagatgggagtgtgtgccaggagtgcagagaggccaggcagtgggagcagacacctctgagcttgcagggatggggtgggggagggggtcctttctggggcacccgagggtgcagggtgcagagacgcctaggtcctgcacctgggagggcagccgcagctgcacctgggagctcctaccccgctaacttggaagaggcaggcctccttcttgtccctggctcctgcttgcttcatggagtgcgaggcccaggtctgcagttgcgggtctggcagctgccgctgcacccaggaggacaatcctgcctgcacctagctcccccaagagcacagggaggctcagatccatagctgcagtttgcatagccccaggagggtgaggcttctgcctgctctgtagagcaggagggctgggtctgcagctacagtttgggcagctacagtggcatggggcacccccgtcccaactcagaaagggcaggtctcccactggctccatggagtgtgcagccctagccatgcctccctgatgcagctggcaggatggcagcagccactgccatcattggtattgagagtgaggtgctgctgaaaagatactcaaaaatgtggcagtgactttggaacggggtaacaggcaaagggttgaacagtttggagggctcagaagcaaacgggaaaatgtgttaaagtttggaactccctagagacttgttgaatggattcaaccaaaatgctgataatgatatggacaatgaaatccaggctgaggtggtctcagatggggatgaggtacttgttgggaactggagcaaaggtgactcttgttacattttagcaaagagactggcagcattttgcccctgccctagagatttgtggaactttgaa

SEQ ID NO: 31521 - DNA, 1310 bp, Artificial sequence
  DNA replication origin
cctgcacatagttgtcctcgcagtagtcagcgacccgcagcagggcactgtggttgcccctcagagcctcccggccagtggggatctcaaactcctgcagctgctgtagctccgccatcacccccagcctctgtctggctccccagggagcccgctcgttttgagtctcaccctgcccttgattggttgctctgccttccctccctcttattgcttttggtttcctctgcgtgagacccaaacctgcttgcaaagggcaggcatgctcattccgggacaagaggaagtcagtcctgctccccgagcctgtgtctctctgtcccctgcccagaggaagggggaagccaggggcccatttgggggcccagcccccaatcccacccagcagaggaagccaaggtcggggcagctgtgattgctccctggtcctggagaggaaactggtcggctgggggatggggtcggagactggggaggaagggggctggcctgctatagggggcggaggtggattttccactcatggaaggcgggaggaaagggcagagggtgggggcttccttgggaagctcagggatgagtcaccaagggacaggggagtggagggtggataggatatggagatccgtcataccagaggactgtggggcagcagcacagcaaaaatagaaaacagccgatgcggcagcaagaggggtcagggttggacaccgggaagacatgaccagagaggttgccagaggggtgttagcaagcctgcgaagggttgtgtgtgatgaagatctgccctacacgctctgtgcagatgaaggcaggacaagatgaaattgaccaagcgtaatgtgagggactcagattagacaacaggaaggacttggatttgagaagcaccaggttcaaatttcagatcaacttgcggttttaggaagcagcggtggacagagcactgagcctgcctaggaggtatgggctgtggttcacgcattaacaggacagttgtaccagacaacctccaggatcctgttctgatttcaaattcttagagctcccagctgagagttggactgggtcctggagcacggaagttaggatggacggcgggcctcctctctgcccctcccaccaccaagcctgtcatcctagagacaggagaataagaggacctcccattgaccatattggtcccttaacttttgctcctccagcgggtcccttgtcattggatgggtgtcaaccagagcaggagctcaatgtctgttaaatggcatagcccttgggtggtcctggggggacagcaagaaaaaaaccag

SEQ ID NO: 31522 - DNA, 1138 bp, Artificial sequence
  DNA replication origin
ctgcacgtgtgacccaggagtaactgggtcctttcaagcccaggagtcactatgaccactggcaggtggcccctctcaaaagccacttcccaccccccacccacccacgtgggcttgtaggtctcacccggccgaggccagggaaaacgcagaggaggcggcggagagtctgccgtcgggcaccaccggcaggtgcactggctcgggaatccggggtggtctcctggcggggggcagggagtgggtattaggaggaaggaggaaggcttctggccagcaggggtcgggtgcgagcaggaagggcaggtggccgagggggaggtttggcgccaggcatccagcatgacggcctgagcacccgggggcgccaggggtgggtggcgaggctgggggaggagagtttcagggtcgcgcggggcagggctaggctagttggcgtcgcggcgaggcctcaccccaaggtggcggaggcgggtgtggcaggggccttgatgctctttcgagacagggtgcctgttcttgacagctgcgtgctgaggtcctgcgagggagcgggaggtagggcttacatttggggtgaggggcctccctccaccctcatccccaagaggaaatggaggaggggcggacgggaaccgggagggagagcccggcatagccagttcccacttccacttctcaggcccctctcctacacttcccccaccccacccccttgtcattgcctgggttctgggactcagttctaccaaagcccacagccacttcctctgcacagccacagcgggttgagtgggcccagcacccctgtccctcccccagaccatctcagagcccaggaagctggggccctggcttggtggtccctaactttgatcgggctgaggagggggcggagaaaggagaggacacatcacacttagaagtgtcccacctttcattttcgaagatttgtggaactggctttggggagttagggcagagaggagcaagacccaggccacttagaggggatgcgcaaatgacagggtgcacgcctacatgaaagagggaactgctgttaccaatgggacttccccaaggggtgggtacagtgttaccccatgggcttcaccaggggcaagacaaaagagatttg

SEQ ID NO: 31523 - DNA, 1225 bp, Artificial sequence
  DNA replication origin
tgtgactgccccacagagataaggggccaggagggattgaaaggcatcccagttctaaggctgctgctaattacagcccccaacctccaacccaccagctgacctagaagcagcatcttcccatttcctcagtacccacaaagtgcagcccacattggaccccagacacccctctgcagccattgactgcaacttgttcttttgcccattgcttgctgtgtgtgtggtgtgttcatatgtggctgggcacttgcccaagagtgggaacgatctccatgacttaagcggggctctccgagagcacctcactgtcaactctgagactgtcgcgagagagatctcagtcatttcttcccccttcacctcctttatagttgtaaaacaccagaggaaggaggggcttgggtttcgctggttctgcttaaaaacatggctttctgttccatggggggtgggggggatgcgtggaaggcccagcccgcgagggtgactttggtgaagtccctggtctcttgctgcatagacgaggctgggatgcaaggagacaccgtcactctctgcgaggttactggctgtccggacccgagccggacggtgcgctacctcgtaccaccaccaggaggcgattgttcctctggcttttcctttgggggtgctagaagggagtgcgggggtcgggaggcaagagagtgtggacagcacagaaatagtgtggggtcgcggtgggtgaagcaagatcgcaaaggcctggggccataggtggagaccctcttctgcctctgtggggagttcttgcggccaggagaatttcaggatcctgggttccctccacagtagactggaggaggggcggtcacgcagcccgaggcaacaagttacagcggcgggagatgttccttctctcacctgccgggggggccccttcctcccagttgggaggaccaggaaatactgctgccttccaaggtttgcgcgccaccccgcgatgggtcagactccagaactcaaccgtgcacagtggagtgggggaggcagccgaggtgggttaactgaatagatagggacggctctgagcccccttccccaagcccccaaatacgagattccagaaattcccagagggacataacaaagccaaagggaaaagggagtagtaaagctgtctttgccgaatctcccttccccgccccctccgccgttggcccgggtacccccctgcaggcgg

SEQ ID NO: 31524 - DNA, 1701 bp, Artificial sequence
  DNA replication origin
ccgcagagccagcagtccccgcgcatccggccccgacgggttgctgaggatgcggcggaacaggctgtggtggccggcggcgcgcagcgagctctccacgccaaaggtgttggcatcggagatgagaatcacctcgaagcaggcgccctgttttgccacaaactgcagcaggtcgctcatgcctggcgacaaagggatggcttcgtagatggcgctcaggtcccgcggccgcacgccctgctcgcccaggtacttgaagacgcgctgcatgtactcgttgtagaagccctcgcggtaggtggctcgcaggctctccgggagccgctggcccggcgcggcgcgcacgatcgaatcgtcgctgttttcgtccacgatagtctcgtcgaagtcgaaggtcaggaggaagcgcggcgcgccctgcgcggccatcctgccgtcctgggagcaggggggagagcagcaggaggaggaggaggagggggcaagcgagagggggcgcggcaggagcccgcccgggagaggctggttagcgggccacggccagaggcgctggcacatccaacacctgaggaggacccaagtctggttaagctgggaggagtacccaatgccaccacctctatccccagccttccctgactactccagtggcacctcttagttaactgcagtggggtttatgcccagagggcttctcggcacctgtttcccctactctcatcgagggccaatggggcttaacaagggtcaaaagaagggaagagcagcttccaaggatcaccactttggggaggtttctggactggactgttttggagacttccagtggcccctgttgttggtgtggatcaagaaagggtggtgggaactctcccctccctcattccctgaggtagagtcaagggaaaccaaccacccatccacccaactggaccagtttcctcattctccttttgggccatggggaatctatggctctctgggagctgcttctagcccaatggcactgaacaggggtctagggatggggcacagcttcttcggggagttttagggccctgtgctgacagctcatcactaatcacttgccaattccccaggaggaacgtgtcagcaggtggggtttctgccagagtccgaagcaagcgggcagcaggagaagcagtggggcttggggaggtaagagcctcccgcaccaggccatgacacacctgggagacaggtaagggagaagagaagagagcagcagtggctgaaaaggcagaggagtgggaggggccaggtagtggggacttggggggtgtggaggagagggctgagaggaggtcattctaggggatcttggagacagactgctggacaggaagacagagtaggggtagggataagggagttccaggaagcggagaccttgggccagattcttgttggaggggagggtggtaggcagcatgggagaggacagaggacaagaggggacatgtctgggcacaaggaaaggcaagcaatggaggcagcaagagcccttggcagcaagtttccatcacctttgcctgccagtgtgtgagaggcgcagaggggcagtgagcaggtgacatgcagcttccagatacccacacactgcttttctcccgcccagctcccaccccagttaattgagatgggattgtttctctttctggtttcttcctaagcccctct

SEQ ID NO: 31525 - DNA, 990 bp, Artificial sequence
  DNA replication origin
gaaggcgctccttcacgcgcgtggcactgggggagttctggagctcaggagtgagtccccttctctctcctacccaggaacatagtgctggggtatccctccgtccccgactctgacaaagccaaggaattggtgtccccttgctccctgccacccacaatacccctccccgagccgcgcaccccccgcccgcattggagcccagcgcccgccagccgggggtgcgccagagtgctggcttcctagtcacctctaaaaatatctctcccccaaccctaccggcagctgccacctccctgcccctgcccctgcccctaggatcccctcccagcttgtcctcccacccagggagtgcccagaggtgactgctagacccagacgcctcactggcaccagggcgcagggccaccaccgccagctggtcaggaccgcaagctccctgcccactggagtctccagggccaaggggggagctccagctgcaattctcccaagaggcgccagagactcctgagttctaatcgcggttccgatgctgtgtgacccctaggatgttagcctgacctctctgggcctctgtttttcctatctgctgctcgggcgtggtgagcaaggaagatggtcatgtttgggagcactgtctgggaaagggagggaattctagcttagttgttggatctgatttctagtgattgatacaaggagacttgtttttggacagagagggcttgttactgtggtctttctggagtcctcgcctccccatcctcattctgcacatttcctttggaaaactatcccaaaacttttctaggaactccatctgcccagtaagaggggaatttgaaacttagggcctgtatcagagaggggcctgtttccctcccacccccttcccacagatttaatctaagagcatttgtgtgaaaggcgggagaagcaggcagggatctgtgacccggtgcagaattaaggaggcaggcactgctt

SEQ ID NO: 31526 - DNA, 980 bp, Artificial sequence
  DNA replication origin
caacaactaagctagaattccctccctttcccagacagtgctcccaaacatgaccatcttccttgctcaccacgcccgagcagcagataggaaaaacagaggcccagagaggtcaggctaacatcctaggggtcacacagcatcggaaccgcgattagaactcaggagtctctggcgcctcttgggagaattgcagctggagctccccccttggccctggagactccagtgggcagggagcttgcggtcctgaccagctggcggtggtggccctgcgccctggtgccagtgaggcgtctgggtctagcagtcacctctgggcactccctgggtgggaggacaagctgggaggggatcctaggggcaggggcaggggcagggaggtggcagctgccggtagggttgggggagagatatttttagaggtgactaggaagccagcactctggcgcacccccggctggcgggcgctgggctccaatgcgggcggggggtgcgcggctcggggaggggtattgtgggtggcagggagcaaggggacaccaattccttggctttgtcagagtcggggacggagggataccccagcactatgttcctgggtaggagagagaaggggactcactcctgagctccagaactcccccagtgccacgcgcgtgaaggagcgccttcaaactccacagcccccaccccgcgccgggaccccagccctcccctatctcccggagcccaggactcacgtgggggcggcggcagcagaggtctgtcccggctgagtttggagtgtaagaagtggggaagggggctagctgaggtattggggcgcaggatggagcaaggggtgcttacgggaattggaggggacgcggtgtcttatccacccccggatttctgggctccggctcacgagtccctccagtcccgagggactgaggatgatgtgcgtctgagccgtcccctccacttgcccctcatcc

SEQ ID NO: 31527 - DNA, 1349 bp, Artificial sequence
  DNA replication origin
gccctcccctatctcccggagcccaggactcacgtgggggcggcggcagcagaggtctgtcccggctgagtttggagtgtaagaagtggggaagggggctagctgaggtattggggcgcaggatggagcaaggggtgcttacgggaattggaggggacgcggtgtcttatccacccccggatttctgggctccggctcacgagtccctccagtcccgagggactgaggatgatgtgcgtctgagccgtcccctccacttgcccctcatcccccccgggcagccgccgcgtcccctttaaatgcccgggagccggagccggagccggagccgcggccggcgctgcggctgctgcagcagcggagcccaccgcagtccccaacgtcacaagcgactgtccaatcgcagcggtgccggcgcacatcaaaggggcgggccgcccgaggccacgcctccctcctgccccggaggctccgggagcgccagctaaggtgggattaggctctcggggaaagggtagcagggtggggatggagcgctgcccttccgaggaacgtgggtgggggcaccctcactagagcggctgtggacatacgctaaatccctgcctacacacccaaaattgctagggctgtggactttctcatccgccgcctccagggcttcggttcttgagatttgcagaagtgcacctccacctcctgcccattccgctgtcgcgtcctaaacccagtgggaggcacgggatgacccagccctcgggacccttttccccagattataggttactgaggattgcgggggttggcgggaggaatgactccctacccccacccccgcccgtaaagttggtggagcgggtggtgacagacagtttgccccttttgcagatggccctataaataaaaaacgcactttctcccctgcttcctaagagtgtgtttctcccccaccctaatctcctccttttggccctcaaagcctgctagtgaagagaaggagagaagatagtgtttcgagaggaaagacgtgaaactagtatttactgagaacatactatgaaccgggcattcgagctaggtcgctgcgtttatggctgaatgttcacaacactcgagaaattatttgcctagccgttcaaacccggacacacctgactccattgggtcacaaaggggtgtgtaggtggggagaatgcactttgggaggccaaggtgggaggatcgcttgagccccggagttcgagaccagcctggacaacatagggagaccccatctctacaaaaaattaagaaattagctaggcattgtggcatgtacctgtagtcccagctctactcgggaggctgag

SEQ ID NO: 31528 - DNA, 1742 bp, Artificial sequence
  DNA replication origin
gggaactgtcagccctggacggaggagtcgctctcagacgccagctaaggcagctgaggggacgcccggctgaagctgtcggagccccatccccttctggggcccccaggttgcctactctcaagtgcccgcgccccagtgagcgagtgtcgggagccgacgcagaaggctccctcctacagcgagcggcgggcaggggccggcggggcacagtgctccgggcgcccggggacgggacgtggcgcctaacgaggcgtggccggggttgggctggggctgccgccggtcgccggttccccgccgtggggcgactcgtccttcctgaacgtgccacgctccgcggtcgctcggccacaaacaaggaagcttgggggacgcccggcgggcgccgaggcccgtgcgaggccggggctccgcggggagggcggccggggcagccgcgtgggccgggaggggacgcgagggcggcattgctctgctcgctcagcggcccggcccccgcccccgacgtctgaatagctgctgtgtcgcggcggatccgattgtttcactctgagactggctggctctgtggaatttccagacgcccctgtgggacaggtcccgggggcgggggaggaatctgttttcaggaaaagccaggcaccaatcctcgttgcctctcctcgtttgatcctcttaggccgtcctggcctgcgggtttggcagggacaatgccccatcttacagatagcgaaactgaggggagatacgtccagcagaaaggagaggagaattcccatctgcccgcagtcccggcctggaaagccctccgttgctgggctcagaatgtgacgggaccgtcgccctctttctctggctgcagcttctgctaaggggatggcagatgtcaaggatctccagaccacgggggagggagaccctggatcctgttctgggctcccctggcttccttttgcgaggtgactccaccctccccttcctgcctttttcccctacccctcagtgcacaggcctgggtgaaaaaaaaaaaaaaaaaaaaaaaacataaaaaacacaaaaaaccgagggctgtagtcctggcagggccacagcttccagtgagagctccatttcctcgctgcaccccatcaggactggaggctaaggaccagcactcctgttttctcattaataaagctaactaaggccggacgcagtggctcacgcctataatcccagcagtttgggaaactgaggtgggtgatcacctgaggtcaggagttcaagaccagcctggccaacatggtgaacgctgtctttactgaaaatacaaaaattagctgggcatggtggtgcacacctgtagttaccactacttgggaggctgaggcaggaggatcgcttgaacctgggaggcagaagttgcggtgagccaagaaggccactgcctccagcctgggtgatagagcaaaactccctctcaaaaaaataaataagtaataaagaaatctaactaaaggccactgagtgttccaatttgtgtaccttgggcaagccccttccccattctgggcctcagtttccccatctatatcacgaatattctgggattcccattcaaatacatcctctgcaggcaacagcctcccatagggagttaacctttttcttttgctgtattactcacctccccagcacctgtgtacatagtaggtacacaataaaaggttagcaaagtataatagggcctggcaccgtgg

SEQ ID NO: 31529 - DNA, 1192 bp, Artificial sequence
  DNA replication origin
cgcccccgggacctgtcccacaggggcgtctggaaattccacagagccagccagtctcagagtgaaacaatcggatccgccgcgacacagcagctattcagacgtcgggggcgggggccgggccgctgagcgagcagagcaatgccgccctcgcgtcccctcccggcccacgcggctgccccggccgccctccccgcggagccccggcctcgcacgggcctcggcgcccgccgggcgtcccccaagcttccttgtttgtggccgagcgaccgcggagcgtggcacgttcaggaaggacgagtcgccccacggcggggaaccggcgaccggcggcagccccagcccaaccccggccacgcctcgttaggcgccacgtcccgtccccgggcgcccggagcactgtgccccgccggcccctgcccgccgctcgctgtaggagggagccttctgcgtcggctcccgacactcgctcactggggcgcgggcacttgagagtaggcaacctgggggccccagaaggggatggggctccgacagcttcagccgggcgtcccctcagctgccttagctggcgtctgagagcgactcctccgtccagggctgacagttcccttgccccttaagagccaatcggagaatcataggatctgacatcctgtggctcagccgggtctaagagctcatgagtcaccctgtgtgctttgctgatgaggaaaccgaggcccagagacgggggctgacttattcgagccacgtttgtgtctcctagccctgtgccctttctccaacactctactatcctacctcaaatcaaatccactctggggctaaggacatctagaagtgtgcgtgtgtgtgtgtgtgtgtgtgtgcgcgcgcgccaagagtggcttggctacattagggaaatgccagaaaaatggaaggtttctaataaaagctgctctccacgggcccagagtgtggggctcccacccattggctccacaaatcacctgtacaaccttgccagacattggccgcctggcagctccagacttcactccacccacactccccacacacatacagacaatggcatttttttctatggcatctggaaggggcagaaatgcccagagacctggtttgatcccacttctcttgggcccttctctatgtttctaaaattgctttactgcaggcgcttggg

SEQ ID NO: 31530 - DNA, 1267 bp, Artificial sequence
  DNA replication origin
cgccctcgcgcgctgggaagggagtcgcgagacgtcggagcggcggccacgtagcgctgcggcggcagcggcagcggccgaggccgggtctgaggagcggccctgaggacagacgttgggcagggggggaggggctggcccagccggcggttgtgactcgagcgccgcggctgcaggcccccgccgcagggatggaccgccgaggcggcggccggggcggcggaggcggaggcggccggcccgggtgagtaagggccccttcccccacgcactcgccaccgccgcggcggcgcccccggcagcccttcctctccgccgcccgcggggccggcccgggctccgggggccggcgtaacccttcgccgaggcagctgcgtgcgctaggccggagcagcccccatccggctgggaggccccgggcgctgagctcctcaggcacccagcttgggctgggggcgccccgctcctgctctttcgcccccttcctcctggacccgggcttggctgcagttttgcagcgggtccgctcgccctgaggcctgaggggaggctggggcggcacgggttagcgggccgagaggaggtttgcaccggtcctcctgcgagcgttctcctgccctgcagctggtggcttgcacccactacctcccccgccttgcggttgcacccaaacctccaacccccgggagtattgtgccgccagtagataaaatgcgtctgatgtacacccgccaccggcagccccacactcaccccagtgggtaatgcagacctttctccacccccacctcctcctcccctccaatcaggctctgctgaagattcttagatccgagacaccaaaggtagtgacacccccgttacatctccacgtaacatgttcattgtcgagggatgtctccaatagaaatgataaatgcccctgcctcacctcgaagtctgtcttcaggattcgagaccttctctgaaaaggtccagctttgatcacaactagagcatccctcccccacaacacagacacactcatacactcactcacttcctgattgccgagcagcccctgtcaccgcggatccattgtcagaaatggcttttgccaatcaaaggaatgtgcttgtgcctttggagaagggtgctttccacatccacgttttcggggtgttcctgcgtgagtctgcctttgcccccagattgttcccgtgttcaagcatcattatcatagtgtatcccttacatgcatctcccgtggaccctcaggaacacctga

SEQ ID NO: 31531 - DNA, 1603 bp, Artificial sequence
  DNA replication origin
ctcacccgggccggccgcctccgcctccgccgccccggccgccgcctcggcggtccatccctgcggcgggggcctgcagccgcggcgctcgagtcacaaccgccggctgggccagcccctccccccctgcccaacgtctgtcctcagggccgctcctcagacccggcctcggccgctgccgctgccgccgcagcgctacgtggccgccgctccgacgtctcgcgactcccttcccagcgcgcgagggcgagcggggccggcggggcgggcagcgcggggcgggcggcaggggagggggtgtgcgtgtgtggatgtgtgtgccggagggggcagggagggaggcgagcggcggcgaggacgcgcgcgcccgcgcgcgcccgcggccccttccctcgctggcccccccgcccaacggggatcccgacacctccctccgcccgccccctcagcatcccggccgctgggagcggcggcgcgcatgcgcagccctcgggccggcccgggcgcaccttttctgtctcctgccacattgtgagcgctccgccgcccagataaccgccggctccccgcgccgcccccgccttctcccactccgcccactgccgggagcccaggtaaagacgagagctgcgcatgcgcggcgctctccgtgagtcggggggcgtggttgccgaaaggaagccaaagtgaagagtgcagggggttgtagcaggcgctgctgtgggattccacaaaataggcgcgggttaggatggggaaggtaaagtgaagaaacgggccaaagcagaaaagtgggtcgacgtgagatttggaagtaaaaagagactttgaataaaaacttaacgactgctgacctccttgttctccttggagggcagtgggagtgacggggggcagaaatcagctcggcagcatgcaagcagtagtggtcattcgccgtatgaatgggaccgctaaaaactgaacagtttcgagattgccagggtgctcagaaaaacagatttagagcctcgcctgtcctgtggccaggaatagggaaggggatgtgtgtgtttgagacctacagcagctgcggtaaaggaagcctccattgtattacagtattatgactaattagctattaatcattaatatactcagtggtactattagttaacaaggtagcatttatccgagttcagagacaagagagtgtccataattgaaagtgtttagggtacagggagaggaaatgaacccggcaaggtgaaggcctgggatggaaaagacccaagacagcaaatccgaggtcagggttccctttcccaacataaaccaaacttccctgaagttgtccaaatcctaccttaattggaactccttccattattaaaagcacacttaactaatgttcttgcactaaggctgaccccaatagcacataaacattttctttttctttttttttttttcttatttgagacatggtctcactctgtcactcaggctggagcgcagtagcatgatcacggctcactgccgcctcctcctaccacgctcacataagcctcccacctcagcctgtggagtagctgggactacaggagtgtgctgcctcacctgg

SEQ ID NO: 31532 - DNA, 1344 bp, Artificial sequence
  DNA replication origin
gatgggtaagagagtgaaccctgtggcgggccgcagccggagaggaacaggaaccgcagtggggacgccctggtccccgggcccacagcatccgggacggacgcgcagtagcgcgggccgggaactgggtaccagggcgggatgggtgagaggctctaagggacaaggcagggagaagcgcagcggggtgcggggaaccgcacgccctccctttgcctctgcttcccaccccgaggcggcagggcgggcgggcgcggttccgggggtgggcgggctgggcggggcggaggcggggccgcagcactggcttcacccagcctctcccgcccgcagccagagcgagccgagccgcggccagctccggcgggcagggggggcgctggagcgcagcgcagcgcagccccatcagtccgcaaagcggaccgagctggaagtcgagcgctgccgcgggaggcgggcgatgggggcaggtgccaccggccgcgccatggacgggccgcgcctgctgctgttgctgcttctgggggtgagtgttagccggagggggcccgctccctttcccgggatcagaactccgagaagagccgggcgccgccaccaaggaaacagaacagagcattggggtcccagatactgagggtgggtggtgggaaaggacctctgatgccgggaccacgaaggagggtctagggttcccggagcgcagaggcgactctccagggtggagatgagggcaagaccggagcacggatgccggtcctcaggtaccgcagggggcggtgggggagctgggaggggtctttcaagagggggcatggggctctccgatgcccaggttcttcggaagaggacactcgaatgccgggatcccgaagggactttcccctcagcatctcggtctctggagagtcgtgggacagaaccaaggcgagagaaggagggggaactggacggggactagagatgagaggggcgagctgggctggggcggggagcccgggacgacgggatggaacaatggaggaggtcggagggactggaggcagaggggacccggcaaggacaatggggaccggccagacaatgggggggaggggcgtcggagggagaggttggggagcgggagagaggttgagaagtgggttagggagggcagaagaggggcgacggcgagggcggcagagagatggaagcagaaggaaaggagacagagcggggcgcggaccctgaagtggtcggggtcccgcctgcccgctgagggacagtgagacgagaagagagagcagaggcttggacatttccagcgcctgtccccgcgctcctgctcgcggcctctcccagtcc

SEQ ID NO: 31533 - DNA, 783 bp, Artificial sequence
  DNA replication origin
ctgggaggggagtgcccacttcgccggggcgaacccgctcccggggttcccccacggccggcgggctcctccgacgcgcgtgttctcacggcttgaagcagcgcagcggatcgcgagggacggagcgggtgtgcccctacccgggctggcggtggctacgtctcggggtgcagagcgccggggcgcactaggcggggacccttcctggccgcgcgcagctctggctacgcaggcgggaggcggcaggcagggggcgctgcggggcgaggcaagtgcagtccgccgctgcctgcctgcgagtctggggctgcgcgccgctccccacctagctgcgcgacccgagcgccgcgcccaccgcgctccgtgggctcccgcgcctcgaagggtcgggatccggtctgagcctctcctggctctcggtgcaagccgctgggcacctaacgagacgggggcgcccggacgcctcggattctgtagcgcggtatcccgggccaccgactcggcaaaggtcggcgggtcctccgggtggtccgacgagattgtcagatgtggcctgctttatggccatgaaccgaatgccctggaaggtctggcaacggaggaggcgtcttcactctccccgccagcatctttcatcagagcactgcgccccaaattccggctttacagatacggagactgaggctctgagagtttaaacgacttggccaagatctcacagcaagttgggccagagtcgtggctagactccccgacctgattcccagctcggtactcccccac

SEQ ID NO: 31534 - DNA, 1241 bp, Artificial sequence
  DNA replication origin
cctgcgggtgaggtgggcagagattctgtccgggtgcgggccccagcccgaaagctcagccccagttccctggagctgtcaggacctgtggctgcgtccggggatttgggagcgaccgcgggcacgtctgctgactaacgccgctggttagagacgctgctcagacgcgggtgggcgagcgtagaccaggagagcggggaggagggaccggatcccagaggggcaacgacttgggctccgggtctgggcaagagcgagggtccccgcgcgaagacccaaggaaggaggggagctgggcgtggaggacctgggcgcttgggaaggtgtaccccgacaggaacctgccgtctgcagcccctgcggctcccgcctccgcctcggcgcgcggctgctcggtctgggatggctgtgcgcggtccgagtttcttcctgggccgcggtgagagagagagggctgaaaccagagcgcgtcccggcgggtcggctggcgggccgcgccggtaatggaggcactttgtcattcagacgtctgtaaccagagccgccgggctggctaatgcgcctaatagggatggaacgagggcagcaaatgggcgtgcgtgagcggccgggctgagctgggtggatggtggatggggaggcagctccgcgggggacgggcccctaccgcactgttccagcccagtctggctcaagcgcctcgcttcttccctgggggaccgcgtggggaggcgggaataatcgcatgtgctgagttcctactaagtgccttgcacttccctggtagtttctcttgaattatttaatccttataaggtcctagcaaggtgaatttagttattcccacttcgcagttgaggaaacagaaccttctagactttcaggcccgagaccaggctcccccagtgagtcagtggtggcgtctttgttggaacccaggatgcttggcctgggatgttctctttcctacatatgccaggctccctcccgccccctaccttctagatcatggaaggagtcgtggctctgagagattaaatcgtgccctatgcctttggccccacacatttagatctgagccccttctccacacgcagaggccctgccccctctcaagtctctatgctacattatcttgggtaattagctcctttcctcccaactcctcccctatccaaagggagtgaggggtatgtgccagtgcctcccctgggtttgcatcgacctcaaaaggccctcca

SEQ ID NO: 31535 - DNA, 1520 bp, Artificial sequence
  DNA replication origin
ggcctgtaggggggtctcaacattattcaaaggcatcagagacaagatggagcaaggggtcactggcttcgggggtgtggtggggggatgaggaggcaaagaaggaaaagccagagagaagtgaaaggggcagaactggggacaaaggctgggcgtggtggctcactcctgtaatcccagcactttgggaggccaaggcgagcagatcacttgaggccaggagttcaagaccagcctggccaacatggcaaaaccccatctctataaaaaatacaaaaattagctgggtgtagtggtgcacgtctgtaatcccagctactcgggaagctgaggtgggaggattgcttgagcatgggaggcagaggttacagtgagccaagactgcaccagtgcactccagcctgggtgacagagtgagacgctgtcaaaaaaaaaaaaaaaaaaaaaagaaagaaagaaagaaaaagggtagaggagagaagaaaagacccaggaagaagggcctggagggagacttcagtttcaagtgaattctgacagaggaaccctgtgtcccttttcctaggagcaggcagatctggattcaaaatccatttccatcgcttataagctgtgtgactttgggtgttttacttaacctctctgagctttttctttctctgtaaaaataaggagcaatatctgcagtcacagggttgtagtgaggaataaatgaaattcagccataaagctttggcacgtagttgggatcctataaagattgggccccatgggggtggagagcgatgaggacattgaactttggaggtaggaatatggtcagacagcagaaagaacgtccaaacacaaacagcaaaggcaggatgtctgagctatacaaacaagagggtcctggctggctggcgtgtgatggagggtaagtctagtcacacaggaggggaagaggagaagcctgctcatggcaaaacacagaaaattagcagaaaactcctgggagagggttttaggtggtgtgaaaaatgtggtcttttttggcagagaatgaaggcaggggcttaataggtttccttgtggaaacgttttaagggtagagggaaagtccgctggggtctccgtcccataaagtgggcttgtaaaggcagcctgttaatgcagctggaggtggaggagggggagacagggaaggaggggaaaatggaggggagggaggaagtggaagggaggattctcaaagccacctctctgcctgcctcccttcccttccagagattctggaacttccctctcctggtgtcctccgccccacctcctgctgaaggtcctttgactgaagggaaagggttcccatcatttaggtcctgggaggagagtcctgggctggagtctaggaagcaagagaggcagatttggaggttctgggatagctgatggttggccacccccgccctggaatggaaaccctgttaggccagggccagagcaggtggccatgaagcaagacggcaaaggcattggaggat

SEQ ID NO: 31536 - DNA, 1120 bp, Artificial sequence
  DNA replication origin
cccgcgggccagagctgggctgctaacccggtccaggcaaggtaggccttcccctagggagcctcctgcctcatctgccttcagttcctctccacacaggtgtgggctcagatgcagcctaaatgggagtgaccggggttagacagcagaatttcccacccatggcactacccccatgctgctgaagggcttggatcctgagggtggggacggacctgcaggcaagagggctcaggtaaggcaggagccactgaagctagagagctggctcttagcccacactcactctctcagatggatattgttgagcagtacacaagctgcacaactatatgatcacccttttgagatctgcacatgcgtcgtctgccctttcggccaggatgcaagggagatgtccaagctcattcttcactcatgttttcttaattactggatgtgcactccagaataaggagaaggaggctgggcacgccagggtccttgcctccttgtacagggaggggaaggaacagggccagatcttcttcaccccttccagctttgggtggggaactctgtgccaccctggatctggcaggacctatccttgctccaaggacaggaagagcatagatttaggaacctgagaaccagggaaggacagattgttcagaatgtggaagcagaagcagaaaggctaaagcgccattagggggaaactgaggcctgtaggggggtctcaacattattcaaaggcatcagagacaagatggagcaaggggtcactggcttcgggggtgtggtggggggatgaggaggcaaagaaggaaaagccagagagaagtgaaaggggcagaactggggacaaaggctgggcgtggtggctcactcctgtaatcccagcactttgggaggccaaggcgagcagatcacttgaggccaggagttcaagaccagcctggccaacatggcaaaaccccatctctataaaaaatacaaaaattagctgggtgtagtggtgcacgtctgtaatcccagctactcgggaagctgaggtgggaggattgcttgagcatgggaggcagaggttacagtgagccaagactgcaccagtgcactccagcctgggtgacagagt

SEQ ID NO: 31537 - DNA, 1731 bp, Artificial sequence
  DNA replication origin
tggcaggcaataggggagggagagactccagctcctgcgtcccgggtgcccaaaagagcagacgactaaatctggtgtccgctgcgctcaggcgtgacgttctccgacgtggtgagcgcgaccgagccgtgcaagccgtgcaccgagtgcgtggggctccagagcatgtcggcgccgtgcgtggaggccgacgacgccgtgtgccgctgcgcctacggctactaccaggatgagacgactgggcgctgcgaggcgtgccgcgtgtgcgaggcgggctcgggcctcgtgttctcctgccaggacaagcagaacaccgtgtgcgaggagtgccccgacggcacgtattccgacgaggccaaccacgtggacccgtgcctgccctgcaccgtgtgcgaggacaccgagcgccagctccgcgagtgcacacgctgggccgacgccgagtgcgagggtgagtgcggttcggggggcggggggagtgggggtgcgggggtgggctgggggcataaggaagggcgctctctggaggtcgacaaggaccctgcctggcctgctggggcagcttggtgaccttgaggcagcgtgcaccttccctgagcttcagtcctttcctggtaacctaagggaggaggtcattccccatcctgtctcagcaaagaacccctctctgtgttaccttctttgggctgtttggaaagtgggcgttctcagcgtcccaggccgcgggtactacattgtaactcatcctccgggacgcatttctctgtggcttcccgctagtgattagctgaacagcaagcagctcgaaggtggccactacccccagggcacagaacgggagaggtctgatccatgaggcaggctttctgaactggaagagcagcttgaggaccctcaggagctgggaccctttgactctgagccctggtctaggtccatggtgggttttggctctgggacctgagatggaacccaccctgtccttgactgacgttagggagtccactcctgtctctgggcctcggtttcctcactggtcatatggctgccagggttgttgcgggttagggaatacagtggggctggcccacttcagcttgccctgtctaggggaggggtcaaccgtgttccgcagtttagtgaaggatgaggggcatgcagggaacactaaggaggggctctgtggaagaagaaggaggggaggggcagacctggggctcaaaagcccggggacaaggcagtgcatgctcgtggctgtcagctccagggatggatgggagctgggcgtgcccaccttagccaagcacaggccccaaggagatggggtggttcttgggatgggagaaggaagccccgtgggagccagggcagagctgttttggtctctggttggtgacgtccgtctcaggggagactggtgggcttttccacttcggggagaggctggcagtgcctttacatcctgtccatcatcctgtggccatgcacacattgagctatttccctttgagaactaacctgcatcctcaggttgcctttaccctgagcaggcaatatagtacctccttcagtgagcccccagtttgatgggagagatagccttcgcccagtctaatgagagagacgtggtcccagcacttagtccccagctgaaggagagatagctctcactttagagatcccccattctgatggaggcagcagagcttctgcctcagttagcacccagat

SEQ ID NO: 31538 - DNA, 1704 bp, Artificial sequence
  DNA replication origin
accctggatgggggtggctgggcttttgctgagcacctctgatgctttcacctgcttccctctcacccttggaagaatcctatctacactgcttccttcctccatgcttccccagtgctgccggaaggaaaacaacgcgacacagtgggcacctgagcagtgcctcatgaatgaatgggaaatggggttcctaatggcttgaaaggcagagagagtgatgcccttgagctagctgcagtggagaggtctgggggagaggcaagagtagatagatcattattgttgttaatctctcatgtttagcaggcaatttgcaattttaaagtgttaggatagagtgctatgtatagggttccaagggggcctggagggaaaccctaattcaaatgagggggcgatggacagattgcagagagattaatcttaaatgacgtgtggatctgcccaggtgggagggaatggaaagaaccttccaggcagaggaagcaactcttgcaaaggccagagatgaaagaaagcctgggaatggggttctgatgaggacgagatgaaagattcatttgttccacaaatacttaccaagtgtctacttttatgtccggtcctgggctggtgtggaggtacagtgtggacaggggagactgcagtcctatttgcatggagaatttgggctatgggagagacagacattaaataactgagcacatgaaaacataagctctgagatgtgttggcaagaggtacgggggaagaagaacagcaaattccaaacaagagagaaactaaggagggatcctaatttacctgggaggggtcagggaatgcctctgcaagaatgtgacctttcagctgggatctaaaggatgaagagctggacagaggggctgcacctgctgagaccgtgagcctaggaagaacttggtgctttggaggagctgaagggagctgagcttagtgagtggggggagagggacacaacaccgccagagaggtggcaggggccagaccatgcagggctttacgggtctagctaagggtttggggtttcatcctgtggttaaggtgtctttgtttctgttttgattatgaggtttaaacacggctcggatttgcactttaggaagatctctggaaagaccattctggcagctgcgtggagggtgggtccgagagggtgggtgaaactagaggctgggaggtgatggtggtctgtatcagagcagaggcatctgctgggaagaagggatgaccttgaaagatgtctaatgggtggaatggagaggggacagactctaggacatgagggtgaggagtcaaagaggacccccagcattctggcttagggagcacaggtgtgcaggggtgatgtggcatctcatcctggacagggggcctgcaaggggcttgagggtgctcaggtgaacagcagggtgcacaatagaggtcagactggagggacaagactgggaggtgtgtgagcccggagagtcatctgaggtgagtattgggagcttgtagagagcagagcaaagcctggggaggccgcataggaagggatgaggaaagacggggaggacaggagcagggggcgagggagccaggggagcagaggaacttctggcccagaaggccctaagggatgttgccactgacatcccagagcgcaccctcctctggcctgagaggtcaacatgtctatccccc

SEQ ID NO: 31539 - DNA, 793 bp, Artificial sequence
  DNA replication origin
gatttgcattttaaaagcttttggagaattccctggactagagggagggagaggagaggaaatcattaggagacaaatgcagtggtttgggggtggggggcagggagactgaaggcatctttaggaggcaaaatgatcaggatttggttgttgctgtggtgaggcaggaagggagagaaggagtcaggtgtgacacccagttccctggcttgagcaacaggctggctagttgatgaggtgggtaccatagatgggaggagagggatggggtctgtggtgagggtgggagggtcagctttcgccatgtcaagtctgggtgctgtcggccacccaagggcaggagaaagtctagcctggggtgctagaggtatggagggtgccagaggagcactgggcaccctggcatttaaggtaaggtggtcagaggaaaagaacccccagaggattccagggaggaacagggagccaggggctaggaggacaggtggggctgatcccgaagccactggagaagtggggttctcacgctcaaggtgccaagcagagtggacacagtgcggagtgtgcatcatgcagattctggggtcccatccccagggagccttagttggtagacaggaaccgaggactacatattatataagctcctgcccctacccaggtgatgctgatgaaggtggcctctagatctgggtgtggggagtgtcaggaagaggggaatgagccacagcagagtgacctggcaagggagagacagaaaagtgaccactaggtttggctgaggtttgacaac

SEQ ID NO: 31540 - DNA, 1114 bp, Artificial sequence
  DNA replication origin
cagaaggtcctgtccctaggagagctgtgtggcccagcagaaagagcacaggttttcaggccagacagtcccagattctgttccagacctggctgtgtgaccttgggcaggttactttggttctctgatgtccgtttcctgatctgttcttgcaagaaccaaatgagacaaaatgtgcaaacaaagcgcaggcacaatggctggtgggcagtcgtaggagtgcagtaaacggaagttctcgctcctccacttcccacacatttgctccggctgctcctcctgccaggcttgcccttactcccctcttggtcatttctggctctcactttgttcaagtttcccctccgcatttatccatcacccactggccgagcctgtccgccgtgccaggcgccaggccaggggttgagatagagatgaatgggacaccctccctgccctcaaggatctcatcggcaagtgtggaacagagacatgaaaatcgataattgtaactcagtatggtgagtggaataacagatccttgaacaaggaaggcatatggatgcactgaggaagctgggggcaggggcgagagggtcagagatggcttcctggaggaggtgatactgcagttgtgaggaagagcctgtctggcaagggctattcctggcagagggcactgaatgactaaaggtctggaggctggaactggaagcagtttgctgttcagggagcacagagcgggaggaggggaggctgggaccagatgatggagggtcaaggggttgagatctttgtttatgaggaatctttgaaggattttaagggggctgtgattatagttagatttgcattttaaaagcttttggagaattccctggactagagggagggagaggagaggaaatcattaggagacaaatgcagtggtttgggggtggggggcagggagactgaaggcatctttaggaggcaaaatgatcaggatttggttgttgctgtggtgaggcaggaagggagagaaggagtcaggtgtgacacccagttccctggcttgagcaacaggctggctagttgatgaggtgggtaccatagatgggaggagagggatggggtctgtggtgagggtggg

SEQ ID NO: 31541 - DNA, 906 bp, Artificial sequence
  DNA replication origin
aggtctccctcctggaattccagggtccctttagtctgtagaaaaatgaaaggtcaagtcctggcatcccttggaggctatgaaggtgaggaggcaccccatcatttgaagtggtcccagcttgggctgggcccaaggagcacggtgggtgggcactctgctctgtggccctccaaggcccagcttggtcccgtggctgcaaccccggcacgcacccagcctcctcccccaccatctgccaggcgggtgcgcggggaatgcagatgaatcttaatatcagcctgggccaagtgcgatgagggagacagattctgcaaaacccagacagcatcacagagccccctgcatttccaggcaccctgggccataccaagatgcaacagctctttcttggtgttggtggggggtggggtgggtggtggcgtgcatgtctagtcaaagacccccccaaagccggggaggcaggaacaggcaaatctttgtttggcctctaagcctctggtctggctgggagggagaagctgttggcctgagtgtgggcagctggttccggcgctcagctaggcaggggcgtagctgggcccactccttgtctggtttccagaaggtcctgtccctaggagagctgtgtggcccagcagaaagagcacaggttttcaggccagacagtcccagattctgttccagacctggctgtgtgaccttgggcaggttactttggttctctgatgtccgtttcctgatctgttcttgcaagaaccaaatgagacaaaatgtgcaaacaaagcgcaggcacaatggctggtgggcagtcgtaggagtgcagtaaacggaagttctcgctcctccacttcccacacatttgctccggctgctcctcctgccaggcttgcccttactcccctc

SEQ ID NO: 31542 - DNA, 1239 bp, Artificial sequence
  DNA replication origin
tgcgccccgagcgcctcgaagggccccagctgcgccgtggctctgctgctccagatctgcgctcggcgcccccctcggctccagcggcgccgctctcgcccagatgtgctggggacctgcgcgcgcgcccgtccttggtgctaattccccaaaccaggctgctccacccgccccgtcgcggcgcgccccctggcggacgcccccagccgcgcggagccccggccgcccgctccccgcgctgcgctgcgccccgccagactagagcgctcctggcgcccaggcggctcccgcttcctcgtccctcccaccggcggcggcggcggcggcggcaggtacagtgagcccagccggtacctccggagttaactcctcccctgccggcccgcagcccggggacctaggacgccggctctccagccaggagaggacggcacgcgggggcggagtagctcttggagaggaagggagagggtggtggccaggggatacggaccctaccgtttccacctcttttgcagggcgcccgttccccgggagcgggcagcaagaatcggctgccctgcccccaactcaggagtcctggaattaagaaagatcctttttttaaaaaacccattctaagagccaaaacctgtgctgagggaagtccttctgggtgtctagcctgcactccttttgttatgatgtctgctccttccctcttctactttacttggaggggctgagataatccctggaccttctcggtccagccactgtgacaggaagtatttggctgggcccctgggctgaaaaggctgttaggggccaggctagattctggggccgggggcaggtcctgagaagctggagagtgaggggagcaaggccttcctggagcctgtcccttcattattcactacttaccctctctatgccacaggggtcaccaggccgagagtggctcctgtcccagtggggtctctgcaaacctccagggcaaggaggaagaacacgaccctgatctgagattcccaaagatgggggcccatcctccatcacccccactccatatcttcaggtctccctcctggaattccagggtccctttagtctgtagaaaaatgaaaggtcaagtcctggcatcccttggaggctatgaaggtgaggaggcaccccatcatttgaagtggtcccagcttgggctgggcccaaggagcacggtgggtgggcactctgctctgtggccctccaaggccc

SEQ ID NO: 31543 - DNA, 994 bp, Artificial sequence
  DNA replication origin
tccggaggtaccggctgggctcactgtacctgccgccgccgccgccgccgccggtgggagggacgaggaagcgggagccgcctgggcgccaggagcgctctagtctggcggggcgcagcgcagcgcggggagcgggcggccggggctccgcgcggctgggggcgtccgccagggggcgcgccgcgacggggcgggtggagcagcctggtttggggaattagcaccaaggacgggcgcgcgcgcaggtccccagcacatctgggcgagagcggcgccgctggagccgaggggggcgccgagcgcagatctggagcagcagagccacggcgcagctggggcccttcgaggcgctcggggcgcacatctgggacctcgagcgggggccgtgccgcgcgcagctggaccaggggaggggggcggcggctgcacagctggaccgaagggggcggggtcggccctgggcgacccgctgaggggagggccgcgggccgccggggactggagcatgggacggcgcgcctgaaggagcaggaaggggaaggaggcctgggaccccgaaaagagaaggggagagcgaggggacgagagcggaggaggaagatgcaactgactcgctgctgcttcgtgttcctggtgcagggtagcctctatctggtgagtggtccgaggggagctgcgcagaggggcgggggcccggaggatcgggggagagcgcgggaagcttgcgagccctgaaactttctcccttcccccgacatcccggggatggcggggaagactggaggctgggggagagggcgggtccgaggccggagactggacagatagggttaataggggcggggagagggtgcttggctggcccacccactccgcagcgggtggctggaggtgcgaccagcgctcggaaaaaggcctggagccgggtcgccagggttaccctaccccttcccagagcctcaggaccgctgaagccgggggcgagtggggcgcg

SEQ ID NO: 31544 - DNA, 1605 bp, Artificial sequence
  DNA replication origin
agcagtacccctgtccctgccacttcactctgacctgggtgaggagctcctgcgtcttgcccactgaagctggggggcaagtgtacactctagcttgtgtacatctcaggttctgacagttgggtcacccccccccccattgtcctttcctcactgtcttggccactattcaaattcaaagtctcaaagaccgacaataattctctccagtgaactgtggcaccagggacaacggctcctacccctagggagtccccagtctgatgggggaagcccagcttctgatcttggggagcccccatctaattgcagaagcatcatccctgtgctgacagagcccccaatttgataggaagtagaatccctgcctctgtgaaatccccaggctgatgggggaggcataatctctgctctgaaacagccccgagtcagacagggaagcaccattcttatcctgggagagcccctggtttgacaggagaggccagcccctgccttttgggacttcctagtctgttgggtaagacaccgtccctaccctaggataatttctacccttagatgcaaagagaaccaccagacaatggaataagaaagcagaacacagtgtaattctcaagcacgaatatagtttaggtttggcaagagaactaggggagacccggagtgaatgccacacccaggatggccatgggaatggaaagccaaacacctctccagggtacactgatgatgacatgccacgatgttacttgcattctgaggtaggagttcttattcccatttcacagataaggacactggggctcagagattacaacactacaaggctgagttcacatagggtcagcccttcctttacactccacactcctggcctcacagatcagatgtgtctttttgaaagggtttttatccaggcgccatccgcctctggaatctgcaggggctcatcctccctctgctggatcagctgtggtgacaacccacacctgggagattcctggaggtgccacagggagagtgggacagcagtggggggcatcagggggttgacagggcttcctgaggcgcagcctggctgtgggtttgctcagcttttgaaagcaaccacttgccctaggtgtctttactaccagcaccggggggcatctggatttggtggtgacactggggtggggacagtagggttccaaggggctgtggggtcctcatgcctgtgttctggcctgggtgttgccggcagctgtgtgctgtggccgagtctgtctctgccccacagttcaggctggccctgactgccaggccccagaggtggggtagagggacggctaggacgggaggctcggggtctgggtctagggctgcagacctgtaggtacttgctcctgagggtcacggctgagtggctggagggtaaaggtggggccgtgagaagggaagggctcttcccacagtggcatggggcggtggcaaggggcttgttgattaaaggggcaggtccagatgtggggctgaggcttcacgacagtattgcggggagggtcagcgggcgctcggtcggaggggagttaagccacgggctgggttcggggaggggatccc

SEQ ID NO: 31545 - DNA, 1610 bp, Artificial sequence
  DNA replication origin
accgaagggggcggtgtgagggtggggtcttggcttggatcgctaggctcatcgaccaatcatcctcaggaaagggaaggctaagctgtggattggctggggtggaaggtctgggtttccgcagtccaatgacagctctaggatgagggggccggtccccgccccgtacagcagataagcagcggcctcgggggttggggggctgtgtgagtctcgcagtggggctgaggcaggcagccgggagagccatggcgggggccgcagcgggcggcagaggcggaggtgcctgggggccggggcgcggaggggccggggggctccggcggggctgctctcccccagcccccgccggctccccccgggctgggctgcagccgctcagggccacgatccccttccagctgcagcagccgcaccagcgccgggacgggggtggccgtgcaggtgagccgggcctggagcgggtgccgtggaaggagccattgggggagggggggcgcgtgaccgcgggagggggacggggagaagtgtgaggggaaagtggatgggggcgagggaagagaaagggggcgttcagagtctatgagggcggagggagcaagagcgaggagccgtgaaacgtggggagcaccgctgggacggagtgtgcggggagtcgggtcccggaggtgaggggagggacctggcagatggaggctggctttgggggcgtaaccgaaaagtgggcagaggtgtcgtgtggggtgagtggaagatgcagggggtgggagcgaggcgtgaggaggagtggcgcgtggtgggggcgccccgtgcggatggctggcgctgggagcaggagtcggtgggcgctggactattgcacggggagggggaggggcatggagtagagccccgtgcagccgtgtgttacttctccagcttgagtttggccccagcatccctctcaactgcgctggagttccattctccaccacttcacgtgcgcttccctttatgccacctcctggaactgatttcatctcagcccgctggactaagtttaacggcttttaccgtggtgcaaatgcccagctccctgcattcttctccctgtgtcccagaagttgtacgttcccagattcttgacctgcttaatatggctgtctcattccaaccatcgtttgtgtacgagcgtgtgtgtgtgtgtgtgtgtgtgtgtgtgtgtgtgtgtgtagcgggggggagacctgggcagttttgccccctacctttctttctactccctccacccctctacccaccaaggctgttttgtccggggcattgcagccaacgtggcagtggggtgagggctacagtcaagtgcatggtggcaagtaccccactttctgaacagcactgaaatgggttcttaataacagcttgatgtggtggctgtggggaaactagggagaagcaaacttaaccttgctttgatactcaaatctgtgaggatcccacaaatgcaagtacttaggaaggggaaaaggaacctacttgcatgaggaggttggcaataagttgaaagtgaggcttgcatttgattcacaccagatgtgaaaagatcattgcacacttccaaagccggagcc

SEQ ID NO: 31546 - DNA, 1008 bp, Artificial sequence
  DNA replication origin
ctgcccacttttcggttacgcccccaaagccagcctccatctgccaggtccctcccctcacctccgggacccgactccccgcacactccgtcccagcggtgctccccacgtttcacggctcctcgctcttgctccctccgccctcatagactctgaacgccccctttctcttccctcgcccccatccactttcccctcacacttctccccgtccccctcccgcggtcacgcgccccccctcccccaatggctccttccacggcacccgctccaggcccggctcacctgcacggccacccccgtcccggcgctggtgcggctgctgcagctggaaggggatcgtggccctgagcggctgcagcccagcccggggggagccggcgggggctgggggagagcagccccgccggagccccccggcccctccgcgccccggcccccaggcacctccgcctctgccgcccgctgcggcccccgccatggctctcccggctgcctgcctcagccccactgcgagactcacacagccccccaacccccgaggccgctgcttatctgctgtacggggcggggaccggccccctcatcctagagctgtcattggactgcggaaacccagaccttccaccccagccaatccacagcttagccttccctttcctgaggatgattggtcgatgagcctagcgatccaagccaagaccccaccctcacaccgcccccttcggttttccaacatcccaggggctgctgattggcctgtacagaagagggctggttctccagcgccaccaatgagaagacgcagaataggggagcgtcacacccagtcccaggtagtatgcaaatataatgtcacgtgacgtcaggctgagctggagagtgggcgcggcgctgggtgtaggttggagtcaaacactagtgaaataatttttgggggcgggagtagggagcagtgtcaaactttacacagttgagtccctgaatcacagagaaagcgataccttc

SEQ ID NO: 31547 - DNA, 1183 bp, Artificial sequence
  DNA replication origin
aaatgggcccatcacgcaccgactttggctggaggaggcgttcaggaaatgtcagcttcctgccctcatccgccctcatctcacgtttccctctgcttcccccctccttttagttttgttttaaatccctccctcctgcgccctttctcttctcggctccgcaatcttagccaaaccgcagcgtttagcaatcctgcgcccacccggcgccctgggagcctcgccgcggccgcgacccgcccccggcccggctcccgcgggggcgccaccgccgcgacataccccgccgggggtcgcaccccgacttgcgcacggccctgccccagcccaccccggatcggccgggtccctcctctggcggcagcgccgcagcccacccgccgccggggccgcggggaccgggcggagctggacgcaccggccagggccgtgcccgggtggccgagggcaccgggaggggcggcgggctcggccgccaggactgccagcgccagcctgaccgcagcccgagggcgacgctgcaaatagccgcggtttccagcctgtgccctgcctccctcccagccttccggaccttttgggttttctctgccttcttcccgtcgccctctcctttctgccccgtgccccccgcctcgtccctgctgtgcgcccaccacatcctgcctcatgcaggacggctctggcgctgacgaggtcgggaccatgcaggatggctctggcgctggcgaggtcgggagactgagagggggccaggagaccagcgctccttcgaaggaataaaatcatcatcctcctcatcatcacaacaattaagttagggttaactgagcgcgtgctgtgtgtcagggactctgctgaacgctttaccggcaggaattcatgaaatctttactacatactaggagggtcagcgtcaatttgcagatggagaaaactaaggctcagacactcagtagagactaaggtcaccccatctgcatcaggagaatggaaggccatctcccctgtctagaggcccaggctgtgattctgcctgaaaccctgtgggtaagaccccactggaaggtgggaaagagctggctggggggtccaagccagtcggccaatgaattctcagtgtatcctacagcaagcccggcctgcctcagtttccacacctgtgaaaccaagaggatgaacg

SEQ ID NO: 31548 - DNA, 1377 bp, Artificial sequence
  DNA replication origin
gccgtcctgcatgaggcaggatgtggtgggcgcacagcagggacgaggcggggggcacggggcagaaaggagagggcgacgggaagaaggcagagaaaacccaaaaggtccggaaggctgggagggaggcagggcacaggctggaaaccgcggctatttgcagcgtcgccctcgggctgcggtcaggctggcgctggcagtcctggcggccgagcccgccgcccctcccggtgccctcggccacccgggcacggccctggccggtgcgtccagctccgcccggtccccgcggccccggcggcgggtgggctgcggcgctgccgccagaggagggacccggccgatccggggtgggctggggcagggccgtgcgcaagtcggggtgcgacccccggcggggtatgtcgcggcggtggcgcccccgcgggagccgggccgggggcgggtcgcggccgcggcgaggctcccagggcgccgggtgggcgcaggattgctaaacgctgcggtttggctaagattgcggagccgagaagagaaagggcgcaggagggagggatttaaaacaaaactaaaaggaggggggaagcagagggaaacgtgagatgagggcggatgagggcaggaagctgacatttcctgaacgcctcctccagccaaagtcggtgcgtgatgggcccattttacaggccggcgctgggagaaggcctccagccattaaggggcagaggtgggattcgaacctagacctatctgctgctcgcgggctctttcatcttgactgaggagcgcgaacccgagggagtggggcgtggggctgggaggcgaggcgaaagggagagggctcggtggggggtcatgactgcctggtggggaccctggggacaggggcagccgcaggttgacgatctgggttccttcaccgaccacgcacgaagggtggggggaggtctgcttcagtctttcccgcgcccctccagcgcccccacgtggaaacttctgaccacctcgtttcccctcccagagcgccggcgtggcgagatccaggctgggctggagctgggtcctggacttggaaaggcctgtccctggatagaggaacaggagataaagcaggggcagggctgccacgggcagggggcctgggtgtcctcgggcacgtagtgcggcccttctagtggcggggagggtggtgggtaaaggtagccaggagtgcttgactgggactttgcaccctgcgcttggccctctcccgctgtgatggtttaagacttcggaaaaaacaactcttgccccaagtctttgaggttcctttcatgcattcattcactgattctggatttactgaacacctttaaatgagagttgcatgcgaaccca

SEQ ID NO: 31549 - DNA, 820 bp, Artificial sequence
  DNA replication origin
cgaagggtgtctaggcagcgggaacagcacaaaaaggtactgaggcttgaaagaagacagttctcactgggtttaagttcaatgagagcctgtacaggctgtctgggaaatggggagcctcgaatgcaatgctggggagcttggattttatccaggcggataaaatccctagggatttttatttctcttaagggctcttaaactctcctctcctcaaagaggtgatgaggaggagggaatggagatggggaggggctggaggcagggaagccttttaggaggaagtcattgtaatagtccagggaagaaatgggtcggcctcgaaggcagacctggggcttgggagaagagggctggggccagtgacattgcagaaggcatcaggcaccagtagatctgagacctggagggaaggaggattgggaggaggaagaggaaggagagcaggctcggggtgggggcgggtgggctgtgagtgtccatttggacaatttcatgggagatgctggagatgctggagctccaggggcaaagccatggagctttaaggaactcagtgtttggggctggtgaagctagaggagaccaggaaaaccctgcaaaatcaacaataacaggctgacatggagacctaggtaggctatggcaagggggtgggatgggagagaccgagaaggagaattagaagggcaggtgcatcaggagagagaagaggtgtggacaccagggagagtgacacttacaaaggtacagacgcatatgtacagacatgtacatgttcacacctgataagggcaggaagcatacacttctgagatga

SEQ ID NO: 31550 - DNA, 975 bp, Artificial sequence
  DNA replication origin
tagccctggtttctggaggagccagaggtctttcatccttggaggcgccggccgcagtgggactcagcttgccaacgctgggctcctgggctgcaggcttcagggcagagagtggggtcagggagaagaaggggcaaatgtgatcctacccatttcaggggccagagttgagggccaagtggtgatgccaggcagggcaagcaaggcttgactgccatgctcagaatatgtccctgtaagctggagggctcctgtaggtagtggagggcaggcctggtggtgggggagagggataacccgctgcctacccctccagcccagacccagcctaggcctagtatgtccacagcgtcaggtttattctctggtgcttagctctggcctgggaatctgggggcctgtccttaggagaagtgagcaggggcagagttcaaggagtagggagggggtaccctagactgcctgccatgtttgggtgttcatatttggagaaggtgggagggttgggggggcagatatacacgtgcaggagagaaagaggcaggcatagagcagcaacaacatgccacgtggtgtgttggggtctacaggaggggcgcacatgtttgattcagcactatgtgctggggctatgtagtctgaacatggtgtgatggggctggtgggctgggaccccatgaggtatggaggattgtgttgctgggatctggtggtgtgtgggtgtgagatgacccatgggtgaccgtggcatgctccactgtgggtgactaggacattgtgtggctccatcatgctgtccatgggggcagcctgtgagtatgatcggagatgagggactagagtttaaactgtacgactgtgatcttgtggggtgtgtaattatccccatggatgttggtctctgtgtgtgagactgtgagtaaacacatgtgtggatggagagtttggggctctgactctgtgtgtgcgtgtgtg

SEQ ID NO: 31551 - DNA, 1117 bp, Artificial sequence
  DNA replication origin
gacgaagctcggtgaagccttttgtgggcctgacatctaactctgtgcctgcgcagccagggtgtgtgcgtgtgtgtgtgtgagcgcgcgtgggggtgaacaggtgtgcacaggctctcggcacgggtgggggatggatggatgaactgcccggccctggatgcctcgcctcagatccctgtgtcaggtctctctcctgagccctgggggagtccctggtgggtggggctgctgtcaggactgtgttgtgatgttctgggcgggagggcgggtacagcacaggccctgacctggttgggcaggttggcccaccctgagtggcacctgtgaccaggcgccaaccccacccaccgccctttgaagtcatccagcctggtccagcccctcttctgggtcacctccctgaaaagaaatggggtcctctcagaagacagctcctcctgcccagggctggttccagtgggggtggggcaggcctggctccaggaggtcccagccccctcccacatcaccagtcactttggagctttgacctggcctccgcagggattggcagaggcccaggtgaagggggctgagtgaggggtggggaccggcaaggggttggagggctgatggagggagagggcttaaagaagctcagtgacaggcaaggggttccaccagggtggtggggacttgttgaggaagccccctgtccctttctgaatggcccatcggcaggaggtggcttggggtgttttagtccccaccatcttcacacacacatcccgcaccctcactccacgcaatgctctgtggctggcgtttctgtcttgtgtaaagtgttgggcaatcccagctctaagacagccccagcaccttcgctggatcttcacccctccttggcgggtgtacagccagcagcccctgtatctgtctacgcagcacaggctgggttagcacaaaaaagccatctgactcctggcctgacttggcactcgcagagccctggccatacccggctctaaagcctaagtccgtctcctcagcacagctcaggccggagctacaggctcctggatcctttccccatccgccccgcccggccctgagctgacctctaatccgcagggag

SEQ ID NO: 31552 - DNA, 1479 bp, Artificial sequence
  DNA replication origin
agccctagggtcctaaggccagagaaagggggagggcaggggcaggggacctgcacccacccggcaagcgcgcagaggccaaagccgccccctcgttagccaggcgtgtctagactcctctcctgcccctcaccctcctgctctgcgaccacccggcagccggcagcagcaagggggtgcggccaagaaagggttaatctggcagcgcctttcatcagcagcttggcgggctcccaaggcccacaggctgggtacctgggcgcctacctccgtcggtggggcggggacgtgaccacagggcagccctgccgtctgcattcctcccgcgtgagtgcgtgagtgacggccgccgcgccggagcccctcgccgggcgcccgccccgcgggccacgcccgcctggcgcgcggggcagggggcgggcccgccgtagagagggtgcccctccagctgtggcccaggctccgtagggagccccgtgctaggaggtggatcaggcaaactctgcaaggagcgaggacgctgccgggggacacaggaggagcagactgtggttggggtcaggactccggaatggagtgatgcccagggctccctggaggagtgataagacggggtaggcaccggcaggcctaggccaagcaccctggaaattcggctgtgtccccagagtcctacccatgctccaggtctccacataaatttcagccttctcattacatagtggtgggaccggccatcctcaattcctcttccctgaactcaccagccctggcctttgatctctcctgggacctgttgatggaaacaggaagtcgccttaggcttgaagcaaattcaaacagggtgtacacaggcaagcaccgcaccttcaggcttcttctagggctggggctggggcagactccgagatggagacagtagtgccaggacagggggagagcatccttctctctgagaaggctggggaatacataacccccaagcctgggggttctcggagaagcccagcagggctacagaggggccttcctagaggaatacgattcctaaaaaagagcctcccccagaaggagagctcagcctatcacccactcctcctgactcctgggagacaaaattccctcacacaggtccccttgtccacccaatccttctggaaaactggcagcctaaatatgacagctagacagtccagccctaaaatacgtagcttctcaaatgctcaggagctccagagtccttggactcagtaggaaatcagaagggatgaacccctcaatgatttcccaagtctcccttcaaacaggcacttcaagctcaatttgtatgcaaactcagctcttgtttccagcctctggattcttttgttgttgttgttgttgctgtttgatggagtcttgctctgttgccccggctagagtacagtagtgtgatctcagctcactgcaacctccgcctcccggggccaagcaattctg

SEQ ID NO: 31553 - DNA, 1171 bp, Artificial sequence
  DNA replication origin
ctctctgcagtgcagagaggctggattgagagcagcatctctcagtcacctccttggggttcacggccccaagctgggagagcccttagagaccaagaagatcagctgtctctcacaccctaggaaattgaggcccaacgggatggggagtccaaggagtcagggtcagcggaattaaaccccagtctctgactcccagtccagtgctctttctggggagtcctccccgagcctgcatctggaggacagagtccaggcctgttccttctcccatcccctcactgtgcccagaaggagagaggagcaaacaggggtccccaccatcctgcctttctgtcctgccccactagcctgggcccagagacaaggccgtggggtgggagggaccacagggggcttcgttgagggtctctaatttcctcctgctccttgatgtccagagcaaaacaggcctcctctgcccaagagatttccaagcataaacagaggtcagcgccccccttgccccggaggtgccaaggtggtaattaggcttgggggtgcatcctggaagggtgggggtggggcggccattatcctggggagctgcgctgggcagaggagctgtgcggtctgggcaaatgggtggtttgtaggtggtctggggaatgaatgactgagtgtttgggagggaagcttgcgggagggaggtggagggggagggagcagagggattggagagtagagcccggagtcttccccccagttcactggtctgagcccttgctctcattctggaggcatcactctgagacatatagggtggggggtggtcttggggatgccgcctggacagtggaacacctggggcgctgtagcagggagcaggctctctgctgagatcaggggctctggagagtcaccatctccccacctgctccctcagcttctggaagggtgcagggaggaggcgggtggaggtggttcttgcacagggtccctggcatgctgcagggtgctggctaaagcactcctgtgctgagcctgctcccgctttgtccccacttccagccgtgtctaacccctctcacggtggggacaaattccttctgggatgagaaagaccctttgactctcaaccccaggagctgcagatccacaagtccccctgctctgacccccacaatgcccc

SEQ ID NO: 31554 - DNA, 1369 bp, Artificial sequence
  DNA replication origin
ctctgggctggtaagctccactcctctggcatcagcaaggtggtagaagggaggccctcccctgaaggggcttgtgattctgcagggaccctctgcctttccaaggctatgcccccagcccctgcaaagtctaccctgaccaaaatcctagcagctgctccatgagggtagggaccagtttttgtcaggtgcccagtgtgggctttggcttagaggaggtgcccagaaaatctgaaatgaatgagtgcatatggagcagctttggggagattgaggaaaacccagatgtgtgaaccttacctgcagctgtgggaatggggagtgggcgggagagagaggaccatggggtggggtgttggtgggttcaccctcaccaggcaagactgagctggcctaggccctggaggccagggccaccagggctgggctggggcggatgaggtggtctctgtggggtccctctcaggatccctccttcccccgtaattacctctgattagcttcaccacaacagccaggctggaaagagaggggtgtttggaacgtgggggaggggacaaggtggagcagagcactcacgacaagccacggaccccagcagagctccctccccacagctcagaacacacacacacacacacacacacacacacaagtgcgtgcaggcgcacacaggcacacacacatatgcacacaggcgcaccacagccacacactcaggcttgcacatacacaggtgcacacatgcacacagccacacacacataggtgcacacacacaggcacacccgtgtgggtgcacacacacacacacaggtacaggcacacacaggcacacacacagacacactcgcacacacacacacacgcaccctgagctggaaaattgcaaaggagtccatctacacaggcccacagtggcagtgatcagggcaccaggtcctttaaacaactcacccaagggtattcaaaatgcaacctctcacccgctgcagttcctgggagggaggatggctaggcgcagcttctaggcagaggggagcggggaacagtgaacggaacaaacacttcagttgggaaaggggctgtggcagacatgtctactggcacaacgcaacgcccaccctggagcccccttgctggcagctcagacagttcctggtgtccagccgctgactctgctgtgtccctgcagagctgagggatctgcagacagctttgcccttgtccaccggcgtcctgccctcacccacccgctccttgagacaatccagcctagggccttccctgggagccaagaagctggggccccttctttctaacctgccaatggaaccctcgcgttcccccagactcatattccaggaag

SEQ ID NO: 31555 - DNA, 970 bp, Artificial sequence
  DNA replication origin
tcccaagaacctgagcacctaagatatggtccctagatgctgggattgtagcaatcgtcatcataatgatagcatcaggcactgtcacaaaacttcacatgcccatctcaccgctccacagtgagcgaactgaggcacagagaggttcagttagcttgtcccgagagccacggaatggggagcccaaactgggtctgcctgacttcagaatctgctcacgtggcttctctgcagcctttttgtccctaaaccctgctctccgtagggtctgtgattcagcataccactaagtccaacactaagtcatgactcaacatctttggtgggaaacagcaggtgggaggggtggatcctggcagggaggctatggagacaactatctcccatcctcctcttctgggtgctggaaagcttcctggaggaggaggaagaggaggaggaggaggaggaggaagaggaggaggaggaggaggaagaggaggaggaggaggaagaggaggaagatgggcaagagagggcagaggagaaagaggaaaggaagagagtatttcaagatggctagtaggggtggccattccagggcattacctggggcacttggaggaagatgacgttgtttgaggctagacgattggagggacccagtgggggcaaggtgggaggacaggagtctggtttgggtgcattcccttctccaccagcccatgggcccagtgtctaaggacttagagcccagagggcaaagagggctcaggccatggccctctgagaaagcctcctatgcctcacccctcctccagctgctcagccctctgttgctccaggcgggaggccactttcagccactctcagacaaaatccctgggggaaggcccccccggctgctctctcccaggactgattacaagcaaacagctggaggcaaacatctgctcctctcccaggggaggactgtccttgttccctcaaa

SEQ ID NO: 31556 - DNA, 1142 bp, Artificial sequence
  DNA replication origin
ttccagggcattacctggggcacttggaggaagatgacgttgtttgaggctagacgattggagggacccagtgggggcaaggtgggaggacaggagtctggtttgggtgcattcccttctccaccagcccatgggcccagtgtctaaggacttagagcccagagggcaaagagggctcaggccatggccctctgagaaagcctcctatgcctcacccctcctccagctgctcagccctctgttgctccaggcgggaggccactttcagccactctcagacaaaatccctgggggaaggcccccccggctgctctctcccaggactgattacaagcaaacagctggaggcaaacatctgctcctctcccaggggaggactgtccttgttccctcaaaggtatggagcctgcggccatcttccctccccattaaggagacagctgtctttgcgggcatccaggagactggacagagagaagacaaaaaataaacatcactgagtgccagccttcaggcaagtggaacagcctcattttgccaaggggaaaactgtgacacaggcaggggaagtcccacagagggtcgatctggcttcaactctggctctgttctggttgtaaggtgctaggggtctgtgcccagtggatgcactctgcttctcccccctacagctcccacccatgggtttggccacagatgagttcagaattccatgaaggcatgggttcctcctggggacaagggtacatagcaaggctgcgggtgcctctcagcagccccagggaggcccgctccccacttcttgttgatgctacagcttttctgccagctgggttgtagttactgttgacctttactgagggccttctaggtatcaggcactgggctaagcatcttaacagatgccatgtttaatcctctccacagccctaggagataggttcagtaactctcaccattttaccgatgacagaactaaggctcagaaatgtgaaataatgtgcccaagattacccagctgtacgcagtggaggtgagattggcatccaaaaccttccctctcaagctctatgccactccctttggtgatacaattgctgagtatgtggctctccgtctcccttaaccagggtccggctgga

SEQ ID NO: 31557 - DNA, 885 bp, Artificial sequence
  DNA replication origin
ccacccagctccctgtctcttgggcatccagtctcgccacctctctagcatttctgccattataaccgaggttcctggactgcaccaatcgctctgcaaccccagcacctctcggaggagaccccgaggtagaccggcctggagcatgcgcaccgcccctctcccatttaccacttctctacagcgggctgtcccggggggcggggcccggctgcaagtctccgtgaggtcaccgcgggcggtagccaatccgggacgtctaagagggcggggcccccgtcgggtcccgggaaccgaacccgatggagaggagggggcccccatggatttagggggggaggggaaagtcatggggggcacccccccggaacccctttcccaggcgcgcgttctccgctgaaagaggctcagagagacactttctccgggatcttaagtgtgggggctgctggctggggggcccgtccggcccaacgccggaggcttggaaaagagagttggcagcgggagcggactacgtgccgggccatggcccttctgcccgggccctggccacaatgacctctttgccctgccccctccccggccgggacgcctccaaagctgtcttcccagacctcgcccctgtcccgtcggtagcggctgcctacccgcttggcttgtcccctacaaccgcagcctcccccaatttgtcctactccaggccgtatggccacctcctgtcttacccctacaccgagccagcgaaccccggagactcctacctgtcctgccagcaacccgcggcgctctctcagcccctctgcggacctgcagagcaccctcaggaactcgaggcaggtaagttcggccgtggaggctcttcccacctctggggttcggctc

SEQ ID NO: 31558 - DNA, 1021 bp, Artificial sequence
  DNA replication origin
acagcttttaaaaccaaagttgtgcaaagtcctggacatggaagaaataagtccataggaaaaacgtctgagacccacccctcctctcggaacggaggagaggggagagagatggctcctttagttctttcctctaaagccacaaatattaaaagattccctcacttagggggttttctttggtttcaccctcaaatcttaaatgagggctagaagtgcagggcggtgaccagttcaggtccccacccggagtcctcgtcatgatgtccactgtcttattggccgaggggccgctcgagcagggggagaccaccagaggctcaggaggaactaggcctggcaagttttaagatccacggtgccaggtgccccagcacaggcaggacccgcaaaccctccacactctcccccatcccaaggtctccagtctgggaacaggcactaagtttaagaagctggaagatgatgagccatttaaagccaatccaggctcctggagcaggtaggggaatggctgtccccactggggtggaatgtccccacatctggaggggtaccccagtgtctaggcagagggagggaggttcagggggcatccttggtccatgcaattgtcatctggaagcgcttgggtccctggaggaaggggcaagggagggggaaagggagttccttttccctgtgctcctcgatgattcctgagtggctaggacggaggcgccttctgcctggtcctggggtcctttgtcaagggtgcaggccagatgggtgctcagtacacagccccagggttgggcgggggcccgggagaggcatggtgcagggtggctggctgaggcggctgctgctgtaagtggggtccactcaggttctgtgcgtgataccaggagttggtggggtcgtccaggtagctgggggaggcactgtatgggagcggcgggggcagctgactgcgggcaggggccggagtggagtgggaagaggtgtcccagagggcgggtgatggtggtgagttgcaggc

SEQ ID NO: 31559 - DNA, 987 bp, Artificial sequence
  DNA replication origin
atgtgtgcagactgtctgtgtgcatgtataggcgagtgtgtttgcacacatgctgtgtgggtctgcatgcaccggaggatgctcatgtaaggagtgtgatcctgccggggtcattgtgcataacgatgggggcatgtgtgtgtgactgtgcgccctgaatgtatatgcgttctgaatgcatgttcagaaatgtgtgcttgcatcaaaataccacattcctgctcagcacttgaacgctcaagagaggccaaattccctacctgaaggagatggggactcaaaagtgagtgccgcacccccaccctcatccagtccctaaagcccccagcagcctgtcactgctcaggggaggagcagtggatgcctggctccctccaggtgttgacaggcgggcctaggttgtggctgtggctgcgtggggccccatccgccgggaatctgggtcacctggtgaggagctgattcattgtttgtaccagtcatggggtggggagtggcagggggagggggagataccccaggggaaatttggggaatcatggctcacctgctcctgagtccccaggtcacccccattatccagcccgagcccaggagaacttctccacacctgagtgtgtgaatgtgggtgctcatgttgtggggtgcttatctgggtgtatctgtgtctgcgtgtatttttattgtctggtgtctgtgtgtgaggctgtgagtgggaacgtggctgggtatggagatgtgtatgtgggtgtgtttgtctctgtgtatctgtgcacctctgcttatgggtgtctaatgtgaatgaaatgctacaaaccgtccatctcccacctcaacggccttttattgagtgcttactacataccaggctgctttaagttttttatatgtcgtaccttatttgagcctcagaatgaccctatgaggcaggtaatagtgctgttctcatccccattttgcagacaagaggaagtcaagaacaagaga

SEQ ID NO: 31560 - DNA, 1033 bp, Artificial sequence
  DNA replication origin
gctgggagcgccgcgttgtgggccgcggccagttctggctctggggccgcggctcccccctgggccgcgggcagcggagcgcgcggccgggaatcccgcggcgagtcggtgggcggaagcgaggggcgtccggcggggccctggagggtcgcaggagtcgcaggccgaggctgaaccgccccctcttccgcccggtgcgttccccgcagtgtcggtgaaggaggagccggaagcagaggtgcgcatggtgaatgggaagcccaagaaggtccgaaagccgcgtacgatctactccagctaccagctggccgccctgcagcgccgcttccagaaggcccagtacctggcgctgcccgagcgcgccgagctggccgcgcagctgggcctcacgcagacacaggttggtgtttggctgtccagggccgcgggggcgcgcgggaccccgtagttccccgcgcgctgccgagcctggctggccactgaagggccctgcgggctcctggaactcttgcctttgggatgggggcctgcgaggttcaacttcggtgggaaggttctgcgttagcacgtgtacaagtgagcatagttgtgaacccgtgcaactgtgtatgttcccctactccagaattcccagctcccaagtcccccagcagtgctagtcacttagtaggagtccacatcgtgttttccctccaggctaggcatgtgtgcagactgtctgtgtgcatgtataggcgagtgtgtttgcacacatgctgtgtgggtctgcatgcaccggaggatgctcatgtaaggagtgtgatcctgccggggtcattgtgcataacgatgggggcatgtgtgtgtgactgtgcgccctgaatgtatatgcgttctgaatgcatgttcagaaatgtgtgcttgcatcaaaataccacattcctgctcagcacttgaacgctcaagagaggccaaattccctacctgaaggagatggggactcaaaagtgagtgccgcacccccaccctcatccagtccctaaagcccccagca

SEQ ID NO: 31561 - DNA, 1138 bp, Artificial sequence
  DNA replication origin
gacgcggccgggtcctcccttcgccttctggacacacacccctgcctcgtctcttccgcctctctcgcactccggtccgttcctgtcctctgcggaggccagccctggggaggtgcagcgcccgccaggatgagtggctccttcgatcgcaagctcagcagcatcctcaccgacatctccagctcccttagctgccatgcgggctccaaggactcgcctaccctgcccgagtcttctgtcactgacctgggctactacagcgctccccagcacgattactactcgggccagccctatggccagacggtgaacccctacacctaccaccaccaattcaatctcaatgggcttgcaggcacgggcgcttactcgcccaagtcggaatatacctacggagcctcctaccggcaatacggggcgtatcgggagcagccgctgccagcccaggacccaggtgagggccacggggtcgcgaggacagtgggagacactggaaggttcccgagggaggaaaaggcatggactggaagccaaaatctaggaaaacttctaagaaaagtactgtctggagttagagaagttggcctagatgaccctcagagggaccaggcgaccttccagccccgggtgtgcaagcatttggggcgcgatgtgcgcagtgcgccgcggtcccggatgaggatcgggatgagctgagagaggaaggggaaggctgtgggttgttaggaaacctccgaatcgaggtgatttcgtgggcatttcagcaggcgatcctcgatcaagtcgcagagggcttgggggtaggcggcaggggctggaaactctaggggccctcctttggataagggatggggagactaggagtcgtgagggggcaatgagaaggacccacggaagttgcgggaaagcggagggaagcagccaccgagaggcagagaagctgaaaaagggaaaagtgaaggcagcaagagggaagtatggaaagacagtgagagaaagggcagaagaaacaagaaaggaaggagagaaggaaggggggaagaagggggacagggaaagaaagaaagtctgcactatccttgcaacttttctgaaaatctaaagagattctaaaatgaaacttttttaaagggcgggg

SEQ ID NO: 31562 - DNA, 1042 bp, Artificial sequence
  DNA replication origin
ggtcttagaaccaatctcccacgaacaagggagggctgtattcttttatgtttggcttcttttgctcaacattatgttgtgagatttatccatattgttggctatatttatagattgttcattttcattgctgtaatgtggatattttctcatatgaatatatcgttatctatttttctcttctactgttgatgggcatttgggtagtttccagtttgggactatcatgagcagtgctgctatgagcattcttgtacatgtcttttggtgcctgcatctatgctgttgttgggtacctatgggtggaattgtgtgccaccaggtgggcacatgtttggctttagaagaggctgccaagcagttctccaaagtggttgtgccatcagcttaagtgtgatcatgctgagtttgagtgtctttgagacatctaggaagagcagtcctagccatagttagcaacatggatctgaaaaatcagtaaagaagctgggattggagatgtaaattgtgagtatctggcttcttgcggtaagtggagccattggcatgggtgagatggtccaggaaaggagggagagaacacggggcaaaggtccaggcagcacctgtgagagaggggtcagagggaggtgggaagcagtgcagagagagtgtaccctgaattgggtgtggggagagctggggggagggttcaaggaggagagagtagtcggcaaggtcaaatcttgctgtggatttgtagtcagggtggggtgaggactgagatgcgcctactgggcaatgtctcaaggaggaggttgatgatatcaggaagagcgggtaaggggagtggggagctggaagcggttcacagctggctgaggggccagtgggatgcgaggcagtgaagagaacacgtgccagccactctgtcctgatggctgtgaaaggaggagggaggcagagggcggtagctggagggtatttggcatattgggagggtgtgtgtttgaaatgggagcagcatgtttagatgccaattatcacctccagtagagaaggg

SEQ ID NO: 31563 - DNA, 1211 bp, Artificial sequence
  DNA replication origin
tgtaaacaaaattgtatttatgtactgtctatggctgctttcttgttgagacagagatcacatggcctgcaaagtctaaaataatttctatctggccttttacaaagtttgttaatctctgctgtagctggtctgttgatccattcattgaacaattgatagcacatactaggtgccaggcccggagtaaccttggctgcagtcatggagataagggatgtcatccctgccctcttggcccttacactccagagggagagactggtaggtaggggtcacctgtctaaccacaggaactttaccacataagtcaaattattgttgagtataacagtgggcacacaatccaatgcaccactgaaaagatgaatgaatgaatgaatgaatgaatgaatgaatgaaatgtgggaaaaggcagagaagagaaaagcacagagggccgcaggagcccagaggcagggctctcagtgtgaggggctgggttgtgtattatggggggcctcttggtagtaaggctggtctcccaggacaaaagggaattagccacctgaagaaagggatcagacagggaggcatgtgctcccagggaaatgcaaggcttgtggaagggctggagccccaaagctgggcagaactatgggactggaggctgcagagctgacgtgctgctggtttgggcttgagtgtgtagttaatgggaggcaccaaggggcttcaggctggacccttgtatcgctgctctaggggagcggattctggcacaggatgcctgcgtgccattgggggagagagggctgaggcctggggcagggcggtgcaggacagtgcagggcagtggaatgaagaggatgggggtggagggaagatttgaaaggtatatggaaggcaggaccaatgatacctgggcattgaccaattgtggaggatgagagtgtagttggttgaatgaacaatagagctgtcactgagaaagggaacagtgcaggaggagaatagggtgaagacagcaagttcaatttcccacgcgtggagttcgagccacctgtgggacattcaatttagagtcctgaagatggcaggactcacagctctggactcaaaggaaaggtctgtgctgagctacagatgtgaaggctgtgcacatctgcagattgtgcaaggaacatgtgaaccgggagctgagaacaagaaacaaaaagaggaacccaagg

SEQ ID NO: 31564 - DNA, 773 bp, Artificial sequence
  DNA replication origin
agctgggggccggttgcccggggcagggacggcggcgacccggccgctggggaggcaggaagatagacccacggatcttaggaagggatccgagagcgcagctgtgaaactggctggggctgggggcacgaaaccgatcagcgctacggagcgcagcggccggcgggttccagtgtcctccggcggcgcggggagcaggtgaacaggtcctcacgcccagctccgcgccctcacgcgctctcgccgggaccccgcttccgctggcagccatgggccccggccccagccgcgcgccccgcgccccacgcctgatgctctgtgcgctcgccttgatggtggcggccggcggctgcgtcgtctccgccttcaacctggatacccgattcctggtagtgaaggaggccgggaacccgggcagcctcttcggctactcggtcgccctccatcggcagacagagcggcagcagcgctacctgtaagtgaagctggagggtgtggggtgggagcgagagagtgtgcgagcgcgggatgcgggtccggagctgagtcggagcccagggcagctggcccttgggagccaggattaaggggcggccctctggctgctgggggttggcgggaagtggaggattgggtgtggggtcgggcagtaatcattggcaagtgctgacggggccagaacctgtctggacgccacccctccgccctttagatctctcatgagagcggaagtggggtcccggtggctgagtcctctcccattctgtgaaccg

SEQ ID NO: 31565 - DNA, 1507 bp, Artificial sequence
  DNA replication origin
gtccagagatgaaggtgatggggcagcaaagagggtcccacccctgggtttctaaccatttctgaggccttatgaatggagaacaagaaagctgtgctctcccctcctcccacccccagggcagtggacaaatactacgattttgggtacactttcagggagtccctgcatctcttgaaaaccttctacgaaccccagtttaagagcctgtccaagaccacgaaccatcccacttttccaaagagactttcaggctaacagaatatgaggctgcagctcgtcttactagttagttcctctgagttgtgcactcaggcagctgtttgcatctggctacacagctggctgcagctaagcccagctggctctcccaaatggccgaggggtcgaatttagtgagatgaagagaagggccaagacacagaaccacccttaggaaagactgaggatactcaagggagagaactgcccctcagaggttcattagctttagaaccttctgggctcttggcaggctgaatgccagctccagcttcccagacagaaaagtagaacccctttgctcagccaccctgggcggggcccatgggtaatgaggatgcatccaggttctggcctcagcgcaagagccttcaggtgctccttggagaaaggcacatgtgcagaggattttacgcactttatctcgttacagccccactaacatcccagcagaaggcatgctgttcccctccctccaacatgtgcggaaattcaggttcaggtattggtaacagatctgagacaggacactggccatgggacctccaagcctcttctccctctaccatatcaagttgcttctcacaggccagcagcagtgggaaagagcactagatccaggtccaacccgttttgggggaaacctggcccagggaggggaaatatcttgctcaaggtcaccaggcaaaagggttgcggaatcattattgactctttctttccagtctgatctctttacctatgttatcttatatcatgcagatttggcattgaaagtctgaaaatctttttctcagttagggcagaaagagctgatgtagaaacttgtgctcatggtggctcaggatctccaaaagatagagggttggctaaggccaggtggcagctgctggggccaggctgggaagggtgtggtagccctagcctctgcaagagcaagatggagttgaggttaagtccaggtaggtaggctgggtcaggagggcagaaccaaggcgggggcagagtttggactttggacattctaaacttcctcaagctctgcaggccccagccagagcagggagattttccagtgtaccctggatgtgaccacgtcttcttgttcagtggggtcagaggccaggtgggggcagaggctaggtgggggcagatgcctggcagatcgcccagcccaaagtggtggatggtacctgcttaacctgtcctaaacaccgtccctctttggacagcttcacctccccca

SEQ ID NO: 31566 - DNA, 896 bp, Artificial sequence
  DNA replication origin
ttcatggccccagtggctctgcctttggtttatctgtggccagcattggtgacatcaaccaggatggatttcagggtatgagccagcactcctcccccagcacccctcctccagcacccctcctcccagcacccctactgactgagcaccagctgcacatcaggcttgacagggcccacagatgagacaggatggggccggacctggggagctcgcagcagtactagagagaggatgtgcagatgtgcagaggaagcacagaggcaagctcagtgggcctcctggaggagcttgcatgccactgtgcagccaaggctgggctgagagtgcacagtagagaactgatggggcacaacatgggtgtggaaactggcctggtgtgcccaaatctagcgggtgtagagtgttcacatcagagaggaggctggagggggagtggggtggggtggggtgaggatggatgctttgaaagccaggcagagtatcttagggatttatatttgggtaatggtgatggtggggtcatggggcatccagagaaagttttagggcagggatgtgatataataactttgtaccctgaaggatgattctggaaggggtatggaatgagtgattgcagggatggagcaaggccaggggagttaagatcaagaatgtaatatctcaggtgggagatgataaggaatgggacaaggtgggagccctggatataggggtcctcataagtgttctgcaggacttggggaccaatcggacctggggtatcagggacaggggcagacccagggctggagtcagtgccatgggggcacctggcttatctgaaagtcacttctctgataatctcagtttcccaggacatagctgagaaccaagaggaaggcaaaggagcc

SEQ ID NO: 31567 - DNA, 860 bp, Artificial sequence
  DNA replication origin
ccctgtctacctgtagccctggcctacactctggaggctgacagggaccgccggccgccccggctccgctttgccggcagtgagtccgctgtcttccacggcttcttctccatgcccgagatgcgctgccagaagctggagctgctcctgatggtgagggaggagcaagggtcaggatgagggctcccaggtccctggaggaggtggccagtgtccccctagatcaagggtgagggacgggggtctccccagagacagaggttggggacatcggtttggaaggctattggtgtgtaggagtacagtgtacagcacccacacatgaggagtgatggagacccttggggtggggatggggccaaagggcttattacctccaaggaaagtgaggagtgtgggagctcttggctcagcccacctctgggaaaaggggtccctgagtagggagcaaggtcagtccctctctgggacatcagggtggaaggggagagctcaacctggagaccctgtggatggggaggtgaagggacttttgaggaggagaagccctgtctctcctcttggagggtcaggatagtaggaagtcgcaatttggcgaccggactggagggagttcagcctaactgtcaggttttcagggtggggggcgggtccagctcttctctggggttcagggtggtgtgaggattcagctggggcagggagcagtgcagggccgggctcagctcaccctctctccccaggacaacctccgtgacaaactccgccccatcatcatctccatgaactactctttacctttgcggatgcccgatcgcccccggctggggctgcggtccctggacgcctacccgatcctc

SEQ ID NO: 31568 - DNA, 939 bp, Artificial sequence
  DNA replication origin
gaagggacttttgaggaggagaagccctgtctctcctcttggagggtcaggatagtaggaagtcgcaatttggcgaccggactggagggagttcagcctaactgtcaggttttcagggtggggggcgggtccagctcttctctggggttcagggtggtgtgaggattcagctggggcagggagcagtgcagggccgggctcagctcaccctctctccccaggacaacctccgtgacaaactccgccccatcatcatctccatgaactactctttacctttgcggatgcccgatcgcccccggctggggctgcggtccctggacgcctacccgatcctcaaccaggcacaggctctggagaaccacactgaggtgagtggggctggcgcctggactggaagaccaggggccagaagggcggtggggcgagagggcactggggggggtggtgcggccttcacacctccggccaccccccaggtccagttccagaaggagtgcgggcctgacaacaagtgtgagagcaacttgcagatgcgggcagccttcgtgtcagagcagcagcagaagctgagcaggtggctgtgggccgccggccgcgttaatcggccaagggtgggacggggcctcattaactggcagggtgggggcggggcctcatggcaaggcgagcccagggacagggctttagcgggaacaggtgggatggtcagaaacggggctttctcctccaggtgcgactagaggacggggcctggctgtcccaagatgggcttttctcacctaggagaccccaggggcggggcctagttgatccgggagtgccctgggggcggggctcttggctgagtcctgggctcctgctctcaggctccagtacagcagagacgtccggaaattgctcctgagcatcaacgtgacgaacacccggacctcggag

SEQ ID NO: 31569 - DNA, 1712 bp, Artificial sequence
  DNA replication origin
gcagccttcgtgtcagagcagcagcagaagctgagcaggtggctgtgggccgccggccgcgttaatcggccaagggtgggacggggcctcattaactggcagggtgggggcggggcctcatggcaaggcgagcccagggacagggctttagcgggaacaggtgggatggtcagaaacggggctttctcctccaggtgcgactagaggacggggcctggctgtcccaagatgggcttttctcacctaggagaccccaggggcggggcctagttgatccgggagtgccctgggggcggggctcttggctgagtcctgggctcctgctctcaggctccagtacagcagagacgtccggaaattgctcctgagcatcaacgtgacgaacacccggacctcggagcgctccggggaggacgcccacgaggcgctgctcaccctggtggtgcctcccgccctgctgctgtcctcagtgcgccccgtgagtgcccgccggccggctcagagcccaagcagggctccccgcgtctttgcatccccatatccatgtcctgtgcaggtgttgtcgtctgccacgtgcccacctcctctggtctgggccttcttgggggccttagcgtctctgctgcttggagaatccggctctcaagctctagggcttctgaccttgcaccacagaggagggaggacaagccctactttgacccgaccctgaccttattcgccttctttcctcagcccggggcctgccaagctaatgagaccatcttttgcgagctggggaaccccttcaaacggaaccagagggtgagcaccggccacatcctcccagtcctcctgggtccctggctgcacctctgatgagctccttgtccttccagcctctgcctgcctgctttctgggctccctcgaagtggagagccacagtgcgggaggagagactcagtagagggtgagaagaggcccagaaactaagacaaatggggctgctagggagctgtgcacaaagctagagcaggtggaggggaggaaaccagtttgaccaagcaccaactgtgtgccagcccctgagcccaacactgtgcttctttgatatgatataattctcacagccttctgaggaggtagatgctcttttacagaagaggaaacacacacttagaaagtttcagttacctgctcaaggttatgtagctcaaaagtagcagagatgtgacctgatggagagaaagggggaaagggaggcagaggtggggtggggaggtagagacccctcacccagaataggaggaggaggagaaggccagaaagccaactagaatagtgtgcatcccctccttccccatgacatcacccccgccaggccccatatgccactctctgcctccctgacccttgtggcagatggagctgctcatcgcctttgaggtcatcggggtgaccctgcacacaagggaccttcaggtgcagctgcagctctccacgtgagtgacctcgaaaagccagtctgggtcagggctgaggtatcttggatcaccttcctaacccctgcatttcctcccaaggtcgagtcaccaggacaacctgtggcccatgatcctcactctgctggtggactatacactccagacctcgcttagcatgtgggtaccgctctccaccacccccaccccagcctgctgtgcctaagctagggttccctatccccaagcta

SEQ ID NO: 31570 - DNA, 1065 bp, Artificial sequence
  DNA replication origin
gaaatgggagtgtagaattattctggacatggctgtggtttacagagatggggcctggccttgcccttgaccttgttccaatccccagaaagcaaggtcatcacagagaggatttatgcctccctcatggggtcccaagtcaccaaggggcttagggggaggctgatgaaagccagacacccagggggctggagggacagtcagagtgacctgatctttggggtggtggtggggacagaatgaggtcagagcaggcccataagggaagaggagcagataggacagagtcagaggcccggccagctgtggggctcggggaagggggcccggaggccgtgttacccaggtgggccgggggcggggggctgccccctcagtagtcgtcggtcagcctctctgtctctgacggctggctcttcatctccgccttctgcctcttagcttcatacagggcgcgagtgcgggctcgcttgaagaagccgcactgcggaggggaggaggtggggacgggccatcaggggggcgctgggctatcctcaccagcagcactcgtggaccagggctttagggctggggagcctgggggctggggctcagtcccagcttggtggtgtggtcagaagccagagctcctgggtccccctttccagcttgcagctccccccactaacccaggccaggggtgagactgtaagctggtggtagaaggtggagaggacagggaggaagggtgggggtgagatggaagggaggaccaggatggggagacgtgggttggaggaagggctggtgagtgtgctggtggaggtcccggagcaggagtgggctgggctactaaccttccacagcaggaggatgatcagccccagcagcagcagccctgcacccacggccaccagcaccagccacagctcgatttcggccggcagctcctccaccagctccgagtcaatgtccacagagaactggagcggggagaggaggactcagccctgtgtcagcctgcttaggcccatcctcacccttcctatcctagctgggcccaggcacctgctgtttgtcctg

SEQ ID NO: 31571 - DNA, 1028 bp, Artificial sequence
  DNA replication origin
tctctggcatgggtgtcattgggggcccaccagccagcggcccgggggctgctccctgtcagtagttttgacagcaaagtcaatccagtgactgtggctcaagatggatccagtgtgaaagggggaggtgtcaccacattgcaggggccttttcctcccggctctggtgggaggctctttggcttgttttggcgctggcagaggctgagacacggcgagcccatgcaccatccgtgatgcaccagcacagtccacgagcagtgggccccacgtgcatctagggcacaggaatgcagtgcactcggcgttgtaaggtccacagcgctggccctcctgtgggaagatccccagggccagacagcatgtgcatgctcttgacgaggtgtatgtgcctgagcctgctgctaccagccaaaggtggtggcccctgtggactgtcagaggcataacttatgataaataggaagaaaggggacactgggggaggagggggtgggatcagggaggacgtcagtagtattggtcccgagtctgccagctggtcacccagtgcttcttggtgggcagggtgctccctggaggtgggtagcgctcctcctcccggatccgcactgcgtggtacttgggcatgatctgataatagcgggtccgcttaaagaagtcacactggagttggagggagaagagaaagaacattagcatccagagtttgagccaccaggaaggagtgccaggcctctccctctcccacccagaactcctcaaagccagaactcttgaccgaaacgcatcccatctctctgcactgagatacggaggatgagtttctccaccccaggccccagaggaagaaggagttgaggaaggcagagagcagaggaagaggcagatggagaccgagggcagctgcagagacagtggatggaatggccaggaagactgggcagtctaccctgaccacaatgttgggaatgggtccatttgttatcctggaagggttgctcaggaggaaacaggctagttcccag

SEQ ID NO: 31572 - DNA, 977 bp, Artificial sequence
  DNA replication origin
agcctaacacgtattaggctaatgtcaccgagcaaagaaagcatcaaagtggcgggtcgggccctaaacccacgatgggagataccacattcggccacaagagggcgcgtcacattttctccaagagaagctgggccgctgatgaaggacgggctccgggcctcccagagacacttcacctcctgggatcttgctctaaggaagcccggtgcgaaggaggtggctttctcaggtggtcgcgctagatgtccaaggctttatgttcggtcagatgagctgtataataaaatgaaagtgttaactggcatggacgatagctgctgcctccaccgccactagtagtgatggtttttactctggatgtttttcagttggaaaagcaaactccgccttttcctgagccgcttggatctttgtggaagcgggtgggctgcatatatacaggacggattcgtataggcttgcaccctggttccgaattttgcaaatattcgcagtctgggtcactgtcatccggactgggaatccccaagacccgttaagggaggataggtaacgatcatgacaggtgaaacaggtacctttgagttggagaaaagggattggttgaaagctacctagacaactctggaaaggaagggttaaaaggagcctgcaggtgaaggagatgcgagggggtagcaagggaaaggcaggcgtggaagaggaagcgaaagggctggcggggctctgggaaggaaggggttaacccgggcttcgccccgcggaggaaagggaggagtgaacacaggggaggtgggaactcggcgcggcctccccaaaacaacaggccgccccggcaaagcgtgggttaagggggcgggcccgggggaagccacgtgccggggcggaaggctattggttcgcccggagttgtttgtgagtggccattggcgacgtcgaggcgccatgacgagccgattggctgggcgttggaa

SEQ ID NO: 31573 - DNA, 1109 bp, Artificial sequence
  DNA replication origin
ggaggagtgaacacaggggaggtgggaactcggcgcggcctccccaaaacaacaggccgccccggcaaagcgtgggttaagggggcgggcccgggggaagccacgtgccggggcggaaggctattggttcgcccggagttgtttgtgagtggccattggcgacgtcgaggcgccatgacgagccgattggctgggcgttggaatgcccgccagggcaagggtagggaggaggcggccgaaccgcgtcgctgggccgaaaggtgcgcgagcgctgcccgcgcggggaccacaaccaaagtcgcggccgccgcagccatgcgctgggtgtgggcgctgctgaagaatgcgtccctggcaggggcgcccaagtacatagagcacttcagcaagttctccccgtccccgctgtccatgaagcagtttctggacttcggtacggagtgggcgggaggcggctggcagcggaggccggcggggcgctgggaggggcagccgggggctagggggacggaggagaagaaaggccccgagtgacagagaagggttgtttggaaaggtacaggcaggaaagagttaatggggaagcaggaaccggccggggcctctcgacggggctgctgatgggaatggggggcatttacaaggacggtcccgaggtttcttcgtgggcctcatgaagggtcttgaagagtaaggggcagtgaagctgtgatgttactgcaggaagggagtagggtggtatccagacgcgaaagggttaatgggagttgtcctcatgactggaggagtaggggcccctcctcccaccagaggaaaccgggggtctgctggtgggagtgaggaggcagggtttagaggtgcagccatctgtagagagacctggactgggcatgaagggtcagacacccctgggcagagggtgagattaagccaggggcagttggggaagggggctctttcagaagatgccattgggagacagtgccctgactggtagacatccacccacagaaggagctggaccctagctgccccagtgggcaaggacacttgaagatcaaatctgttccggcctggcagcctctccccagctgggcaggggccccagg
